United States Patent Application Publication US 2011/0183924 A1 - sequence listing, part 31

SEQ ID NO: 71473 - DNA, 2663 bp, Homo sapiens
atgcatttctcagaacttatccctgttgttcaatgatgtgtgtctatacagtggggccataactaagacgtatgttgcccaagctggcaagatagctctgaccttctcttgggcccctcatttcccccaaacacaggttgtctgcagtcttgaccaatggctgccagggcatggactccgctgcaggggccagtgggaggccccagctcaggcaaaagcacaggcagatatttcaggagtctgctagggctggcactgaggggcagagacagaggggtctccctgtcctttggagaacctcacgctgcagaaattccagactgaaccttcataccgagtaggggaggagctgtctgcgggtttgagcctgcagcaggaggaaggacgtgaacattttatcagcttctggtatggccttgagctggtagttataatcttggccctggtggcccagggctacagtcatcctagcagtccccgctgaagtggagcaggtacagtcacagctgtggggacagcatgctggccaagggtcttcccccacgctcagtcctggtcaaaggctgccagacctttctgagtgcccccagggaggggctggggcgtctcagggtgcccactggcgagggagctggcatctccacccgcagtcctcgccccttcaatgagatcccctctcctggtgacaatggctggctaaacctgtaccatttctggagggagacgggcacacacaaagtccaccttcaccatgtccagaatttccagaagtatggcccgatttacagggagaagctcggcaacgtggagtcggtttatgtcatcgaccctgaagatgtggcccttctctttaagtccgagggccccaacccagaacgattcctcatcccgccctgggtcgcctatcaccagtattaccagagacccataggagtcctgttgaagaagtcggcagcctggaagaaagaccgggtggccctgaaccaggaggtgatggctccagaggccaccaagaactttttgcccctgttggatgcagtgtctcgggacttcgtcagtgtcctgcacaggcgcatcaagaaggcgggctccggaaattactcgggggacatcagtgatgacctgttccgctttgcctttgagtccatcactaacgtcatttttggggagcgccaggggatgctggaggaagtagtgaaccccgaggcccagcgattcattgatgccatctaccagatgttccacaccagcgtccccatgctcaaccttcccccagacctgttccgtctgttcaggaccaagacctggaaggaccatgtggctgcatgggacgtgattttcagtaaagctgacatatacacccagaacttctactgggaattgagacagaaaggaagtgttcaccacgattaccgtggcatcctctacagactcctgggagacagcaagatgtccttcgaggacatcaaggccaacgtcacagagatgctggcaggaggggtggacacgacgtccatgaccctgcagtggcacttgtatgagatggcacgcaacctgaaggtgcaggatatgctgcgggcagaggtcttggctgcgcggcaccaggcccagggagacatggccacgatgctacagctggtccccctcctcaaagccagcatcaaggagacactaagacttcaccccatctccgtgaccctgcagagatatcttgtaaatgacttggttcttcgagattacatgattcctgccaagacactggtgcaagtggccatctatgctctgggccgagagcccaccttcttcttcgacccggaaaattttgacccaacccgatggctgagcaaagacaagaacatcacctacttccggaacttgggctttggctggggtgtgcggcagtgtctgggacggcggatcgctgagctagagatgaccatcttcctcatcaatatgctggagaacttcagagttgaaatccaacacctcagcgatgtgggcaccacattcaacctcattctgatgcctgaaaagcccatctccttcaccttctggccctttaaccaggaagcaacccagcagtgatcagagaggatggcctgcagccacatgggaggaaggcccaggggtggggcccatggggtctctgcatcttcagtcgtctgtcccaagtcctgctcctttctgcccagcctgctcagcaggttgaatgggttctcagtggtcaccttcctcagctcagctgggccactcctcttcacccaccccatggagacaataaacagctgaaccatgaaaaaaaaatgaaaaaaaaaaaaaaaaaaaaaaaagacaaaaaaaagaacaaccacagacaacagagcacaaaaaaaaagacgaaaaagaagacaacaacaggggggagggcaaaaagaaaacactcccgcacaggaggggcacaccctaagggacgaccacccgctattttaaatcaaccacatcgcggcgtcccctccatacaaacagcacgcgacattacattaaaaaccacacggcaccaccgccgcccgctcattaccatcacaccagcgcgcagacacactatgcacaaactacatctgcccacagtgccacaagcattgtgtcgagcacgaaccacacccagcctatacgcggcgggagcc

SEQ ID NO: 71474 - DNA, 2763 bp, Homo sapiens
atgcatttctcagaacttatccctgttgttcaatgatgtgtgtctatacagtggggccataactaagacgtatgttgcccaagctggcaagatagctctgaccttctcttgggcccctcatttcccccaaacacaggttgtctgcagtcttgaccaatggctgccagggcatggactccgctgcaggggccagtgggaggccccagctcaggcaaaagcacaggcagatatttcaggagtctgctagggctggcactgaggggcagagacagaggggtctccctgtcctttggagaacctcacgctgcagaaattccagactgaaccttcataccgagtaggggaggagctgtctgcgggtttgagcctgcagcaggaggaaggacgtgaacattttatcagcttctggtatggccttgagctggtagttataatcttggccctggtggcccagggctacagtcatcctagcagtccccgctgaagtggagcaggtacagtcacagctgtggggacagcatgctggccaagggtcttcccccacgctcagtcctggtcaaaggctgccagacctttctgagtgcccccagggaggggctggggcgtctcagggtgcccactggcgagggagctggcatctccacccgcagtcctcgccccttcaatgagatcccctctcctggtgacaatggctggctaaacctgtaccatttctggagggagacgggcacacacaaagtccaccttcaccatgtccagaatttccagaagtatggcccgatttacagggagaagctcggcaacgtggagtcggtttatgtcatcgaccctgaagatgtggcccttctctttaagtccgagggccccaacccagaacgattcctcatcccgccctgggtcgcctatcaccagtattaccagagacccataggagtcctgttgaagaagtcggcagcctggaagaaagaccgggtggccctgaaccaggaggtgatggctccagaggccaccaagaactttttgcccctgttggatgcagtgtctcgggacttcgtcagtgtcctgcacaggcgcatcaagaaggcgggctccggaaattactcgggggacatcagtgatgacctgttccgctttgcctttgagtccatcactaacgtcatttttggggagcgccaggggatgctggaggaagtagtgaaccccgaggcccagcgattcattgatgccatctaccagatgttccacaccagcgtccccatgctcaaccttcccccagacctgttccgtctgttcaggaccaagacctggaaggaccatgtggctgcatgggacgtgattttcagtaaagctgacatatacacccagaacttctactgggaattgagacagaaaggaagtgttcaccacgattaccgtggcatcctctacagactcctgggagacagcaagatgtccttcgaggacatcaaggccaacgtcacagagatgctggcaggaggggtggacacgacgtccatgaccctgcagtggcacttgtatgagatggcacgcaacctgaaggtgcaggatatgctgcgggcagaggtcttggctgcgcggcaccaggcccagggagacatggccacgatgctacagctggtccccctcctcaaagccagcatcaaggagacactaagacttcaccccatctccgtgaccctgcagagatatcttgtaaatgacttggttcttcgagattacatgattcctgccaaggtaggtgcagccagcaggctgcaggctctgccagtcagagagggctggggcaggctggaattgcagacagagggtggcactggggccctggtggggcccttgatggcagcagtctaagtctgaatgaagggcagaggtggtgggcatggtgggcggtgacctctaggatgttattggaacccagggttaggagggagacttcatgatttgcctgggtctgaggaaagggtgggacaatcatcctggccttgggtcttcagccatccccatttggtgggtaaggattacagaggggcggggccttgttcaaggctgcacagtgggcagaatgtcctgccctggagagctgggcagccatgctggggagtgggagtggtggtgagagggcaggggactagggaagggggttttgtgctcagggctgtggggaagtggggcttactcaggcctctgatcaccttgccccagacactggtgcaagtggccatctatgctctgggccgagagcccaccttcttcttcgacccggaaaattttgacccaacccgatggctgagcaaagacaagaacatcacctacttccggaacttgggctttggctggggtgtgcggcagtgtctgggacggcggatcgctgagctagagatgaccatcttcctcatcaatatgctggagaacttcagagttgaaatccaacacctcagcgatgtgggcaccacattcaacctcattctgatgcctgaaaagcccatctccttcaccttctggccctttaaccaggaagcaacccagcagtgatcagagaggatggcctgcagccacatgggaggaaggcccaggggtggggcccatggggtctctgcatcttcagtcgtctgtcccaagtcctgctcctttctgcccagcctgctcagcaggttgaatgggttctcagtggtcaccttcctcagctcagctgggccactcctcttcacccaccccatggagacaataaacagctgaaccatg

SEQ ID NO: 71475 - DNA, 1847 bp, Homo sapiens
gatttcccgggctgcacgaattcggcacgagcctgaagtggagcaggtacagtcacagctgtggggacagcatgctggccaagggtcttcccccacgctcagtcctggtcaaaggctgccagacctttctgagtgcccccagggaggggctggggcgtctcagggtgcccactggcgagggagctggcatctccacccgcagtcctcgccccttcaatgagatcccctctcctggtgacaatggctggctaaacctgtaccatttctggagggagacgggcacacacaaagtccaccttcaccatgtccagaatttccagaagtatggcccgatttacagggagaagctcggcaacgtggagtcggtttatgtcatcgaccctgaagatgtggcccttctctttaagtccgagggccccaacccagaacgattcctcatcccgccctgggtcgcctatcaccagtattaccagagacccataggagtcctgttgaagaagtcggcagcctggaagaaagaccgggtggccctgaaccaggaggtgatggctccagaggccaccaagaactttttgcccctgttggatgcagtgtctcgggacttcgtcagtgtcctgcacaggcgcatcaagaaggcgggctccggaaattactcgggggacatcagtgatgacctgttccgctttgcctttgagtccatcactaacgtcatttttggggagcgccaggggatgctggaggaagtagtgaaccccgaggcccagcgattcattgatgccatctaccagatgttccacaccagcgtccccatgctcaaccttcccccagacctgttccgtctgttcaggaccaagacctggaaggaccatgtggctgcatgggacgtgattttcagtaaagctgacatatacacccagaacttctactgggaattgagacagaaaggaagtgttcaccacgattaccgtggcatcctctacagactcctgggagacagcaagatgtccttcgaggacatcaaggccaacgtcacagagatgctggcaggaggggtggacacgacgtccatgaccctgcagtggcacttgtatgagatggcacgcaacctgaaggtgcaggatatgctgcgggcagaggtcttggctgcgcggcaccaggcccagggagacatggccacgatgctacagctggtccccctcctcaaagccagcatcaaggagacactaagacttcaccccatctccgtgaccctgcagagatatcttgtaaatgacttggttcttcgagattacatgattcctgccaagacactggtgcaagtggccatctatgctctgggccgagagcccaccttcttcttcgacccggaaaattttgacccaacccgatggctgagcaaagacaagaacatcacctacttccggaacttgggctttggctggggtgtgcggcagtgtctgggacggcggatcgctgagctagagatgaccatcttcctcatcaatatgctggagaacttcagagttgaaatccaacacctcagcgatgtgggcaccacattcaacctcattctgatgcctgaaaagcccatctccttcaccttctggccctttaaccaggaagcaacccagcagtgatcagagaggatggcctgcagccacatgggaggaaggcccaggggtggggcccatggggtctctgcatcttcagtcgtctgtcccaagtcctgctcctttctgcccagcctgctcagcaggttgaatgggttctcagtggtcaccttcctcagctcagctgggccactcctcttcacccaccccatggagacaataaacagctgaaccatg

SEQ ID NO: 71476 - DNA, 2226 bp, Homo sapiens
atgcatttctcagaacttatccctgttgttcaatgatgtgtgtctatacagtggggccataactaagacgtatgttgcccaagctggcaagatagctctgaccttctcttgggcccctcatttcccccaaacacaggttgtctgcagtcttgaccaatggctgccagggcatggactccgctgcaggggccagtgggaggccccagctcaggcaaaagcacaggcagatatttcaggagtctgctagggctggcactgaggggcagagacagaggggtctccctgtcctttggagaacctcacgctgcagaaattccagactgaaccttcataccgagtaggggaggagctgtctgcgggtttgagcctgcagcaggaggaaggacgtgaacattttatcagcttctggtatggccttgagctggtagttataatcttggccctggtggcccagggctacagtcatcctagcagtccccgctgaagtggagcaggtacagtcacagctgtggggacagcatgctggccaagggtcttcccccacgctcagtcctggtcaaaggctgccagacctttctgagtgcccccagggaggggctggggcgtctcagggtgcccactggcgagggagctggcatctccacccgcagtcctcgccccttcaatgagatcccctctcctggtgacaatggctggctaaacctgtaccatttctggagggagacgggcacacacaaagtccaccttcaccatgtccagaatttccagaagtatggcccgatttacagggagaagctcggcaacgtggagtcggtttatgtcatcgaccctgaagatgtggcccttctctttaagtccgagggccccaacccagaacgattcctcatcccgccctgggtcgcctatcaccagtattaccagagacccataggagtcctgttgaagaagtcggcagcctggaagaaagaccgggtggccctgaaccaggaggtgatggctccagaggccaccaagaactttttgcccctgttggatgcagtgtctcgggacttcgtcagtgtcctgcacaggcgcatcaagaaggcgggctccggaaattactcgggggacatcagtgatgacctgttccgctttgcctttgagtccatcactaacgtcatttttggggagcgccaggggatgctggaggaagtagtgaaccccgaggcccagcgattcattgatgccatctaccagatgttccacaccagcgtccccatgctcaaccttcccccagacctgttccgtctgttcaggaccaagacctggaaggaccatgtggctgcatgggacgtgattttcagtaaagctgacatatacacccagaacttctactgggaattgagacagaaaggaagtgttcaccacgattaccgtggcatcctctacagactcctgggagacagcaagatgtccttcgaggacatcaaggccaacgtcacagagatgctggcaggaggggtggacacgacgtccatgaccctgcagtggcacttgtatgagatggcacgcaacctgaaggtgcaggatatgctgcgggcagaggtcttggctgcgcggcaccaggcccagggagacatggccacgatgctacagctggtccccctcctcaaagccagcatcaaggagacactaagacttcaccccatctccgtgaccctgcagagatatcttgtaaatgacttggttcttcgagattacatgattcctgccaagacactggtgcaagtggccatctatgctctgggccgagagcccaccttcttcttcgacccggaaaattttgacccaacccgatggctgagcaaagacaagaacatcacctacttccggaacttgggctttggctggggtgtgcggcagtgtctgggacggcggatcgctgagctagagatgaccatcttcctcatcaatatgcctgaaaagcccatctccttcaccttctggccctttaaccaggaagcaacccagcagtgatcagagaggatggcctgcagccacatgggaggaaggcccaggggtggggcccatggggtctctgcatcttcagtcgtctgtcccaagtcctgctcctttctgcccagcctgctcagcaggttgaatgggttctcagtggtcaccttcctcagctcagctgggccactcctcttcacccaccccatggagacaataaacagctgaaccatg

SEQ ID NO: 71477 - DNA, 2238 bp, Homo sapiens
atgcatttctcagaacttatccctgttgttcaatgatgtgtgtctatacagtggggccataactaagacgtatgttgcccaagctggcaagatagctctgaccttctcttgggcccctcatttcccccaaacacaggttgtctgcagtcttgaccaatggctgccagggcatggactccgctgcaggggccagtgggaggccccagctcaggcaaaagcacaggcagatatttcaggagtctgctagggctggcactgaggggcagagacagaggggtctccctgtcctttggagaacctcacgctgcagaaattccagactgaaccttcataccgagtaggggaggagctgtctgcgggtttgagcctgcagcaggaggaaggacgtgaacattttatcagcttctggtatggccttgagctggtagttataatcttggccctggtggcccagggctacagtcatcctagcagtccccgctgaagtggagcaggtacagtcacagctgtggggacagcatgctggccaagggtcttcccccacgctcagtcctggtcaaaggctgccagacctttctgagtgcccccagggaggggctggggcgtctcagggtgcccactggcgagggagctggcatctccacccgcagtcctcgccccttcaatgagatcccctctcctggtgacaatggctggctaaacctgtaccatttctggagggagacgggcacacacaaagtccaccttcaccatgtccagaatttccagaagtatggcccgatttacagggagaagctcggcaacgtggagtcggtttatgtcatcgaccctgaagatgtggcccttctctttaagtccgagggccccaacccagaacgattcctcatcccgccctgggtcgcctatcaccagtattaccagagacccataggagtcctgttgaagaagtcggcagcctggaagaaagaccgggtggccctgaaccaggaggtgatggctccagaggccaccaagaactttttgcccctgttggatgcagtgtctcgggacttcgtcagtgtcctgcacaggcgcatcaagaaggcgggctccggaaattactcgggggacatcagtgatgacctgttccgctttgcctttgagtccatcactaacgtcatttttggggagcgccaggggatgctggaggaagtagtgaaccccgaggcccagcgattcattgatgccatctaccagatgttccacaccagcgtccccatgctcaaccttcccccagacctgttccgtctgttcaggaccaagacctggaaggaccatgtggctgcatgggacgtgattttcagtaaagctgacatatacacccagaacttctactgggaattgagacagaaaggaagtgttcaccacgattaccgtggcatcctctacagactcctgggagacagcaagatgtccttcgaggacatcaaggccaacgtcacagagatgctggcaggaggggtggacacgacgtccatgaccctgcagtggcacttgtatgagatggcacgcaacctgaaggtgcaggatatgctgcgggcagaggtcttggctgcgcggcaccaggcccagggagacatggccacgatgctacagctggtccccctcctcaaagccagcatcaaggagacactaagacttcaccccatctccgtgaccctgcagagatatcttgtaaatgacttggttcttcgagattacatgattcctgccaagacactggtgcaagtggccatctatgctctgggccgagagcccaccttcttcttcgacccggaaaattttgacccaacccgatggctgagcaaagacaagaacatcacctacttccggaacttgggctttggctggggtgtgcggcagtgtctgggacggcggatcgctgagctagagatgaccatcttcctcatcaatatgctggagaacttcagagttgaaatccaacacctcagcgatgtgggcaccacattcaacctcattctgcagtgatcagagaggatggcctgcagccacatgggaggaaggcccaggggtggggcccatggggtctctgcatcttcagtcgtctgtcccaagtcctgctcctttctgcccagcctgctcagcaggttgaatgggttctcagtggtcaccttcctcagctcagctgggccactcctcttcacccaccccatggagacaataaacagctgaaccatg

SEQ ID NO: 71478 - DNA, 2240 bp, Homo sapiens
ccgggcatggtggcgggggtctataatcccagctactcgggaggctgaggcaggacactcgcccgaacccaggaggtgggaggttgcagtgagccgagatcatgtcactgcactcccgccctgggcaacaaaagcgaaactctgtctcaaaaaaaaaaaaaaaaaaaaaatcgggggagggagatttgaaggtcagagcacagagtgaaaaggtcgcagcgtggtcaagtttggcgctagcgacagacccagcattcctcccagcgcacgccgccgcccgggccgcgctattccgaaattgggtccgccctagcgtggcccccggcctgctcctgcgctcttcgcgggtcgctcacctccgcctcccctcgacacagcccgagcccatccgccccccgggtcgacccgcgtttacctcagggcgaggtccaggcgctcggccccgcggaggcggcggcggccccaccgcaggttcctaggtcccagtcactctgccgccaagttccccaacacggactccgtgcgctttgaggtgttacgggggcgctggagcactggcttcgctggccctgccaggaggcggcggcgaagcagggagcgacccggtatgcgtttctctgcccggcctgcggccctgcagcatccactcctcgcctctgctggcctctgccctcgctcgctgcgttcacccgagctcacccgagcccaccggagccgacagtggcgcgctaagggagaagctcggcaacgtggagtcggtttatgtcatcgaccctgaagatgtggcccttctctttaagtccgagggccccaacccagaacgattcctcatcccgccctgggtcgcctatcaccagtattaccagagacccataggagtcctgttgaagaagtcggcagcctggaagaaagaccgggtggccctgaaccaggaggtgatggctccagaggccaccaagaactttttgcccctgttggatgcagtgtctcgggacttcgtcagtgtcctgcacaggcgcatcaagaaggcgggctccggaaattactcgggggacatcagtgatgacctgttccgctttgcctttgagtccatcactaacgtcatttttggggagcgccaggggatgctggaggaagtagtgaaccccgaggcccagcgattcattgatgccatctaccagatgttccacaccagcgtccccatgctcaaccttcccccagacctgttccgtctgttcaggaccaagacctggaaggaccatgtggctgcatgggacgtgattttcagtaaagctgacatatacacccagaacttctactgggaattgagacagaaaggaagtgttcaccacgattaccgtggcatcctctacagactcctgggagacagcaagatgtccttcgaggacatcaaggccaacgtcacagagatgctggcaggaggggtggacacgacgtccatgaccctgcagtggcacttgtatgagatggcacgcaacctgaaggtgcaggatatgctgcgggcagaggtcttggctgcgcggcaccaggcccagggagacatggccacgatgctacagctggtccccctcctcaaagccagcatcaaggagacactaagacttcaccccatctccgtgaccctgcagagatatcttgtaaatgacttggttcttcgagattacatgattcctgccaagacactggtgcaagtggccatctatgctctgggccgagagcccaccttcttcttcgacccggaaaattttgacccaacccgatggctgagcaaagacaagaacatcacctacttccggaacttgggctttggctggggtgtgcggcagtgtctgggacggcggatcgctgagctagagatgaccatcttcctcatcaatatgctggagaacttcagagttgaaatccaacacctcagcgatgtgggcaccacattcaacctcattctgatgcctgaaaagcccatctccttcaccttctggccctttaaccaggaagcaacccagcagtgatcagagaggatggcctgcagccacatgggaggaaggcccaggggtggggcccatggggtctctgcatcttcagtcgtctgtcccaagtcctgctcctttctgcccagcctgctcagcaggttgaatgggttctcagtggtcaccttcctcagctcagctgggccactcctcttcacccaccccatggagacaataaacagctgaaccatg

SEQ ID NO: 71479 - DNA, 1543 bp, Homo sapiens
tcggcacgaggatgggtcagtcacttagagggaaggggagaagctcggcaacgtggagtcggtttatgtcatcgaccctgaagatgtggcccttctctttaagtccgagggccccaacccagaacgattcctcatcccgccctgggtcgcctatcaccagtattaccagagacccataggagtcctgttgaagaagtcggcagcctggaagaaagaccgggtggccctgaaccaggaggtgatggctccagaggccaccaagaactttttgcccctgttggatgcagtgtctcgggacttcgtcagtgtcctgcacaggcgcatcaagaaggcgggctccggaaattactcgggggacatcagtgatgacctgttccgctttgcctttgagtccatcactaacgtcatttttggggagcgccaggggatgctggaggaagtagtgaaccccgaggcccagcgattcattgatgccatctaccagatgttccacaccagcgtccccatgctcaaccttcccccagacctgttccgtctgttcaggaccaagacctggaaggaccatgtggctgcatgggacgtgattttcagtaaagctgacatatacacccagaacttctactgggaattgagacagaaaggaagtgttcaccacgattaccgtggcatcctctacagactcctgggagacagcaagatgtccttcgaggacatcaaggccaacgtcacagagatgctggcaggaggggtggacacgacgtccatgaccctgcagtggcacttgtatgagatggcacgcaacctgaaggtgcaggatatgctgcgggcagaggtcttggctgcgcggcaccaggcccagggagacatggccacgatgctacagctggtccccctcctcaaagccagcatcaaggagacactaagacttcaccccatctccgtgaccctgcagagatatcttgtaaatgacttggttcttcgagattacatgattcctgccaagacactggtgcaagtggccatctatgctctgggccgagagcccaccttcttcttcgacccggaaaattttgacccaacccgatggctgagcaaagacaagaacatcacctacttccggaacttgggctttggctggggtgtgcggcagtgtctgggacggcggatcgctgagctagagatgaccatcttcctcatcaatatgctggagaacttcagagttgaaatccaacacctcagcgatgtgggcaccacattcaacctcattctgatgcctgaaaagcccatctccttcaccttctggccctttaaccaggaagcaacccagcagtgatcagagaggatggcctgcagccacatgggaggaaggcccaggggtggggcccatggggtctctgcatcttcagtcgtctgtcccaagtcctgctcctttctgcccagcctgctcagcaggttgaatgggttctcagtggtcaccttcctcagctcagctgggccactcctcttcacccaccccatggagacaataaacagctgaaccatg

SEQ ID NO: 71480 - DNA, 2139 bp, Homo sapiens
atgcatttctcagaacttatccctgttgttcaatgatgtgtgtctatacagtggggccataactaagacgtatgttgcccaagctggcaagatagctctgaccttctcttgggcccctcatttcccccaaacacaggttgtctgcagtcttgaccaatggctgccagggcatggactccgctgcaggggccagtgggaggccccagctcaggcaaaagcacaggcagatatttcaggagtctgctagggctggcactgaggggcagagacagaggggtctccctgtcctttggagaacctcacgctgcagaaattccagactgaaccttcataccgagtaggggaggagctgtctgcgggtttgagcctgcagcaggaggaaggacgtgaacattttatcagcttctggtatggccttgagctggtagttataatcttggccctggtggcccagggctacagtcatcctagcagtccccgctgaagtggagcaggtacagtcacagctgtggggacagcatgctggccaagggtcttcccccacgctcagtcctggtcaaaggctgccagacctttctgagtgcccccagggaggggctggggcgtctcagggtgcccactggcgagggagctggcatctccacccgcagtcctcgccccttcaatgagatcccctctcctggtgacaatggctggctaaacctgtaccatttctggagggagacgggcacacacaaagtccaccttcaccatgtccagaatttccagaagtatggcccgatttacaggaagtcggcagcctggaagaaagaccgggtggccctgaaccaggaggtgatggctccagaggccaccaagaactttttgcccctgttggatgcagtgtctcgggacttcgtcagtgtcctgcacaggcgcatcaagaaggcgggctccggaaattactcgggggacatcagtgatgacctgttccgctttgcctttgagtccatcactaacgtcatttttggggagcgccaggggatgctggaggaagtagtgaaccccgaggcccagcgattcattgatgccatctaccagatgttccacaccagcgtccccatgctcaaccttcccccagacctgttccgtctgttcaggaccaagacctggaaggaccatgtggctgcatgggacgtgattttcagtaaagctgacatatacacccagaacttctactgggaattgagacagaaaggaagtgttcaccacgattaccgtggcatcctctacagactcctgggagacagcaagatgtccttcgaggacatcaaggccaacgtcacagagatgctggcaggaggggtggacacgacgtccatgaccctgcagtggcacttgtatgagatggcacgcaacctgaaggtgcaggatatgctgcgggcagaggtcttggctgcgcggcaccaggcccagggagacatggccacgatgctacagctggtccccctcctcaaagccagcatcaaggagacactaagacttcaccccatctccgtgaccctgcagagatatcttgtaaatgacttggttcttcgagattacatgattcctgccaagacactggtgcaagtggccatctatgctctgggccgagagcccaccttcttcttcgacccggaaaattttgacccaacccgatggctgagcaaagacaagaacatcacctacttccggaacttgggctttggctggggtgtgcggcagtgtctgggacggcggatcgctgagctagagatgaccatcttcctcatcaatatgctggagaacttcagagttgaaatccaacacctcagcgatgtgggcaccacattcaacctcattctgatgcctgaaaagcccatctccttcaccttctggccctttaaccaggaagcaacccagcagtgatcagagaggatggcctgcagccacatgggaggaaggcccaggggtggggcccatggggtctctgcatcttcagtcgtctgtcccaagtcctgctcctttctgcccagcctgctcagcaggttgaatgggttctcagtggtcaccttcctcagctcagctgggccactcctcttcacccaccccatggagacaataaacagctgaaccatg

SEQ ID NO: 71481 - DNA, 2270 bp, Homo sapiens
atgcatttctcagaacttatccctgttgttcaatgatgtgtgtctatacagtggggccataactaagacgtatgttgcccaagctggcaagatagctctgaccttctcttgggcccctcatttcccccaaacacaggttgtctgcagtcttgaccaatggctgccagggcatggactccgctgcaggggccagtgggaggccccagctcaggcaaaagcacaggcagatatttcaggagtctgctagggctggcactgaggggcagagacagaggggtctccctgtcctttggagaacctcacgctgcagaaattccagactgaaccttcataccgagtaggggaggagctgtctgcgggtttgagcctgcagcaggaggaaggacgtgaacattttatcagcttctggtatggccttgagctggtagttataatcttggccctggtggcccagggctacagtcatcctagcagtccccgctgaagtggagcaggtacagtcacagctgtggggacagcatgctggccaagggtcttcccccacgctcagtcctggtcaaaggctgccagacctttctgagtgcccccagggaggggctggggcgtctcagggtgcccactggcgagggagctggcatctccacccgcagtcctcgccccttcaatgagatcccctctcctggtgacaatggctggctaaacctgtaccatttctggagggagacgggcacacacaaagtccaccttcaccatgtccagaatttccagaagtatggcccgatttacagggagaagctcggcaacgtggagtcggtttatgtcatcgaccctgaagatgtggcccttctctttaagtccgagggccccaacccagaacgattcctcatcccgccctgggtcgcctatcaccagtattaccagagacccataggagtcctgttgaagaagtcggcagcctggaagaaagaccgggtggccctgaaccaggaggtgatggctccagaggccaccaagaactttttgcccctgttggatgcagtgtctcgggacttcgtcagtgtcctgcacaggcgcatcaagaaggcggcagtgatgacctgttccgctttgcctttgagtccatcactaacgtcatttttggggagcgccaggggatgctggaggaagtagtgaaccccgaggcccagcgattcattgatgccatctaccagatgttccacaccagcgtccccatgctcaaccttcccccagacctgttccgtctgttcaggaccaagacctggaaggaccatgtggctgcatgggacgtgattttcagtaaagctgacatatacacccagaacttctactgggaattgagacagaaaggaagtgttcaccacgattaccgtggcatcctctacagactcctgggagacagcaagatgtccttcgaggacatcaaggccaacgtcacagagatgctggcaggaggggtggacacgacgtccatgaccctgcagtggcacttgtatgagatggcacgcaacctgaaggtgcaggatatgctgcgggcagaggtcttggctgcgcggcaccaggcccagggagacatggccacgatgctacagctggtccccctcctcaaagccagcatcaaggagacactaagacttcaccccatctccgtgaccctgcagagatatcttgtaaatgacttggttcttcgagattacatgattcctgccaagacactggtgcaagtggccatctatgctctgggccgagagcccaccttcttcttcgacccggaaaattttgacccaacccgatggctgagcaaagacaagaacatcacctacttccggaacttgggctttggctggggtgtgcggcagtgtctgggacggcggatcgctgagctagagatgaccatcttcctcatcaatatgctggagaacttcagagttgaaatccaacacctcagcgatgtgggcaccacattcaacctcattctgatgcctgaaaagcccatctccttcaccttctggccctttaaccaggaagcaacccagcagtgatcagagaggatggcctgcagccacatgggaggaaggcccaggggtggggcccatggggtctctgcatcttcagtcgtctgtcccaagtcctgctcctttctgcccagcctgctcagcaggttgaatgggttctcagtggtcaccttcctcagctcagctgggccactcctcttcacccaccccatggagacaataaacagctgaaccatg

SEQ ID NO: 71482 - DNA, 1323 bp, Homo sapiens
  misc_feature (78)..(78): n is a, c, g, or t
ggagacactaagacttcaccccatctccgtgaccctgcagagatatcttgtaaatgacttggttcttcgagattacangattcctgccaagacactggtgcaagtggccatctatgctccggaaattactcgggggacatcagtgatgacctgttccgctttgcctttgagtccatcactaacgtcatttttggggagcgccaggggatgctggaggaagtagtgaaccccgaggcccagcgattcattgatgccatctaccagatgttccacaccagcgtccccatgctcaaccttcccccagacctgttccgtctgttcaggaccaagacctggaaggaccatgtggctgcatgggacgtgattttcagtaaagctgacatatacacccagaacttctactgggaattgagacagaaaggaagtgttcaccacgattaccgtggcatcctctacagactcctgggagacagcaagatgtccttcgaggacatcaaggccaacgtcacagagatgctggcaggaggggtggacacgacgtccatgaccctgcagtggcacttgtatgagatggcacgcaacctgaaggtgcaggatatgctgcgggcagaggtcttggctgcgcggcaccaggcccagggagacatggccacgatgctacagctggtccccctcctcaaagccagcatcaaggagacactaagacttcaccccatctccgtgaccctgcagagatatcttgtaaatgacttggttcttcgagattacatgattcctgccaagacactggtgcaagtggccatctatgctctgggccgagagcccaccttcttcttcgacccggaaaattttgacccaacccgatggctgagcaaagacaagaacatcacctacttccggaacttgggctttggctggggtgtgcggcagtgtctgggacggcggatcgctgagctagagatgaccatcttcctcatcaatatgctggagaacttcagagttgaaatccaacacctcagcgatgtgggcaccacattcaacctcattctgatgcctgaaaagcccatctccttcaccttctggccctttaaccaggaagcaacccagcagtgatcagagaggatggcctgcagccacatgggaggaaggcccaggggtggggcccatggggtctctgcatcttcagtcgtctgtcccaagtcctgctcctttctgcccagcctgctcagcaggttgaatgggttctcagtggtcaccttcctcagctcagctgggccactcctcttcacccaccccatggagacaataaacagctgaaccatg

SEQ ID NO: 71483 - DNA, 517 bp, Homo sapiens
gcagcactaagggtgcattatcaggcactgtgcagggttacaccaggagctggtggtgaactccttggaactcctcaaatcacactccacaggcactgcctatgggtgaattggcctggctagggagacagatcctcccctgccctcccctaaacctaccatctgcctttctcagatgctggagaacttcagagttgaaatccaacacctcagcgatgtgggcaccacattcaacctcattctgatgcctgaaaagcccatctccttcaccttctggccctttaaccaggaagcaacccagcagtgatcagagaggatggcctgcagccacatgggaggaaggcccaggggtggggcccatggggtctctgcatcttcagtcgtctgtcccaagtcctgctcctttctgcccagcctgctcagcaggttgaatgggttctcagtggtcaccttcctcagctcagctgggccactcctcttcacccaccccatggagacaataaacagctgaaccatg

SEQ ID NO: 71484 - DNA, 2295 bp, Homo sapiens
atgcatttctcagaacttatccctgttgttcaatgatgtgtgtctatacagtggggccataactaagacgtatgttgcccaagctggcaagatagctctgaccttctcttgggcccctcatttcccccaaacacaggttgtctgcagtcttgaccaatggctgccagggcatggactccgctgcaggggccagtgggaggccccagctcaggcaaaagcacaggcagatatttcaggagtctgctagggctggcactgaggggcagagacagaggggtctccctgtcctttggagaacctcacgctgcagaaattccagactgaaccttcataccgagtaggggaggagctgtctgcgggtttgagcctgcagcaggaggaaggacgtgaacattttatcagcttctggtatggccttgagctggtagttataatcttggccctggtggcccagggctacagtcatcctagcagtccccgctgaagtggagcaggtacagtcacagctgtggggacagcatgctggccaagggtcttcccccacgctcagtcctggtcaaaggctgccagacctttctgagtgcccccagggaggggctggggcgtctcagggtgcccactggcgagggagctggcatctccacccgcagtcctcgccccttcaatgagatcccctctcctggtgacaatggctggctaaacctgtaccatttctggagggagacgggcacacacaaagtccaccttcaccatgtccagaatttccagaagtatggcccgatttacagggagaagctcggcaacgtggagtcggtttatgtcatcgaccctgaagatgtggcccttctctttaagtccgagggccccaacccagaacgattcctcatcccgccctgggtcgcctatcaccagtattaccagagacccataggagtcctgttgaagaagtcggcagcctggaagaaagaccgggtggccctgaaccaggaggtgatggctccagaggccaccaagaactttttgcccctgttggatgcagtgtctcgggacttcgtcagtgtcctgcacaggcgcatcaagaaggcgggctccggaaattactcgggggacatcagtgatgacctgttccgctttgcctttgagtccatcactaacgtcatttttggggagcgccaggggatgctggaggaagtagtgaaccccgaggcccagcgattcattgatgccatctaccagatgttccacaccagcgtccccatgctcaaccttcccccagacctgttccgtctgttcaggaccaagacctggaaggaccatgtggctgcatgggacgtgattttcagtaaagctgacatatacacccagaacttctactgggaattgagacagaaaggaagtgttcaccacgattaccgtggcatcctctacagactcctgggagacagcaagatgtccttcgaggacatcaaggccaacgtcacagagatgctggcaggaggggtggacacgacgtccatgaccctgcagtggcacttgtatgagatggcacgcaacctgaaggtgcaggatatgctgcgggcagaggtcttggctgcgcggcaccaggcccagggagacatggccacgatgctacagctggtccccctcctcaaagccagcatcaaggagacactaagacttcaccccatctccgtgaccctgcagagatatcttgtaaatgacttggttcttcgagattacatgattcctgccaagacactggtgcaagtggccatctatgctctgggccgagagcccaccttcttcttcgacccggaaaattttgacccaacccgatggctgagcaaagacaagaacatcacctacttccggaacttgggctttggctggggtgtgcggcagtgtctgggacggcggatcgctgagctagagatgaccatcttcctcatcaatatgctggagaacttcagagttgaaatccaacacctcagcgatgtgggcaccacattcaacctcattctgatgcctgaaaagcccatctccttcaccttctggccctttaaccaggaagcaacccagcagtgatcagagaggatggcctgcagccacatgggaggaaggcccaggggtggggcccatggggtctctgcatcttcagtcgtctgtcccaagtcctgctcctttctgcccagcctgctcagcaggttgaatgggttctcagtggtcaccttcctcagctcagctgggccactcctcttcacccaccccatggagacaataaacagctgaaccatg

SEQ ID NO: 71485 - DNA, 2317 bp, Homo sapiens
atgcatttctcagaacttatccctgttgttcaatgatgtgtgtctatacagtggggccataactaagacgtatgttgcccaagctggcaagatagctctgaccttctcttgggcccctcatttcccccaaacacaggttgtctgcagtcttgaccaatggctgccagggcatggactccgctgcaggggccagtgggaggccccagctcaggcaaaagcacaggcagatatttcaggagtctgctagggctggcactgaggggcagagacagaggggtctccctgtcctttggagaacctcacgctgcagaaattccagactgaaccttcataccgagtaggggaggagctgtctgcgggtttgagcctgcagcaggaggaaggacgtgaacattttatcagcttctggtatggccttgagctggtagttataatcttggccctggtggcccagggctacagtcatcctagcagtccccgctgaagtggagcaggtacagtcacagctgtggggacagcatgctggccaagggtcttcccccacgctcagtcctggtcaaaggctgccagacctttctgagtgcccccagggaggggctggggcgtctcagggtgcccactggcgagggagctggcatctccacccgcagtcctcgccccttcaatgagatcccctctcctggtgacaatggctggctaaacctgtaccatttctggagggagacgggcacacacaaagtccaccttcaccatgtccagaatttccagaagtatggcccgatttacagggagaagctcggcaacgtggagtcggtttatgtcatcgaccctgaagatgtggcccttctctttaagtccgagggccccaacccagaacgattcctcatcccgccctgggtcgcctatcaccagtattaccagagacccataggagtcctgttgaagaagtcggcagcctggaagaaagaccgggtggccctgaaccaggaggtgatggctccagaggccaccaagaactttttgcccctgttggatgcagtgtctcgggacttcgtcagtgtcctgcacaggcgcatcaagaaggcgggctccggaaattactcgggggacatcagtgatgacctgttccgctttgcctttgagtccatcactaacgtcatttttggggagcgccaggggatgctggaggaagtagtgaaccccgaggcccagcgattcattgatgccatctaccagatgttccacaccagcgtccccatgctcaaccttcccccagacctgttccgtctgttcaggaccaagacctggaaggaccatgtggctgcatgggacgtgattttcagtaaagctgacatatacacccagaacttctactgggaattgagacagaaaggaagtgttcaccacgattaccgtggcatcctctacagactcctgggagacagcaagatgtccttcgaggacatcaaggccaacgtcacagagatgctggcaggaggggtggacacgacgtccatgaccctgcagtggcacttgtatgagatggcacgcaacctgaaggtgcaggatatgctgcgggcagaggtcttggctgcgcggcaccaggcccagggagacatggccacgatgctacagctggtccccctcctcaaagccagcatcaaggagacactaagacttcaccccatctccgtgaccctgcagagatatcttgtaaatgacttggttcttcgagattacatgattcctgccaagacactggtgcaagtggccatctatgctctgggccgagagcccaccttcttcttcgacccggaaaattttgacccaacccgatggctgagcaaagacaagaacatcacctacttccggaacttgggctttggctggggtgtgcggcagtgtctgggacggcggatcgctgagctagagatgaccatcttcctcatcaatatgctggagaacttcagagttgaaatccaacacctcagcgatgtgggcaccacattcaacctcattctgatgcctgaaaagcccatctccttcaccttctggccctttaaccaggaagcaacccagcagtgatcagagaggatggcctgcagccacatgggaggaaggcccaggggtggggcccatggggtctctgcatcttcagtcgtctgtcccaagtcctgctcctttctgcccagcctgctcagcaggttgaatgggttctcagtggtcaccttcctcagctcagctgggccactcctcttcacccaccccatggagacaataaacagctgaaccatgtggtgtcttgcgttccatcaga

SEQ ID NO: 71486 - DNA, 2550 bp, Homo sapiens
atgcatttctcagaacttatccctgttgttcaatgatgtgtgtctatacagtggggccataactaagacgtatgttgcccaagctggcaagatagctctgaccttctcttgggcccctcatttcccccaaacacaggttgtctgcagtcttgaccaatggctgccagggcatggactccgctgcaggggccagtgggaggccccagctcaggcaaaagcacaggcagatatttcaggagtctgctagggctggcactgaggggcagagacagaggggtctccctgtcctttggagaacctcacgctgcagaaattccagactgaaccttcataccgagtaggggaggagctgtctgcgggtttgagcctgcagcaggaggaaggacgtgaacattttatcagcttctggtatggccttgagctggtagttataatcttggccctggtggcccagggctacagtcatcctagcagtccccgctgaagtggagcaggtacagtcacagctgtggggacagcatgctggccaagggtcttcccccacgctcagtcctggtcaaaggctgccagacctttctgagtgcccccagggaggggctggggcgtctcagggtgcccactggcgagggagctggcatctccacccgcagtcctcgccccttcaatgagatcccctctcctggtgacaatggctggctaaacctgtaccatttctggagggagacgggcacacacaaagtccaccttcaccatgtccagaatttccagaagtatggcccgatttacagggagaagctcggcaacgtggagtcggtttatgtcatcgaccctgaagatgtggcccttctctttaagtccgagggccccaacccagaacgattcctcatcccgccctgggtcgcctatcaccagtattaccagagacccataggagtcctgttgaagaagtcggcagcctggaagaaagaccgggtggccctgaaccaggaggtgatggctccagaggccaccaagaactttttgcccctgttggatgcagtgtctcgggacttcgtcagtgtcctgcacaggcgcatcaagaaggcgggctccggaaattactcgggggacatcagtgatgacctgttccgctttgcctttgagtccatcactaacgtcatttttggggagcgccaggggatgctggaggaagtagtgaaccccgaggcccagcgattcattgatgccatctaccagatgttccacaccagcgtccccatgctcaaccttcccccagacctgttccgtctgttcaggaccaagacctggaaggaccatgtggctgcatgggacgtgattttcagtaaagctgacatatacacccagaacttctactgggaattgagacagaaaggaagtgttcaccacgattaccgtggcatcctctacagactcctgggagacagcaagatgtccttcgaggacatcaaggccaacgtcacagagatgctggcaggaggggtggacacgacgtccatgaccctgcagtggcacttgtatgagatggcacgcaacctgaaggtgcaggatatgctgcgggcagaggtcttggctgcgcggcaccaggcccagggagacatggccacgatgctacagctggtccccctcctcaaagccagcatcaaggagacactaagacttcaccccatctccgtgaccctgcagagatatcttgtaaatgacttggttcttcgagattacatgattcctgccaagacactggtgcaagtggccatctatgctctgggccgagagcccaccttcttcttcgacccggaaaattttgacccaacccgatggctgagcaaagacaagaacatcacctacttccggaacttgggctttggctggggtgtgcggcagtgtctgggacggcggatcgctgagctagagatgaccatcttcctcatcaatcaatgtgagtcaagctggggacatctaggcaccctgggctggccctggccctaatgaaggcaccaatcttcctcctcctatctctgtccagagcccaaggatgtcagtgctggggcgcatctacctccagttacttgctctcgctctctcccacagttctctgctgccccctctttcgggctcaaccactcatcacccactgatgcccctggccatccattccccatggtggtgatgggatgggataggactgagatgctggagaacttcagagttgaaatccaacacctcagcgatgtgggcaccacattcaacctcattctgatgcctgaaaagcccatctccttcaccttctggccctttaaccaggaagcaacccagcagtgatcagagaggatggcctgcagccacatgggaggaaggcccaggggtggggcccatggggtctctgcatcttcagtcgtctgtcccaagtcctgctcctttctgcccagcctgctcagcaggttgaatgggttctcagtggtcaccttcctcagctcagctgggccactcctcttcacccaccccatggagacaataaacagctgaaccatg

SEQ ID NO: 71487 - DNA, 2759 bp, Homo sapiens
atgcatttctcagaacttatccctgttgttcaatgatgtgtgtctatacagtggggccataactaagacgtatgttgcccaagctggcaagatagctctgaccttctcttgggcccctcatttcccccaaacacaggttgtctgcagtcttgaccaatggctgccagggcatggactccgctgcaggggccagtgggaggccccagctcaggcaaaagcacaggcagatatttcaggagtctgctagggctggcactgaggggcagagacagaggggtctccctgtcctttggagaacctcacgctgcagaaattccagactgaaccttcataccgagtaggggaggagctgtctgcgggtttgagcctgcagcaggaggaaggacgtgaacattttatcagcttctggtatggccttgagctggtagttataatcttggccctggtggcccagggctacagtcatcctagcagtccccgctgaagtggagcaggtacagtcacagctgtggggacagcatgctggccaagggtcttcccccacgctcagtcctggtcaaaggctgccagacctttctgagtgcccccagggaggggctggggcgtctcagggtgcccactggcgagggagctggcatctccacccgcagtcctcgccccttcaatgagatcccctctcctggtgacaatggctggctaaacctgtaccatttctggagggagacgggcacacacaaagtccaccttcaccatgtccagaatttccagaagtatggcccgatttacagggagaagctcggcaacgtggagtcggtttatgtcatcgaccctgaagatgtggcccttctctttaagtccgagggccccaacccagaacgattcctcatcccgccctgggtcgcctatcaccagtattaccagagacccataggagtcctgttgaagaagtcggcagcctggaagaaagaccgggtggccctgaaccaggaggtgatggctccagaggccaccaagaactttttgcccctgttggatgcagtgtctcgggacttcgtcagtgtcctgcacaggcgcatcaagaaggcgggctccggaaattactcgggggacatcagtgatgacctgttccgctttgcctttgagtccatcactaacgtcatttttggggagcgccaggggatgctggaggaagtagtgaaccccgaggcccagcgattcattgatgccatctaccagatgttccacaccagcgtccccatgctcaaccttcccccagacctgttccgtctgttcaggaccaagacctggaaggaccatgtggctgcatgggacgtgattttcagtaaagctgacatatacacccagaacttctactgggaattgagacagaaaggaagtgttcaccacgattaccgtggcatcctctacagactcctgggagacagcaagatgtccttcgaggacatcaaggccaacgtcacagagatgctggcaggaggggtggacacgacgtccatgaccctgcagtggcacttgtatgagatggcacgcaacctgaaggtgcaggatatgctgcgggcagaggtcttggctgcgcggcaccaggcccagggagacatggccacgatgctacagctggtccccctcctcaaagccagcatcaaggagacactaagacttcaccccatctccgtgaccctgcagagatatcttgtaaatgacttggttcttcgagattacatgattcctgccaaggtaggtgcagccagcaggctgcaggctctgccagtcagagagggctggggcaggctggaattgcagacagagggtggcactggggccctggtggggcccttgatggcagcagtctaagtctgaatgaagggcagaggtggtgggcatggtgggcggtgacctctaggatgttattggaacccagggttaggagggagacttcatgatttgcctgggtctgaggaaagggtgggacaatcatcctggccttgggtcttcagccatccccatttggtgggtaaggattacagaggggcggggccttgttcaaggctgcacagtgggcagaatgtcctgccctggagagctgggcagccatgctggggagtgggagtggtggtgagagggcaggggactagggaagggggttttgtgctcagggctgtggggaagtggggcttactcaggcctctgatcaccttgccccagacactggtgcaagtggccatctatgctctgggccgagagcccaccttcttcttcgacccggaaaattttgacccaacccgatggctgagcaaagacaagaacatcacctacttccggaacttgggctttggctggggtgtgcggcagtgtctgggacggcggatcgctgagctagagatgaccatcttcctcatcaatatgctggagaacttcagagttgaaatccaacacctcagcgatgtgggcaccacattcaacctcattctgatgcctgaaaagcccatctccttcaccttctggccctttaaccaggaagcaacccagcagtgatcagagaggatggcctgcagccacatgggaggaaggcccaggggtggggcccatggggtctctgcatcttcagtcgtctgtcccaagtcctgctcctttctgcccagcctgctcagcaggttgaatgggttctcagtggtcaccttcctcagctcagctgggccactcctcttcacccaccccgaacacggataggggatcctcta

SEQ ID NO: 71488 - DNA, 2431 bp, Homo sapiens
ccgggcatggtggcgggggtctataatcccagctactcgggaggctgaggcaggacactcgcccgaacccaggaggtgggaggttgcagtgagccgagatcatgtcactgcactcccgccctgggcaacaaaagcgaaactctgtctcaaaaaaaaaaaaaaaaaaaaaatcgggggagggagatttgaaggtcagagcacagagtgaaaaggtcgcagcgtggtcaagtttggcgctagcgacagacccagcattcctcccagcgcacgccgccgcccgggccgcgctattccgaaattgggtccgccctagcgtggcccccggcctgctcctgcgctcttcgcgggtcgctcacctccgcctcccctcgacacagcccgagcccatccgccccccgggtcgacccgcgtttacctcagggcgaggtccaggcgctcggccccgcggaggcggcggcggccccaccgcaggttcctaggtcccagtcactctgccgccaagttccccaacacggactccgtgcgctttgaggtgttacgggggcgctggagcactggcttcgctggccctgccaggaggcggcggcgaagcagggagcgacccggtatgcgtttctctgcccggcctgcggccctgcagcatccactcctcgcctctgctggcctctgccctcgctcgctgcgttcacccgagctcacccgagcccaccggagccgacagtggcgcgctaagcagcgctgcgagacaggtactgtatttgtctccattttacagaagaggaaactgagactcagaggggttaagggcctcgactcaggtcccacagtcagcaagttgtggaactgtgaggcagctgtgctgagcctgtatccatagctctcctcggatccttccatcagcccctctcccccacccctccagggggagaagctcggcaacgtggagtcggtttatgtcatcgaccctgaagatgtggcccttctctttaagtccgagggccccaacccagaacgattcctcatcccgccctgggtcgcctatcaccagtattaccagagacccataggagtcctgttgaagaagtcggcagcctggaagaaagaccgggtggccctgaaccaggaggtgatggctccagaggccaccaagaactttttgcccctgttggatgcagtgtctcgggacttcgtcagtgtcctgcacaggcgcatcaagaaggcgggctccggaaattactcgggggacatcagtgatgacctgttccgctttgcctttgagtccatcactaacgtcatttttggggagcgccaggggatgctggaggaagtagtgaaccccgaggcccagcgattcattgatgccatctaccagatgttccacaccagcgtccccatgctcaaccttcccccagacctgttccgtctgttcaggaccaagacctggaaggaccatgtggctgcatgggacgtgattttcagtaaagctgacatatacacccagaacttctactgggaattgagacagaaaggaagtgttcaccacgattaccgtggcatcctctacagactcctgggagacagcaagatgtccttcgaggacatcaaggccaacgtcacagagatgctggcaggaggggtggacacgacgtccatgaccctgcagtggcacttgtatgagatggcacgcaacctgaaggtgcaggatatgctgcgggcagaggtcttggctgcgcggcaccaggcccagggagacatggccacgatgctacagctggtccccctcctcaaagccagcatcaaggagacactaagacttcaccccatctccgtgaccctgcagagatatcttgtaaatgacttggttcttcgagattacatgattcctgccaagacactggtgcaagtggccatctatgctctgggccgagagcccaccttcttcttcgacccggaaaattttgacccaacccgatggctgagcaaagacaagaacatcacctacttccggaacttgggctttggctggggtgtgcggcagtgtctgggacggcggatcgctgagctagagatgaccatcttcctcatcaatatgctggagaacttcagagttgaaatccaacacctcagcgatgtgggcaccacattcaacctcattctgatgcctgaaaagcccatctccttcaccttctggccctttaaccaggaagcaacccagcagtgatcagagaggatggcctgcagccacatgggaggaaggcccaggggtggggcccatggggtctctgcatcttcagtcgtctgtcccaagtcctgctcctttctgcccagcctgctcagcaggttgaatgggttctcagtggtcaccttcctcagctcagctgggccactcctcttcacccaccccatggagacaataaacagctgaaccatg

SEQ ID NO: 71489 - DNA, 1543 bp, Homo sapiens
tgagccaggatgagccaggagaaggaatttcacaagggagaagctcggcaacgtggagtcggtttatgtcatcgaccctgaagatgtggcccttctctttaagtccgagggccccaacccagaacgattcctcatcccgccctgggtcgcctatcaccagtattaccagagacccataggagtcctgttgaagaagtcggcagcctggaagaaagaccgggtggccctgaaccaggaggtgatggctccagaggccaccaagaactttttgcccctgttggatgcagtgtctcgggacttcgtcagtgtcctgcacaggcgcatcaagaaggcgggctccggaaattactcgggggacatcagtgatgacctgttccgctttgcctttgagtccatcactaacgtcatttttggggagcgccaggggatgctggaggaagtagtgaaccccgaggcccagcgattcattgatgccatctaccagatgttccacaccagcgtccccatgctcaaccttcccccagacctgttccgtctgttcaggaccaagacctggaaggaccatgtggctgcatgggacgtgattttcagtaaagctgacatatacacccagaacttctactgggaattgagacagaaaggaagtgttcaccacgattaccgtggcatcctctacagactcctgggagacagcaagatgtccttcgaggacatcaaggccaacgtcacagagatgctggcaggaggggtggacacgacgtccatgaccctgcagtggcacttgtatgagatggcacgcaacctgaaggtgcaggatatgctgcgggcagaggtcttggctgcgcggcaccaggcccagggagacatggccacgatgctacagctggtccccctcctcaaagccagcatcaaggagacactaagacttcaccccatctccgtgaccctgcagagatatcttgtaaatgacttggttcttcgagattacatgattcctgccaagacactggtgcaagtggccatctatgctctgggccgagagcccaccttcttcttcgacccggaaaattttgacccaacccgatggctgagcaaagacaagaacatcacctacttccggaacttgggctttggctggggtgtgcggcagtgtctgggacggcggatcgctgagctagagatgaccatcttcctcatcaatatgctggagaacttcagagttgaaatccaacacctcagcgatgtgggcaccacattcaacctcattctgatgcctgaaaagcccatctccttcaccttctggccctttaaccaggaagcaacccagcagtgatcagagaggatggcctgcagccacatgggaggaaggcccaggggtggggcccatggggtctctgcatcttcagtcgtctgtcccaagtcctgctcctttctgcccagcctgctcagcaggttgaatgggttctcagtggtcaccttcctcagctcagctgggccactcctcttcacccaccccatggagacaataaacagctgaaccatg

SEQ ID NO: 71490 - DNA, 1388 bp, Homo sapiens
gttagcggactgactctcttactaaccagcgctacaggaagtcggcagcctggaagaaagaccgggtggccctgaaccaggaggtgatggctccagaggccaccaagaactttttgcccctgttggatgcagtgtctcgggacttcgtcagtgtcctgcacaggcgcatcaagaaggcgggctccggaaattactcgggggacatcagtgatgacctgttccgctttgcctttgagtccatcactaacgtcatttttggggagcgccaggggatgctggaggaagtagtgaaccccgaggcccagcgattcattgatgccatctaccagatgttccacaccagcgtccccatgctcaaccttcccccagacctgttccgtctgttcaggaccaagacctggaaggaccatgtggctgcatgggacgtgattttcagtaaagctgacatatacacccagaacttctactgggaattgagacagaaaggaagtgttcaccacgattaccgtggcatcctctacagactcctgggagacagcaagatgtccttcgaggacatcaaggccaacgtcacagagatgctggcaggaggggtggacacgacgtccatgaccctgcagtggcacttgtatgagatggcacgcaacctgaaggtgcaggatatgctgcgggcagaggtcttggctgcgcggcaccaggcccagggagacatggccacgatgctacagctggtccccctcctcaaagccagcatcaaggagacactaagacttcaccccatctccgtgaccctgcagagatatcttgtaaatgacttggttcttcgagattacatgattcctgccaagacactggtgcaagtggccatctatgctctgggccgagagcccaccttcttcttcgacccggaaaattttgacccaacccgatggctgagcaaagacaagaacatcacctacttccggaacttgggctttggctggggtgtgcggcagtgtctgggacggcggatcgctgagctagagatgaccatcttcctcatcaatatgctggagaacttcagagttgaaatccaacacctcagcgatgtgggcaccacattcaacctcattctgatgcctgaaaagcccatctccttcaccttctggccctttaaccaggaagcaacccagcagtgatcagagaggatggcctgcagccacatgggaggaaggcccaggggtggggcccatggggtctctgcatcttcagtcgtctgtcccaagtcctgctcctttctgcccagcctgctcagcaggttgaatgggttctcagtggtcaccttcctcagctcagctgggccactcctcttcacccaccccatggagacaataaacagctgaaccatg

SEQ ID NO: 71491 - DNA, 1223 bp, Homo sapiens
atgcatttctcagaacttatccctgttgttcaatgatgtgtgtctatacagtggggccataactaagacgtatgttgcccaagctggcaagatagctctgaccttctcttgggcccctcatttcccccaaacacaggttgtctgcagtcttgaccaatggctgccagggcatggactccgctgcaggggccagtgggaggccccagctcaggcaaaagcacaggcagatatttcaggagtctgctagggctggcactgaggggcagagacagaggggtctccctgtcctttggagaacctcacgctgcagaaattccagactgaaccttcataccgagtaggggaggagctgtctgcgggtttgagcctgcagcaggaggaaggacgtgaacattttatcagcttctggtatggccttgagctggtagttataatcttggccctggtggcccagggctacagtcatcctagcagtccccgctgaagtggagcaggtacagtcacagctgtggggacagcatgctggccaagggtcttcccccacgctcagtcctggtcaaaggctgccagacctttctgagtgcccccagggaggggctggggcgtctcagggtgcccactggcgagggagctggcatctccacccgcagtcctcgccccttcaatgagatcccctctcctggtgacaatggctggctaaacctgtaccatttctggagggagacgggcacacacaaagtccaccttcaccatgtccagaatttccagaagtatggcccgatttacaggtaagcctggcagagggtgggagccgaagggacagggaggaggaggggcctgggtagccctgctgtagtccccactcccccaacaggctgttctctggttccaaactcctgtctaacttctttttttttttttggtaatacaatacataaatatatcagggatatttcaaaattcaacatttgaatctgtgaatgtcttaagtactctaaaccagacatctacttttgaaacaattggtggcaagaccgccagccatctgtaaggaagctctttaatgggtccaaaccccaagtctggccaggcatggtggctcacacccataatcccagcactttgggaggccgaggtgggcggatcacttgagatcaatagttcgaaaccatcctgcccaacatgattaaaccccgtctttactaaaaatacaaaaattagct

SEQ ID NO: 71492 - DNA, 1073 bp, Homo sapiens
ggtttctattgacttgggttaatcgtgtgaccgcggtggctggcacgaaattgaccaaccctggggttagtatagcttagttaaactttcgtttattgctaaaggttaatcactgctgtttcccgtgggggtgtggctaggctaagcgttttgagctgcattgctgcgtgcttgatgcttgtcccttttgatcgtggtgatttagagggtgaactcactggaatggggatgcttgcatgtgtaatcttactaagagctaatagaaaggctaggaccaaaccagaaacctccaattctcatgtggaagcccatgccctcaccctccaacatgaaagcctctgcagcacttctgtgtctgctgctcacagcagctgctttcagcccccaggggcttgctcagccagttgggattaatacttcaactacctgctgctacagatttatcaataagaaaatccctaagcagaggctggagagctacagaaggaccaccagtagccactgtccccgggaagctgtaatcttcaagaccaaactggacaaggagatctgtgctgaccccacacagaagtgggtccaggactttatgaagcacctggacaagaaaacccaaactccaaagctttgaacattcatgactgaactgaaaacaagccatgacttgagaaacaaataatttgtataccctgtcctttctcagagtggttctgagattattttaatctaattctaaggaatatgagctttatgtaataatgtgaatcatggtttttcttagtagattttaaaagttattaatattttaatttaatcttccatggattttggtgggttttgaacataaagccttggatgtatatgtcatctcagtgctgtaaaaactgtgggatgctcctcccttctctacctcatgggggtattgtataagtccttgcaagaatcagtgcaaagatttgctttaattgttaagatatgatgtccctatggaagcatattgttattatataattacatatttgcatatgtatgactcccaaattttcacataaaatagatttttgtataacagctgc

SEQ ID NO: 71493 - DNA, 339 bp, Homo sapiens
caataagaaaatccctaagcagaggctggagagctacagaaggaccaccagtagccactgtccccgggaagctgtaatgtatgtggacgatgaccacccacccctcacacctcagtcctaggttcttccctgggcagggaataggactagtatcagaatgagttggagtcaaatactgtgatgcatacagcatctctaaccttatcccagacatttgccagtgagaaacaatacaagtaaagaaagtggcttctcactctcagctccctttccagctatcattttacatctcagttcgttccttcatcctggaaccaagagagattcacttgggctacc

SEQ ID NO: 71494 - DNA, 352 bp, Homo sapiens
taaagactttatagagccaaggatcagtaagctatggcccatgggccaaatctagcctgcttttgatacagtcctcaagttaagaatggtttttacatttttaatggttggaagaactgtgctcaatcactgctattgaatgctgagtggctttgaaattagcttttgctgcagatttgaaaaggtttcaagctaaagttacaatgtaaaacagtgcttatacgtgaaacatactgtgataaaatcatttcatttcaacgagaacattgtttgaattgcaagtaatgtcaggctgcatcacatacttcctgcactgtcgaaaggttttttttttttctgttttttttttttt

SEQ ID NO: 71495 - DNA, 393 bp, Homo sapiens
ggaaaagcccttttgtaggagctgtgaagcctggattttagtccagattccaggaatctggaatccttggaaaaatcattgcccagttctaggccttggtttccccatctatataatgtccacactctgcaatcatagaacttccaaagtgagggggaatggtggtggctgctattttataattaataaggatggtaagtggctgagcgcagtggctcacgcctgtaatcccagcactttgggaggccgaggcaggaagatcacttacggctcggagttcaagactatcctggccaacatggcgaaaccccgtctctattaaataaacaaaaaatgagccaggcatggtggtcactgtactccagcctgggtgacagagcaaagtccgtctca

SEQ ID NO: 71496 - DNA, 822 bp, Homo sapiens
agacgttttggagaatctagaggatccacggtctgacccaccgagctgcccgagctgcttaaactttattaccggaggctctttccctactctcagtactatcgctggctcaactacggtggagtgataaagaattactttcaacaccgtgaattttcattcacattgaaagatgatatttacattcgctaccaatccttcaacaaccagagtgatctggaaaaggagatgcagaaaatgaatccatacaagattgatataggcgcagtatattctcacagacccaatcaacacaatacagtgaagctgggagctttccaggctcaggaaaaagaactggtatttgacattgacatgacagactatgacgatgtgaggagatgttgtagttctgcagacatatgtcctaagtgctggaccctcatgacaatggccatacgcatcattgacagagcattgaaggaggactttggatttaagcatcgtctctgggtatattctggaaggagaggtgttcattgttgggtctgtgatgaatcagttagaaaactgtcttctgcagtacgttctgggatagttgagtatttgagccttgtaaagggtgttacaagacgtttgaaaagatatatgatcacctaattgtgtctattcacccttttatccagaccatctatagacataatactcaatactttcaagaatatgccctggtgactctagatattctcagttcatcacgacgctgcgatatgatctctctcccttcttcatataaccagccatgatgcacttctcctaagtttcccttcgtctcacaattca

SEQ ID NO: 71497 - DNA, 1397 bp, Homo sapiens
gccggccgtgctgttcccgccaattcctgtggtaatccttaccgtggcgagttccgcgctcaatggagacgtttgaccccaccgagctgcccgagctgcttaaactttattaccggaggctctttccctactctcagtactatcgctggctcaactacggtggagtgataaagaattactttcaacaccgtgaattttcattcacattgaaagatgatatttacattcgctaccaatccttcaacaaccagagtgatctggaaaaggagatgcagaaaatgaatccatacaagattgatataggcgcagtatattctcacagacccaatcaacacaatacagtgaagctgggagctttccaggctcaggaaaaagaactggtatttgacattgacatgacagactatgacgatgtgaggagatgttgtagttctgcagacatatgtcctaagtgctggaccctcatgacaatggccatacgcatcattgacagagcattgaaggaggactttggatttaagcatcgtctctgggtatattctggaaggagaggtgttcattgttgggtctgtgatgaatcagttagaaaactgtcttctgcagtacgttctgggatagttgagtatttgagccttgtaaagggtggtcaagacgttaaaaagaaagttcacctaagtgaaaaaattcacccttttatcagaaaatctataaacataataaaaaaatactttgaagaatatgccttggttaatcaagatattctcgaaaataaagaaagctgggataagattttagcccttgttcctgaaaaaagcttccaaaagtctcacaattcacttcagcgttgggagcacttgaagaaagtagccagcagatatcagaataacatcaaaaatgacaaatatggaccctggctggagtgggagattatgctccagtactgttttccacggctggatatcaatgtcagcaaaggaatcaatcatctactgaagagcccttttagtgttcatcctaaaacaggtcgcatctctgtgcctattgatttgcagaaagtggaccagtttgatccatttactgttccgaccataagcttcatctgccgtgaattggatgccatttccactaatgaagaggaaaaagaggagaatgaagctgaatctgatgtcaaacatagaaccagagattataagaagaccagtctagcaccttatgtgaaagtttttgaacattttcttgaaaatctggataaatcccgaaaaggagaacttcttaagaagagtgatttacaaaaagatttctgaagacagagctcctcaaaccattgtggatatcttctgccttcaaccacagatcaaatacttcaagagccatttaataaatatggcagaactata

SEQ ID NO: 71498 - DNA, 856 bp, Homo sapiens
gccggccgtgctgttcccgccaattcctgtggtaatccttaccgtggcgagttccgcgctcaatggagacgtttgaccccaccgagctgcccgagctgcttaaactttattaccggaggctctttccctactctcagtactatcgctggctcaactacggtggagtgataaagaattactttcaacaccgtgaattttcattcacattgaaagatgatatttacattcgctaccaatccttcaacaaccagagtgatctggaaaaggagatgcagaaaatgaatccatacaagattgatataggcgcagtatattctcacagacccaatcaacacaatacagtgaagctgggagctttccaggctcaggaaaaagaactggtatttgacattgacatgacagactatgacgatgtgaggagatgttgtagttctgcagacatatgtcctaagtgctggaccctcatgacaatggccatacgcatcattgacagagcattgaaggaggactttggatttaagcatcgtctctgggtatattctggaaggagaggtgttcattgttgggtctgtgatgaatcagttagaaaactgtcttctgcagtacgttctgggatagttgagtatttgagccttgtaaagggtggtcaagacgttaaaaagaaagttcacctaagtgaaaaaattcacccttttatcagaaaatctataaacataataaaaaaatactttgaagaatatgccttggttaatcaagatattctcgaaaataaagaaagctgggatcacgccactgcactccatcctgggcaacataaataaaaattataaaataaataaaacgtattaaacttgtg

SEQ ID NO: 71499 - DNA, 1087 bp, Homo sapiens
gccggccgtgctgttcccgccaattcctgtggtaatccttaccgtggcgagttccgcgctcaatggagacgtttgaccccaccgagctgcccgagctgcttaaactttattaccggaggctctttccctactctcagtactatcgctggctcaactacggtggagtgataaagaattactttcaacaccgtgaattttcattcacattgaaagatgatatttacattcgctaccaatccttcaacaaccagagtgatctggaaaaggagatgcagaaaatgaatccatacaagattgatataggcgcagtatattctcacagacccaatcaacacaatacagtgaagctgggagctttccaggctcaggaaaaagaactggtatttgacattgacatgacagactatgacgatgtgaggagatgttgtagttctgcagacatatgtcctaagtgctggaccctcatgacaatggccatacgcatcattgacagagcattgaaggaggactttggatttaagcatcgtctctgggtatattctggaaggagaggtgttcattgttgggtctgtgatgaatcagttagaaaactgtcttctgcagtacgttctgggatagttgagtatttgagccttgtaaagggtggtcaagacgttaaaaagaaagttcacctaagtgaaaaaattcacccttttatcaggtctgttggaaaagtctccaagcactttaaggtgtctgatttaccggcatgtgcctttagagttaccttgctatcaattttcactgctgggtagcattttataataataatagctatggttaattgagtgcctattttatgctgcagtattcctaaaaggtgctttacagatgttctcattgctcttcaaaaaaaccccacaagagacttgatggtatctccatttatagataaggaaaatgagttttagagagattttataatgagcttggcatcacacgacaagttagttgttaaatttaggattcatgccctggtctgcctgactgtaaagcctactccaatgctttttccactgaattcactacttctctaggatagtggaaa

SEQ ID NO: 71500 - DNA, 1431 bp, Homo sapiens
gccggccgtgctgttcccgccaattcctgtggtaatccttaccgtggcgagttccgcgctcaatggagacgtttgaccccaccgagctgcccgagctgcttaaactttattaccggaggctctttccctactctcagtactatcgctggctcaactacggtggagtgataaagaattactttcaacaccgtgaattttcattcacattgaaagatgatatttacattcgctaccaatccttcaacaaccagagtgatctggaaaaggagatgcagaaaatgaatccatacaagattgatataggcgcagtatattctcacagacccaatcaacacaatacagtgaagctgggagctttccaggctcaggaaggtgagcactgtgtgtcttgctgttagggtgggtggtatcactgacaatgagtaatgatgactctgctttagttctgcagacatatgtcctaagtgctggaccctcatgacaatggccatacgcatcattgacagagcattgaaggaggactttggatttaagcatcgtctctgggtatattctggaaggagaggtgttcattgttgggtctgtgatgaatcagttagaaaactgtcttctgcagtacgttctgggatagttgagtatttgagccttgtaaagggtggtcaagacgttaaaaagaaagttcacctaagtgaaaaaattcacccttttatcagaaaatctataaacataataaaaaaatactttgaagaatatgccttggttaatcaagatattctcgaaaataaagaaagctgggataagattttagcccttgttcctgaaacaattcatgatgaacttcaacaaagcttccaaaagtctcacaattcacttcagcgttgggagcacttgaagaaagtagccagcagatatcagaataacatcaaaaatgacaaatatggaccctggctggagtgggagattatgctccagtactgttttccacggctggatatcaatgtcagcaaaggaatcaatcatctactgaagagcccttttagtgttcatcctaaaacaggtcgcatctctgtgcctattgatttgcagaaagtggaccagtttgatccatttactgttccgaccataagcttcatctgccgtgaattggatgccatttccactaatgaagaggaaaaagaggagaatgaagctgaatctgatgtcaaacatagaaccagagattataagaagaccagtctagcaccttatgtgaaagtttttgaacattttcttgaaaatctggataaatcccgaaaaggagaacttcttaagaagagtgatttacaaaaagatttctgaagacagagctcctcaaaccattgtggatatcttctgccttcaaccacagatcaaatacttcaagagccatttaataaatatggcagaactata

SEQ ID NO: 71501 - DNA, 863 bp, Homo sapiens
gccggccgtgctgttcccgccaattcctgtggtaatccttaccgtggcgagttccgcgctcaatggagacgtttgaccccaccgagctgcccgagctgcttaaactttattaccggaggctctttccctactctcagtactatcgctggctcaactacggtggagtgataaagaattactttcaacaccgtgaattttcattcacattgaaagatgatatttacattcgctaccaatccttcaacaaccagagtgatctggaaaaggagatgcagaaaatgaatccatacaagattgatataggcgcagtatattctcacagacccaatcaacacaatacagtgaagctgggagctttccaggctcaggaaaaagaactggtatttgacattgacatgacagactatgacgatgtgaggagatgttgtagttctgcagacatatgtcctaagtgctggaccctcatgacaatggccatacgcatcattgacagagcattgaaggaggactttggatttaagcatcgtctctgggtatattctggaaggagaggtgttcattgttgggtctgtgatgaatcagttagaaaactgtcttctgcagtacgttctgggatagttgagtatttgagccttgtaaagggtgttacaagacgtttgaaaagatatatgatcacctaattgtgtctattcacccttttatccagaccatctatagacataatactcaatactttcaagaatatgccctggtgactctagatattctcagttcatcacgacgctgcgatatgatctctctcccttcttcatataaccagccatgatgcacttctcctaagtttcccttcgtctcacaattca

SEQ ID NO: 71502 - DNA, 863 bp, Homo sapiens
tgtcatccaggctggagtgcagtggcatgatctcggctcactgcagcctccgcctcccgggttcaagcgattctcctgcctcaccctcccgagtagctgggattacaggtcgcatctctgtgcctattgatttgcagaaagtggaccagtttgatccatttactgttccgaccataagcttcatctgccgtgaattggatgccatttccactaatgaagaggaaaaagaggagaatgaagctgaatctgatgtcaaacatagaaccagagattataagaagaccagtctagcaccttatgtgaaagtttttgaacattttcttgaaaatctggataaatcccgaaaaggagaacttcttaagaagagtgatttacaaaaagatttctgaagacagagctcctcaaaccattgtggatatcttctgccttcaaccacagatcaaatacttcaagagccatttaataaatatggcagaactatatatgtgtcttaaacctcaaagtaaattttccttgagaaataatttatgttgaaaagatttcctggccaagtgctgggattaccgggtgttgaagccaacaaccgaactgaggccaggagttcaacggccagcctggcaaacatggtgaaacccggtctccataaaaatacagaaattagcaggtggtggtgcggcacctgtatcccaggtacctaagaacggtgggcgcacaaagaattcactggacccatgaggtggaggtacacggaattggaaacaagcccatggactccacctggggcaacataattaaaatttaacatcattaaacgtttacacctttgtgaaacaaaacacaccacaaggggcggcgaaaaagag

SEQ ID NO: 71503 - DNA, 526 bp, Homo sapiens
tataagccaatatgaaaaaaatcagcagattgaatattattcaagagatgaaggctactctagaaaactgtgacaatgttatagcaatacaaattatcttgccacttcattttttatttaaatatgtgatagtttaagcagtagtgcctaagataatgctctactcagtagacactcatatgtgtgattattggatgaacaacaactctgagcttggaaagcctggttgaagctgccattgcaactggccgtattaagtcctttgtatcctcactgttccatactagctcagcctatgatgtggacttcagcaaatgtgtaagcaaatctttgtgcatgatgtgtgttaaatagaagcattaggcaaaaaagaatgtaaaagtaaatgggctttgttttgtttcctttgctgttcttccatatattatctattctattttagatttacaaaaagatttctgaagacagagctcctcaaaccattgtggatatcttctgccttcaaccacagatcaaatacttcaag

SEQ ID NO: 71504 - DNA, 1418 bp, Homo sapiens
gccggccgtgctgttcccgccaattcctgtggtaatccttaccgtggcgagttccgcgctcaatggagacgtttgaccccaccgagctgcccgagctgcttaaactttattaccggaggctctttccctactctcagtactatcgctggctcaactacggtggagtgataaagaattactttcaacaccgtgaattttcattcacattgaaagatgatatttacattcgctaccaatccttcaacaaccagagtgatctggaaaaggagatgcagaaaatgaatccatacaagattgatataggcgcagtatattctcacagacccaatcaacacaatacagtgaagctgggagctttccaggctcaggaaaaagaactggtatttgacattgacatgacagactatgacgatgtgaggagatgttgtagttctgcagacatatgtcctaagtgctggaccctcatgacaatggccatacgcatcattgacagagcattgaaggaggactttggatttaagcatcgtctctgggtatattctggaaggagaggtgttcattgttgggtctgtgatgaatcagttagaaaactgtcttctgcagtacgttctgggatagttgagtatttgagccttgtaaagggtggtcaagacgttaaaaagaaagttcacctaagtgaaaaaattcacccttttatcagaaaatctataaacataataaaaaaatactttgaagaatatgccttggttaatcaagatattctcgaaaataaagaaagctgggataagattttagcccttgttcctgaaacaattcatgatgaacttcaacaaagcttccaaaagtctcacaattcacttcagcgttgggagcacttgaagaaagtagccagcagatatcagaataacatcaaaaatgacaaatatggaccctggctggagtgggagattatgctccagtactgttttccacggctggatatcaatgtcagcaaaggaatcaatcatctactgaagagcccttttagtgttcatcctaaaacaggtcgcatctctgtgcctattgatttgcagaaagtggaccagtttgatccatttactgttccgaccataagcttcatctgccgtgaattggatgccatttccactaatgaagaggaaaaagaggagaatgaagctgaatctgatgtcaaacatagaaccagagattataagaagaccagtctagcaccttatgtgaaagtttttgaacattttcttgaaaatctggataaatcccgaaaaggagaacttcttaagaagagtgatttacaaaaagatttctgaagacagagctcctcaaaccattgtggatatcttctgccttcaaccacagatcaaatacttcaagagccatttaataaatatggcagaactata

SEQ ID NO: 71505 - DNA, 1799 bp, Homo sapiens
gccggccgtgctgttcccgccaattcctgtggtaatccttaccgtggcgagttccgcgctcaatggagacgtttgaccccaccgagctgcccgagctgcttaaactttattaccggaggctctttccctactctcagtactatcgctggctcaactacggtggagtgataaagaattactttcaacaccgtgaattttcattcacattgaaagatgatatttacattcgctaccaatccttcaacaaccagagtgatctggaaaaggagatgcagaaaatgaatccatacaagattgatataggcgcagtatattctcacagacccaatcaacacaatacagtgaagctgggagctttccaggctcaggaaaaagaactggtatttgacattgacatgacagactatgacgatgtgaggagatgttgtagttctgcagacatatgtcctaagtgctggaccctcatgacaatggccatacgcatcattgacagagcattgaaggaggactttggatttaagcatcgtctctgggtatattctggaaggagaggtgttcattgttgggtctgtgatgaatcagttagaaaactgtcttctgcagtacgttctgggatagttgagtatttgagccttgtaaagggtggtcaagacgttaaaaagaaagttcacctaagtgaaaaaattcacccttttatcagaaaatctataaacataataaaaaaatactttgaagaatatgccttggttaatcaagatattctcgaaaataaagaaagctgggataagattttagcccttgttcctgaaacaattcatgatgaacttcaacaaagcttccaaaagtctcacaattcacttcagcgttgggagcacttgaagaaagtagccagcagatatcagaataacatcaaaaatgacaaatatggaccctggctggagtgggagattatgctccagtactgttttccacggctggatatcaatgtcagcaaaggaatcaatcatctactgaagagcccttttagtgttcatcctaaaacaggtcgcatctctgtgcctattgatttgcagaaagtggaccagtttgatccatttactgttccgaccataagcttcatctgccgtgaattggatgccatttccactaatgaagaggaaaaagaggagaatgaagctgaatctgatgtcaaacatagaaccagagattataagaagaccagtctagcaccttatgtgaaagtttttgaacattttcttgaaaatctggataaatcccgaaaaggagaacttcttaagaagagtgatttacaaaaagatttctgaagacagagctcctcaaaccattgtggatatcttctgccttcaaccacagatcaaatacttcaagagccatttaataaatatggcagaactatatatgtgtcttaaacctcaaagtaaattttccttgagaaataatttatgttgaaaagatttcctggccaagtgctgggattaccgggtgttgaagccaacaaccgaactgaggccaggagttcaacggccagcctggcaaacatggtgaaacccggtctccataaaaatacagaaattagcaggtggtggtgcggcacctgtatcccaggtacctaagaacggtgggcgcacaaagaattcactggacccatgaggtggaggtacacggaattggaaacaagcccatggactccacctggggcaacataattaaaatttaacatcattaaacgtttacacctttgtgaaacaaaacacaccacaaggggcggcgaaaaagag

SEQ ID NO: 71506 - DNA, 1491 bp, Homo sapiens
gccggccgtgctgttcccgccaattcctgtggtaatccttaccgtggcgagttccgcgctcaatggagacgtttgaccccaccgagctgcccgagctgcttaaactttattaccggaggctctttccctactctcagtactatcgctggctcaactacggtggagtgataaagaattactttcaacaccgtgaattttcattcacattgaaagatgatatttacattcgctaccaatccttcaacaaccagagtgatctggaaaaggagatgcagaaaatgaatccatacaagattgatataggcgcagtatattctcacagacccaatcaacacaatacagtgaagctgggagctttccaggctcaggaaaaagaactggtatttgacattgacatgacagactatgacgatgtgaggagatgttgtagaggtgagcactgtgtgtcttgctgttagggtgggtggtatcactgacaatgagtaatgatgactctgctttagttctgcagacatatgtcctaagtgctggaccctcatgacaatggccatacgcatcattgacagagcattgaaggaggactttggatttaagcatcgtctctgggtatattctggaaggagaggtgttcattgttgggtctgtgatgaatcagttagaaaactgtcttctgcagtacgttctgggatagttgagtatttgagccttgtaaagggtggtcaagacgttaaaaagaaagttcacctaagtgaaaaaattcacccttttatcagaaaatctataaacataataaaaaaatactttgaagaatatgccttggttaatcaagatattctcgaaaataaagaaagctgggataagattttagcccttgttcctgaaacaattcatgatgaacttcaacaaagcttccaaaagtctcacaattcacttcagcgttgggagcacttgaagaaagtagccagcagatatcagaataacatcaaaaatgacaaatatggaccctggctggagtgggagattatgctccagtactgttttccacggctggatatcaatgtcagcaaaggaatcaatcatctactgaagagcccttttagtgttcatcctaaaacaggtcgcatctctgtgcctattgatttgcagaaagtggaccagtttgatccatttactgttccgaccataagcttcatctgccgtgaattggatgccatttccactaatgaagaggaaaaagaggagaatgaagctgaatctgatgtcaaacatagaaccagagattataagaagaccagtctagcaccttatgtgaaagtttttgaacattttcttgaaaatctggataaatcccgaaaaggagaacttcttaagaagagtgatttacaaaaagatttctgaagacagagctcctcaaaccattgtggatatcttctgccttcaaccacagatcaaatacttcaagagccatttaataaatatggcagaactata

SEQ ID NO: 71507 - DNA, 1237 bp, Homo sapiens
gccggccgtgctgttcccgccaattcctgtggtaatccttaccgtggcgagttccgcgctcaatggagacgtttgaccccaccgagctgcccgagctgcttaaactttattaccggaggctctttccctactctcagtactatcgctggctcaactacggtggagtgataaagaattactttcaacaccgtgaattttcattcacattgaaagatgatatttacattcgctaccaatccttcaacaaccagagtgatctggaaaaggagatgcagaaaatgaatccatacaagattgatataggcgcagtatattctcacagaaggactttggatttaagcatcgtctctgggtatattctggaaggagaggtgttcattgttgggtctgtgatgaatcagttagaaaactgtcttctgcagtacgttctgggatagttgagtatttgagccttgtaaagggtggtcaagacgttaaaaagaaagttcacctaagtgaaaaaattcacccttttatcagaaaatctataaacataataaaaaaatactttgaagaatatgccttggttaatcaagatattctcgaaaataaagaaagctgggataagattttagcccttgttcctgaaacaattcatgatgaacttcaacaaagcttccaaaagtctcacaattcacttcagcgttgggagcacttgaagaaagtagccagcagatatcagaataacatcaaaaatgacaaatatggaccctggctggagtgggagattatgctccagtactgttttccacggctggatatcaatgtcagcaaaggaatcaatcatctactgaagagcccttttagtgttcatcctaaaacaggtcgcatctctgtgcctattgatttgcagaaagtggaccagtttgatccatttactgttccgaccataagcttcatctgccgtgaattggatgccatttccactaatgaagaggaaaaagaggagaatgaagctgaatctgatgtcaaacatagaaccagagattataagaagaccagtctagcaccttatgtgaaagtttttgaacattttcttgaaaatctggataaatcccgaaaaggagaacttcttaagaagagtgatttacaaaaagatttctgaagacagagctcctcaaaccattgtggatatcttctgccttcaaccacagatcaaatacttcaagagccatttaataaatatggcagaactata

SEQ ID NO: 71508 - DNA, 721 bp, Homo sapiens
gccggccgtgctgttcccgccaattcctgtggtaatccttaccgtggcgagttccgcgctcaatggagacgtttgaccccaccgagctgcccgagctgcttaaactttattaccggaggctctttccctactctcagtactatcgctggctcaactacggtggagtgataaagaattactttcaacaccgtgaattttcattcacattgaaagatgatatttacattcgctaccaatccttcaacaaccagagtgatctggaaaaggagatgcagaaaatgaatccatacaagattgatataggcgcagtatattctcacagacccaatcaacacaatacagtgaagctgggagctttccaggctcaggaaaaagaactggtatttgacattgacatgacagactatgacgatgtgaggagatgttgtagaggtgagcactgtgtgtcttgctgttagggtgggtggtatcactgacaatgagtaatgatgactctgctttagttctgcagacatatgtcctaagtgctggaccctcatgacaatggccatacgcatcattgacagagcattgaagggcaagtatcagcagtttctgaatggggtcaagtgtaagaatcggttttcctctgactactattaactattagtctctgtattttgtgatcaaatctcattaatttgtgtgtgtgtgtattgtgtgatatttgtgtgtgtgtgtg

SEQ ID NO: 71509 - DNA, 280 bp, Homo sapiens
tggtgaaggaaccaacctgaaagacaaacagaaagaaacgctggcaggtggggagttaggggagtccgtgaagggcatggcactcaccaggaaccagcgcaacgccccctgcagcctgatcttcctggcaccgaagcacacggcctgggagcttgtggaagacacaacattccgattcagtagctcctgagagtctgtgtttccaacaaactctcactgctgccggcctggggaccacacttagagactaagaattgcgtttgctgcttctcccaccttc

SEQ ID NO: 71510 - DNA, 1458 bp, Homo sapiens
tacccattctcctgttaatggacatttgggttgtttccaggttttgactattatgaagaaagctgtagtgaacattctcatacatgcttttggagaacctcggtgcttatttctgtgggtatatatacctgggaatggaattgctaggtccttgggtggcttatgtttagctttaatagataccaccaccaaacagttttctaaagtgtttgtgctaatttatactcatattggcaacaaatgagcattctagttgctctttatcctggccaatggtgttaccaatctttttaattttagccactctggtagatgtgtagtggtttaattttcatatccttgatgactaaatgatgataccttttcatttgcttattggccagtcaatcctcttttatagaatgtctgtccaagttgtcattccggtcttaaattgagttgtatgtgtatgtgttgatttgtaggaactctttatatattacagatataagtcttttattggacaaaaatagtatatttatcaagtatctttttctagtctataaggcttgacttttaaacctcctaatagtatttttattgaacagaggttcttttaatgatgtgcagtttatcagtctttttgtttatggtttgcttggtttttgtcccatttaagagatattcatctcccccaaggatctgaaggtatttgcctatattatcttctagaagctttagtgatttatctttcaaaattaggtttatgatctttctgggattaatttttgtgtgtggtgttagaagtcaaacctcatatttttccatatggatatctgattggcctcactgtttcttgaatatgaccatgtaaatcacaaaactgtcagtgtgggtcagagtcttcgaatttgctatcctgaagatgcttcagtacatcctgaagatttgcttcctgaaaatgaatgctctaggaccctgaaggttgtgactgtgcacctgccaactcaagctgaaggctgaagaggaaagctctgcagccccttcctcaagctggaggcagagtgacgtctgctggggatgcaggctgtgcgccccacaggactccagagtggcactaagcatgttgagttcactcctgcccatggtctagcttctgctttgcaggctcaggcatcttatcttgccagggcctcaaagctggtgggacagaatagcatctttgctcactaagctctgacccaccggcctccttgcagctctatagtccaagcgaactccttccaacatcaggcttcttttaaaaaaaaaaatttttttgaggcagagtctcactctgtcacccaggctgaagtacagtggtgcaatctcagctcactgaaacctccgcctcctaagttcaactgattctcatgcctcagcctcccaagtagctgggattacagatgcctaccaccatgcccagctaatttttgtatt

SEQ ID NO: 71511 - DNA, 749 bp, Homo sapiens
aaattggccctcaagccaagaattcggcacgagtttatgatctttctgggattaatttttgtgtgtggtgttagaagtcaaacctcatatttttccatatggatatctgattggcctcactgtttcttgaatatgaccatgtaaatcacaaaactgtcagtgtgggtcagagtcttcgaatttgctatcctgaagatgcttcagtacatcctgaagatttgcttcctgaaaatgaatgctctaggaccctgaaggttgtgactgtgcacctgccaactcaagctgaaggctgaagaggaaagctctgcagccccttcctcaagctggaggcagagtgacgtctgctggggatgcaggctgtgcgccccacaggactccagagtggcactaagcatgttgagttcactcctgcccatggtctagcttctgctttgcaggctcaggcatcttatcttgccagggcctcaaagctggtgggacagaatagcatctttgctcactaagctctgacccaccggcctccttgcagctctatagtccaagcgaactccttccaacatcaggcttcttttaaaaaaaaaaatttttttgaggcagagtctcactctgtcacccaggctgaagtacagtggtgcaatctcagctcactgaaacctccgcctcctaagttcaactgattctcatgcctcagcctcccaagtagctgggattacagatgcctaccaccatgcccagctaatttttgtatt

SEQ ID NO: 71512 - DNA, 274 bp, Homo sapiens
agcaaggccccatctctacaaaaaaaaaaacaaacccaaaattccccgagtgtcatggcacttacctatagtcccagctactgggagggatgaggtgggaggatcgcttgagcctgggagtttgaggctacaatgagccatgataggaccactgaactccatcctgagtgacacagcaaggtcctgtttctaaagaaaaaaaggacattggaatcaggatcccctccatcctaaggtacctacaaggcatctctctctgcaaacaagtaaacat

SEQ ID NO: 71513 - DNA, 513 bp, Homo sapiens
gcttcctattttttcaggccccaaacttccttcatctcttcaaatgccttcaagggccagacagggaagccttcctgcattaagtgggcagctgggattatctccagtggcaaacttaggaccgtcaacggcagatttttactaagtgggaatgcaagctgagaattcctacatcatctgtttatttgtttaagagaagcctgaaatctggatctctaagtgaaatgtcccaatattttaatgttgacaataaattcacataaaaaaaataccatgtgggccaaataaaacatgtcacaatatactactttgggatctctctttctcatatctatctaggcagacgccaggcctgtttgttttaactctgaactctcttttctcttcattactttctcttctcctcatcactttctcttctcctcatcactttctcttctcctcatcctatttctggctctttgtcccaattaggtagtcatttaaaataataatgaaatctatttattagta

SEQ ID NO: 71514 - DNA, 516 bp, Homo sapiens
taacaagatagctctcagcaatgagaatgactcatcactgacttggtaataattctagggaaaatatatggtttgtggccaccccagcagtccactcagcctcttcctggcctgttagagaaggctcttccttcaggtgttatctgcaccacgaataatgttaggtttgagtcacctccctctaggacacctttccttaaagaggaaatgtttcctggagctggtagtcagggagcactgagagaaagcatttctcactgtgagttatcaatctctgtgcccattttgcataaccaattgccattttgtggcagtatttcatatctaaaatgattttccagagctggaccatggctcatgcctgtagtggtgcatgcctgaagtcccagctacccaggaggctgaggaaggaggactgattgagcctgggaggtcaaggctgcagtgagtggtgatagtgccactgcactccagcctgggtgacagagtgagacccctgtctcaaaaaaatgatac

SEQ ID NO: 71515 - DNA, 468 bp, Homo sapiens
ctcaaaaaaaaaaaaaatcaattaatgcacgcataatatagagacagagtcattgttaccattctcttattttgcctttgacaagtttatattgagcacgttatcaggcaatgtgggagattctggagaaccaggtttgcctcataactagggttaccatatactctagtttgcctggggcaaccctgatttatgcctgttgtcccagtgtgattattactagtgtaatttttcactttgagaagtgtccaggtttggaggataaattatctttctaataattgatacccttctcataacctaacgggttccttttagtattttatctgggttaaaattaccagctgtaatttggcagctctaataagactgcagcaatacttatcttccatttgaacagattgttacttgaccaagggaagttaatagcaaaagtaactgcagggcacatgtatgtcatgggcaaaa

SEQ ID NO: 71516 - DNA, 441 bp, Homo sapiens
gcttaacttgggaggtagaagttgcagtgagcggagactgcgccactgcgctccagcctgagtgatagaggggagactccatctcaaaaaaaaaaaaaagcaagtagatacaacaccttagttgttgccttccattgttacagatggctcctctgagagacgaatgtacttggccttcctacatagcatgatgctttcaacacttgatgctattgaagatgtaaatgttttccatcttctccctcccctttcattttccttcctatttcttcccctgtggtttctcttttctctctctggtataaaaatgctggaaagtgatacactaaaatgttaacagtagttgtctctagtgagtgtgactgtggataggtaattttctttacctctccactttctactttcacctttgccaatgttaagtcagtcagcaaacttaaa

SEQ ID NO: 71517 - DNA, 421 bp, Homo sapiens
tcatgcctgtaatacccgtactttgggaggctgaggagggaggactgtttgagcccaggagtttgacaccagcctgggcattacagtgaaaccccatctctacaaaaaattttaaaacttagccaggcgtggtggcgtatgcctgtagttccagctatttgggaggccaaggctgcagtgggctgtgattgtgccactgcactccagcccaagtgatagagcaagactctatctcaaaaatcaaacaacaacaacaacaaaacaccacatacacacacacaatgagggtaaacaaaataagtatgtgtgggtcacacttcagcaggggttgctggtttgccagagaaaagtgcaattattttatctatggtgtttattgtctccactctaaactgtcagttacagaatggcaagactgttt

SEQ ID NO: 71518 - DNA, 523 bp, Homo sapiens
gtttttttttttaaagggacaaataatgaatgatagagcagtcacacagattgagatacaaagtagaaatgtgactgccagaagctgggtggtagggggatagggagttagtaatattgggtacagagtttcaattttgcaagatgaaaagttctggagatggatggtggtgatagctacacaatgtccttaatgccactgaacatttaaaatggttagaatgataaattttatgttatgtgtattttactacaacttaaaaaaaaagcataaaaagataagccaaaattaaaaatcaagccacataatgtaagatagacaatatcatataaataacataaagaactcctacaaatctggctgggcacagtggctcacgcttgtaatcccagcactttgggatgccgagatgggcagattgcctgaggtcaggaagagaccagcctggctaacaaagcgaaaccctgactccagaacaagactccagccttactccagagcaagaactgtctcaaaaaaaaaa

SEQ ID NO: 71519 - DNA, 380 bp, Homo sapiens
tccacagccagcagccttcccggaatagcagctggggaggacccctaattaccctcacccacaaatgagaggttgtgcccagctgactggcgggaggctcggggctgtcagagggccccgaggcaaacagagcagcttctgggaatgaaggactttggtgagatgaggtagacacatgaaaatgccctcagctgtccagactggcccttacctgcccacctcagctggggaaactggaagctaaagagtgagtcctattcccacagaactctgggcatgctgagcgcacaggaggggaatgcaaggcctccaatggaaaactggagaaactgaggcccagagaggcatatgggcctattgggagtcagctgagtcaggga

SEQ ID NO: 71520 - DNA, 449 bp, Homo sapiens
gcccaggctggagcacatcagtgcagtcccagctcgttgcatcctcaacctactgggctcaagcaatcctcccacctcagcttcctgagcagctgggaccacaggtgcacaccaccatgcccggctgattttttacttttttgatagagacagggtctcactatgttgcccaggctagtcttgaactcctggacacaagtgattctcgagcctcggcctcccgaagcgctgggattacaggtgtgagccaccatgccctgcctcacgtttttctgaaatcaaaatagagtaactggttataaagtttacccatcaaaagaagaaactgactttgcattttattctttgtcataaaatctgcctggatgcttagtattatattattgtttactattatatattattccagagtaatggctttaacctcaacttcagaatcattcttgttg

SEQ ID NO: 71521 - DNA, 343 bp, Homo sapiens
gcacaaaatatatacttaatctttatttataatcttgtggtagcagagatctttgtaagcatgataccaatagcagaaactaaataaattttaaaaagagatcttacagccagccacggtggctcatgcctgtaattgcagcactttgggaggccaaggcgggcagatcacctgaggttggagtttgagaccagcctgaccaacatggagaaaccccatctctactaaaaatacagaattaccctggcgtggtggtgcatgtctgaaatcccagctactcgggaggctgaggcaggagaattgcttgaacctgggaggcagagattgcagtgagccgagattg

SEQ ID NO: 71522 - DNA, 272 bp, Homo sapiens
tcactggccttgcttgtaccaggtgtcattgtagggttagcagtgagctatgcctgttgtctttcttgtcaataggtaatactgtgtcatattcatttccccactgctaacacattaggctcttctgtgccattttctggcctcggtactatcttccatcatctcctgctttgtgcctgtgagcccaggtcctccagggtgctgggctggtttcattggaaggcccagcctggaaacagccgtcttcagctgcccttgtttcttgtttgttt

SEQ ID NO: 71523 - DNA, 612 bp, Homo sapiens
gtaccacaaaggcaaatgaggaaatgactccccccacctcacacacatggaatatttaaacaaaaatgccctgctaatctttagagatgccagtgttttcaacacatgaaaggtacccagtaaatatttaaagaaaatacacaccgtaggttctctaatgaatttctttttcttctaaataccatctggcaagatggccagaatcgtggcggtccgtttcatcttaacgtttccattcaggtttcacctccttttccataaggccttggtgtgagctgagattgaatgtttaattgaagaggacataattttcacacatacagcaaagatttgatgaggctttgaggtttattgtagccattaaagtgtcgtagctgctggcaaaatcccagaaaatgtctaaagctaaaccagatgtgattagcaaatttcaagaagtatcaggccctagatctccaggcaggcagagtcttttaaaaaaaaaaaaaaaactcgagggggggccgtacccattcggcctatatgaagcgtatacgccgctaacttgcctcgtttacacgtgggattgaaaaccccgcgttacaacttaatgcttggaaacatccctttgca

SEQ ID NO: 71524 - DNA, 712 bp, Homo sapiens
ctgcgttggtccctccaccccatcctgcaccacacggggtggcttgccttccccacaccacagaggaggaagctggctgggtcagctctcggggccctgctttgtagagaagggacagaggctcagaagtgaacccacttgcccaggtcacttccaatccatggctaaggattggaatccagacagcctgattccagagctcaaggctccaacctctccccagtgacctctttgagcaatgccctggattcagattgatgaagaggcagacatagagacccagcccctcccagctagaggtgtggggcttaccagatacctgccccagagctagaggtgaagcccctgtggcgcacgcagttcaggacctgcatgagtgttgacagggccctaagaagaaccacatggagcagtgttgccacagggctgctggcagcaaacattcacaggtctgggccagagcagcttccggaacctccaggccacctctcagaggactcggtccctgccctccctctgttctattggtcgcaggcctccccctgtcccagccccagctaccggggtcttccagggcctggggattgtgggcaggtggcatggagcggatgagcagaactgttgattgacaagcgaagctggtctagcaacagctgcagcacaagccaggtggaagtgtgctgcccttcagcttgagatggtccagggtgag

SEQ ID NO: 71525 - DNA, 342 bp, Homo sapiens
cggggtttcaccatgttggccaggctggtctcgaactcctgacctcaagtgatccgtccaccttggcctcccaaagtatgtgttaggattacaggcataagccaccgcacccagcctacatctataacaatagcaaaatagaaactgcatttaagttgtacttaagttataattaaagtaaatcacattaagtcatattgctcaaagggcagcaaaacttaattggcagatttctgcgtggctatgttttggtttctcaactactattttgaaagcatgttcttgaatcatcttcacctgaaagctctacatcttgtaagtagagctgacaggtttaattct

SEQ ID NO: 71526 - DNA, 483 bp, Homo sapiens
  misc_feature (464)..(464): n is a, c, g, or t
ttgcttggttcatggggccttaaacatttcaacatttgtccttcacaagataattatttcattaaaagtaaattacaatttattcagtagctctccacatgaaaataataatcagatggtaaatggatgccctaagatatgtggagaacaaattaccgtggtattttaaaggagagagttttctaagctaacttttatgcatgcagcatctccctggctaacatgagcattgatgataatttctaccattaatgagctcatttttttttttaatgagactttgtttttacttttaaaaaacagtaacctaaggcaggtgaagtcaaattgttattgctgggaagttgtgtttcaaatgagcactgtaaatgattttgctgaggcaggagaatggcgtgaacccaggaggcagagcttgcagtgagcagagatcgcgccgctgcactccagcctgggcaacagantggactccgtctcaaaaaa

SEQ ID NO: 71527 - DNA, 236 bp, Homo sapiens
ttacaaacgtcttagaaatagcctcagagcccaaagaaaaattttaaaagcacatttggccataaattacaacttactaaatgtaaacaccagaaattattcaaggtattcttcagaccacaatggaattaaactagaaatcaataaaagaaagactgctggaaaaacccaaaatattgggtgattaaacaacatccttctaaataatgttatatgtcagagatgtcttgaggaat

SEQ ID NO: 71528 - DNA, 405 bp, Homo sapiens
ctgctttctcagtgcttatcatggtctgaaaattcctatttaaagaagcagagctttcttttaagtcctaacagaacaaagtcacactcaacagtgcacaggcacacgccgggatcgagaatgcatttttggcaaaaagtctcctcttttctctgtctcctccagctctctgcaggcccaaaccttgcagaagccattccatgtttcctgagcaggaaaagacaaactcagaccgacaaccttggacttcaaaagactgcacacaaggggaggaaggactgagagtaccaaggcgtgagaattcagaatgctgctatctcatttatttttaccatttaggaaacgttttgatctgcattccttttcccttccctgatttcaaaaaataaaaataaaaatgcttcg

SEQ ID NO: 71529 - DNA, 924 bp, Homo sapiens
gatgggtaacttattttctagtagagggtgctgcctttataatatataataaccccatattttcttaccaccccctggccatgcagaactgcatcaacctctccaccatctcagaaaatatctgcatagggtctcatcggtttttttctaagtgctgtgcctcatagaacaccatggggttgatacagacaatacgtgaccctcaggaccttaccagaggacagtgcctaggaacatagtacatggagccaaggatgtttataacccactgtggttccacaagaactttaggtgacttgaaaaccttatgatccattgacatgaaagcactaacccattcatttgtgtacatgatcaacacatgtcagttccttgaggatggggactcgccttgttcactgctgtatccccagggcttagaatagtacctggtctataatagcaagctcccagtaaatatctgctgtttaatgaagtaatggtaattttgaaacactttggaaaatacctttcttgtgctttagtttttgcattttgtaaacctctgtacattaataaaaatttatgattaataatgtcttgtagaacacatttgcctcagaaactttgattatttgatgtaattcttctgaattcaagtgtgttaattaaagcagaagaaaaagcttttcttaattatttagaaaactagtgataacattcggatgttctcttggctaaccaagacttctttctagtatttatttttgaactaaatgctttaagcaaataaagcactctgggatatatttgaatgttacctaacaaccactggcacctagaataatttctcattttatagacttttcactttggacacttgaatttttctaataaaactctgaaggatactattgactacacatgttttattgtgttcccttt

SEQ ID NO: 71530 - DNA, 517 bp, Homo sapiens
tgcaaagatgcttcctgagaaaccactctaaattcaatggcctacgacaacaaataatttcttcttttaaaaattatttattattttattttttgcatcttttttattattataactttaagttctgggatacatgtgcagactgtgcaggtttgttacgtaggtatacacgtgccatggtggtttgctgcatccatcatcccatcatctaggttttaagccccacttgcgtacgtaattgtcctaatgctatccctccccttgcccaccacccccaacaggccctggtgtgtgatattcccctccctgtgttctcattgttcggctcccacttaagagtgagaacatgtggtgtttggttttctgttcctgcgttagtttgccaagaatgagggtttccagcttcatccatgtccctgcaaatgacatgaactcattctttattatggctgtatagtactccatcgtgtatatgtaccacattttctgtatccagtctatcactgatgggcatttg

SEQ ID NO: 71531 - DNA, 489 bp, Homo sapiens
aaaatagaaatcttagccagccgtcatggtgtgctcctgtagtcctagctacttgggagactgaggtgggaggatcaattgaaaccagaaggtccaggctgcagggaactgtgactgcaccactgggctccagcttgggtgaaagagcgaaaccctgcctcaaaaagaaaaataagatggatgtttctgcattaaaattagggagttgtcgtataatgtagttgcataaactagtattctgtgcttgtgtggttaaagagccttcgtagaaaaaatcccacatttttcttaaaaggaaatcttttggccaggtgtggtggctcacatctgtaagcccaacactctgggaagccgaggtgggcagatcacttgaggtcaggagtacaaaaccatcctggccaacatggtgaaaacccgtctctactaaaaatacaaagatcagctgggcatggtggtgcgtgcctgggtgacagagcgagactccgtcca

SEQ ID NO: 71532 - DNA, 442 bp, Homo sapiens
tggaagtgaaagtagcactttgaaaaagtattaagtaagttgcaaaccattctctataacctaaatgtcaccaaccaccagtcaggaagtttgtcctggtctatttcacttcctcacactggaggagaggtattggggtccccacaaagtattggaaaggcagcatgacttagaatgatgctcttaggactgagaaacaggagaccttggtatgagacttactttgcctccagtgagcaggggaaggtcacttcaccatctttatctaaaaaataaaggctttgggctctgatccacagagatgggtgagtcctaatgctctgtgactctatgcatctggtatccttttcctgtccagggctagaaatatattttgtcttttccagtcataagaaaagtgggaggagcctgggcaacataacaaaaccccatctctacaaaa

SEQ ID NO: 71533 - DNA, 2894 bp, Homo sapiens
tttttaaatcaagagtgtatttaaagttattttttcatttgtatataattttaaaccatgttttcttacagtttgtcatcatcctgctcttggtttttgtcacagaagttgttgtagtggttttgggatatgtttacagagcaaaggtatgttgtctactgtaattcacataatgccttaaaaggtggtttaagtgtttcaagtaaaatagaacacattcattttatcagagtaaacattttcttttgccttacttgtttaatctgtatttcaaatatctaaagttaattggcaaatatttacatgtcaagactccttacctcatttaatatagcagagtgttatatatgtattgttcttgattataggtatttatagctgcaaatgaataattagctgagaagtttgttcagatttcctcagcacacagattgcctatatgaggggaggcataattttctgatttctgctttagaagaaccaaactcagaattgcgttttccattgtctctttaaaaaatgctttggtcctaaacatagaaaaaggtgttgtgagttgtgatcccaccttccacccctgtcctgaggaacaaggggtcctgccaacttagaacaccaaggcagctggtgccagcactcctttcttgcccttcattctttttaatcatttcaccgttccttcctttctattttgcctgattttgctgtctacctgtagtactacttaaggctaaacaggctgctttaaattaattaatatgggtataattttagaggcatggtaaagacataatagactcattctcattataacttaatggttttgagtcaagggcataatatgccaagttaattttcagatcattgatacgtaaggtactgtaaagctgtgctaaaaaaaaaatgcaatggattatgtccctacctatgatctggttatcaattttatggacttatgatattactgttgtaattaccagataagtccagtcctccgaggggtaaggaggatctggtacaagcaaactttactaagtgatacttgcttgccattttagtaattggcagcaataagctatgaagcttgtttcctgtctcctttttgcaatacattgaacagtagctttttcataaagtgccatttctaaggactgatttttttaaacctgccgattacttttgcacatttagccaactctaaacgttgaataaataaaatggaaataatgttggcatttgtcctaaaagtatcttacaggagcttcagagttactttgttttacctcctttaggaaaggaaaatgagtaacttatttgtaaaaggaaggcatccatttataatttaggacatctatcccaagcctcaacttttctcccttttgaatacattgttagcctgccattttgcacacaatcttctctttgaatgcttgaatgtatgtggtatatgtctgaatttttacctgtcacttttctccctcctgccttcatctatatctatatgaagatgaaggcaggaagggagaaaactttacaggaaattcatagatatctggcaacttgcaaacatttcatttaagtattttagtaggagccttgactaatgttacttttactagtatttttgagggactgaattctttgttctgattcaggtggaaaatgaggttgatcgcagcattcagaaagtgtataagacctacaatggaaccaaccctgatgctgctagccgggctattgattatgtacagagacagctgcattgttgtggaattcacaactactcagactgggaaaatacagattggttcaaagaaaccaaaaaccagagtgtccctcttagctgctgcagagagactgccagcaattgtaatggcagcctggcccacccttccgacctctatgctgaggggtgtgaggctctagttgtgaagaagctacaagaaatcatgatgcatgtgatctgggccgcactggcatttgcagctattcagctgctgggcatgctgtgtgcttgcatcgtgttgtgcagaaggagtagagatcctgcttacgagctcctcatcactggcggaacctatgcatagttgacaactcaagcctgagctttttggtcttgttctgatttggaaggtgaattgagcaggtctgctgctgttggcctctggagttcatttagttaaagcacatgtacactggtgttggacagagcagcttggcttttcatgtgcccacctacttacctactacctgcgactttctttttccttgttctagctgactcttcatgcccctaagattttaagtacgatggtgaacgttctaatttcagaaccaattgcgagtcatgtagtgtggtagaattaaaggaggacacgagcctgcttctgttacctccaagtggtaacaggactgatgccgaaatgtcaccaggtcctttcagtcttcacagtggagaactcttggccaaaggtttttggggggaggaggaggaaaccagctttctggttaaggttaacaccagatggtgcccctcattggtgtccttttaaaaaatatttactgtagtccaataagatagcagctgtacaaaatgactaaaatagattgtaggatcatatggcgtatatcttggttcatcttcaaaatcagagactgagctttgaaactagtggtttttaatcaaagttggctttataggaggagtataatgtatgcactactgttttaaaagaattagtgtgagtgtgtttttgtatgaatgagcccattcatggtaagtcttaagcttgttggaaataatgtacccatgtagactagcaaaatagtatgtagatgtgatctcagttgtaaatagaaaaatctaattcaataaactctgtatcagcccccaa

SEQ ID NO: 71534 - DNA, 830 bp, Homo sapiens
  misc_feature (666)..(666): n is a, c, g, or t
  misc_feature (669)..(669): n is a, c, g, or t
  misc_feature (675)..(676): n is a, c, g, or t
gttctagatcgcgagcggccccccgactttctttttccttgttctagctgactcttcatgcccctaagattttaagtacgatggtgaacgttctaatttcagaaccaattgcgagtcatgtagtgtggtagaattaaaggaggacacgagcctgcttctgttacctccaagtggtaacaggactgatgccgaaatgtcaccaggtcctttcagtcttcacagtggagaactcttggccaaaggtttttggggggaggaggaggaaaccagctttctggttaaggttaacaccagatggtgcccctcattggtgtccttttaaaaaatatttactgtagtccaataagatagcagctgtacaaaatgactaaaatagattgtaggatcatatggcgtatatcttggttcatcttcaaaatcagagactgagctttgaaactagtggtttttaatcaaagttggctttataggaggagtataatgtatgcactactgttttaaaagaattagtgtgagtgtgtttttgtatgaatgagcccattcatggtaagtcttaagcttgttggaaataatgtacccatgtagactagcaaaatagtatgtagatgtgatctcagttgtaaatagaaaaatctaattcaataaactctgtatcagcccccaaanaanaagaanncgcaccgcaaagcaagggtggcggcaggcccagcgaaatagaaccacgtggggcggcgcccaaacgaacagaggcaagcgaaagaaacgggcggcgggggcacccaaaaagcggggggcggggaaaccagggtcgccgcggctcggggcgaaca

SEQ ID NO: 71535 - DNA, 312 bp, Homo sapiens
ggggtgactctagaggaccccggttgtagttgatcatatggcgtatatcttggttcatcttcaaaatcagagactgagctttgaaactagtggtttttaatcaaagttggctttataggaggagtataatgtatgcactactgttttaaaagaattagtgtgagtgtgtttttgtatgaatgagcccattcatggtaagtcttaagcttgttggaaataatgtacccatgtagactagcaaaatagtatgtagatgtgatctcagttgtaaatagaaaaatctaattcaataaactctgtatcagcccccaa

SEQ ID NO: 71536 - DNA, 896 bp, Homo sapiens
cgtttttttaaaatcaaataactgaggctttacctcatcaatgagaagttagaacagcaaattatctcacaaaaaaattatattttgggagaaggtaggtcaaaaattctagaatcattttctctttaatccagcttaatccttttgcttatccaaaataacatggcatgactttattactattccaatatgctaccacagaaggtttaggacttattgaaataaaatgatgacggaagagtgacctttcaaaagtaatatgtatgtaataccacagaaccgtggatttcaaaaaatagtgaatgtgaaggaaacaaagaaaccgttccaacctacattttttttggcatcagaatttgttttctaccatagggctattcacatactgaatttcgttttccaaaaaccaaaagacctgaaaagaccactattaaacacacacattcttgctcattctactccccaggcctttgctgtccagaatggtagccactagccacatgtgtctacatttaaattaatttaaataaaattaaaagtgcaactcagttgcagtaactatatttcaggtgctcagtagtcacatgaggccacatgacagtgcatatgtggtatgtctccatcgctgcagaaagttctttcggacagcactcgctagactagtagtggggatgccaaataagagagacttgattccctgctggctttacgaagagttcctgggagggaagctgaagcttaggacttagttccttaaaaaataatgtactcataagaaattccttctatcactgttgttactgcctttttgatgatttgaagtcattgaactttgagaccagcctgggcaataagactccatttctaccaaaaaaaaaattttttttaaaaaaaaa

SEQ ID NO: 71537 - DNA, 299 bp, Homo sapiens
cctagttttagaagtttcaatagcaaaggtggaaaatgaggttgatcgcagcattcagaaagtgtataagacctacaatggaaccaaccctgatgctgctagccgggctattgattatgtacagagacagctgcattgttgtggaattcacaactactcagactgggaaaatacagattggttcaaagaaaccaaaaaccagagtgtccctcttagctgctgcagagagactgccagcaattgtaatggcagcctggcccacccttccgacctctatgctgaggtgagtctcttggcca

SEQ ID NO: 71538 - DNA, 1872 bp, Homo sapiens
gttgccagggagcggcgcgggagccctgaggggactgcggcggctgcgcggaggagcgaggcgcttgctggggtcggggctgcgcgacggcgcaggggctgcggggagcgccgcgcaggccgtgcagttcctagcgaggaggcgccgccgccattgccgctctctcggtgagcgcagccccgctctccgggccgggccttcgcgggccaccggcgccatgggccagtgcggcatcacctcctccaagaccgtgctggtctttctcaacctcatcttctggggggcagctggcattttatgctatgtgggagcctatgtcttcatcacttatgatgactatgaccacttctttgaagatgtgtacacgctcatccctgctgtagtgatcatagctgtaggagccctgcttttcatcattgggctaattggctgctgtgccacaatccgggaaagtcgctgtggacttgccacgtttgtcatcatcctgctcttggtttttgtcacagaagttgttgtagtggttttgggatatgtttacagagcaaaggtggaaaatgaggttgatcgcagcattcagaaagtgtataagacctacaatggaaccaaccctgatgctgctagccgggctattgattatgtacagagacagctgcattgttgtggaattcacaactactcagactgggaaaatacagattggttcaaagaaaccaaaaaccagagtgtccctcttagctgctgcagagagactgccagcaattgtaatggcagcctggcccacccttccgacctctatgctgaggggtgtgaggctctagttgtgaagaagctacaagaaatcatgatgcatgtgatctgggccgcactggcatttgcagctattcagctgctgggcatgctgtgtgcttgcatcgtgttgtgcagaaggagtagagatcctgcttacgagctcctcatcactggcggaacctatgcatagttgacaactcaagcctgagctttttggtcttgttctgatttggaaggtgaattgagcaggtctgctgctgttggcctctggagttcatttagttaaagcacatgtacactggtgttggacagagcagcttggcttttcatgtgcccacctacttacctactacctgcgactttctttttccttgttctagctgactcttcatgcccctaagattttaagtacgatggtgaacgttctaatttcagaaccaattgcgagtcatgtagtgtggtagaattaaaggaggacacgagcctgcttctgttacctccaagtggtaacaggactgatgccgaaatgtcaccaggtcctttcagtcttcacagtggagaactcttggccaaaggtttttggggggaggaggaggaaaccagctttctggttaaggttaacaccagatggtgcccctcattggtgtccttttaaaaaatatttactgtagtccaataagatagcagctgtacaaaatgactaaaatagattgtaggatcatatggcgtatatcttggttcatcttcaaaatcagagactgagctttgaaactagtggtttttaatcaaagttggctttataggaggagtataatgtatgcactactgttttaaaagaattagtgtgagtgtgtttttgtatgaatgagcccattcatggtaagtcttaagcttgttggaaataatgtacccatgtagactagcaaaatagtatgtagatgtgatctcagttgtaaatagaaaaatctaattcaataaactctgtatcagcccccaacatattatttttcattatttgggggatatttcagttccagagcagcagtatcatgttttctttgttggtgctgtctatagttcatc

SEQ ID NO: 71539 - DNA, 1875 bp, Homo sapiens
  misc_feature (1801)..(1801): n is a, c, g, or t
  misc_feature (1804)..(1804): n is a, c, g, or t
gttgccagggagcggcgcgggagccctgaggggactgcggcggctgcgcggaggagcgaggcgcttgctggggtcggggctgcgcgacggcgcaggggctgcggggagcgccgcgcaggccgtgcagttcctagcgaggaggcgccgccgccattgccgctctctcggtgagcgcagccccgctctccgggccgggccttcgcgggccaccggcgccatgggccagtgcggcatcacctcctccaagaccgtgctggtctttctcaacctcatcttctggggggcagctggcattttatgctatgtgggagcctatgtcttcatcacttatgatgactatgaccacttctttgaagatgtgtacacgctcatccctgctgtagtgatcatagctgtaggagccctgcttttcatcattgggctaattggctgctgtgccacaatccgggaaagtcgctgtggacttgccacgtttgtcatcatcctgctcttggtttttgtcacagaagttgttgtagtggttttgggatatgtttacagagcaaaggtggaaaatgaggttgatcgcagcattcagaaagtgtataagacctacaatggaaccaaccctgatgctgctagccgggctattgattatgtacagagacagctgcattgttgtggaattcacaactactcagactgggaaaatacagattggttcaaagaaaccaaaaaccagagtgtccctcttagctgctgcagagagactgccagcaattgtaatggcagcctggcccacccttccgacctctatgctgaggggtgtgaggctctagttgtgaagaagctacaagaaatcatgatgcatgtgatctgggccgcactggcatttgcagctattcagctgctgggcatgctgtgtgcttgcatcgtgttgtgcagaaggagtagagatcctgcttacgagctcctcatcactggcggaacctatgcatagttgacaactcaagcctgagctttttggtcttgttctgatttggaaggtgaattgagcaggtctgctgctgttggcctctggagttcatttagttaaagcacatgtacactggtgttggacagagcagcttggcttttcatgtgcccacctacttacctactacctgcgactttctttttccttgttctagctgactcttcatgcccctaagattttaagtacgatggtgaacgttctaatttcagaaccaattgcgagtcatgtagtgtggtagaattaaaggaggacacgagcctgcttctgttacctccaagtggtaacaggactgatgccgaaatgtcaccaggtcctttcagtcttcacagtggagaactcttggccaaaggtttttggggggaggaggaggaaaccagctttctggttaaggttaacaccagatggtgcccctcattggtgtccttttaaaaaatatttactgtagtccaataagatagcagctgtacaaaatgactaaaatagattgtaggatcatatggcgtatatcttggttcatcttcaaaatcagagactgagctttgaaactagtggtttttaatcaaagttggctttataggaggagtataatgtatgcactactgttttaaaagaattagtgtgagtgtgtttttgtatgaatgagcccattcatggtaagtcttaagcttgttggaaataatgtacccatgtagactagcaaaatagtatgtagatgtgatctcagttgtaaatagaaaaatctaattcaataaactctgtatcagcccccaaaaaaaaacaaacacnaancccccactacacataaaccccactacacacaaaacgaggggcgcgccaaaaacatccccggcgccgccccc

SEQ ID NO: 71540 - DNA, 1821 bp, Homo sapiens
gttgccagggagcggcgcgggagccctgaggggactgcggcggctgcgcggaggagcgaggcgcttgctggggtcggggctgcgcgacggcgcaggggctgcggggagcgccgcgcaggccgtgcagttcctagcgaggaggcgccgccgccattgccgctctctcggtgagcgcagccccgctctccgggccgggccttcgcgggccaccggcgccatgggccagtgcggcatcacctcctccaagaccgtgctggtctttctcaacctcatcttctggggggcagctggcattttatgctatgtgggagcctatgtcttcatcacttatgatgactatgaccacttctttgaagatgtgtacacgctcatccctgctgtagtgatcatagctgtaggagccctgcttttcatcattgggctaattggctgctgtgccacaatccgggaaagtcgctgtggacttgccacgtttgtcatcatcctgctcttggtttttgtcacagaagttgttgtagtggttttgggatatgtttacagagcaaaggtggaaaatgaggttgatcgcagcattcagaaagtgtataagacctacaatggaaccaaccctgatgctgctagccgggctattgattatgtacagagacagctgcattgttgtggaattcacaactactcagactgggaaaatacagattggttcaaagaaaccaaaaaccagagtgtccctcttagctgctgcagagagactgccagcaattgtaatggcagcctggcccacccttccgacctctatgctgaggggtgtgaggctctagttgtgaagaagctacaagaaatcatgatgcatgtgatctgggccgcactggcatttgcagctattcagctgctgggcatgctgtgtgcttgcatcgtgttgtgcagaaggagtagagatcctgcttacgagctcctcatcactggcggaacctatgcatagttgacaactcaagcctgagctttttggtcttgttctgatttggaaggtgaattgagcaggtctgctgctgttggcctctggagttcatttagttaaagcacatgtacactggtgttggacagagcagcttggcttttcatgtgcccacctacttacctactacctgcgactttctttttccttgttctagctgactcttcatgcccctaagattttaagtacgatggtgaacgttctaatttcagaaccaattgcgagtcatgtagtgtggtagaattaaaggaggacacgagcctgcttctgttacctccaagtggtaacaggactgatgccgaaatgtcaccaggtcctttcagtcttcacagtggagaactcttggccaaaggtttttggggggaggaggaggaaaccagctttctggttaaggttaacaccagatggtgcccctcattggtgtccttttaaaaaatatttactgtagtccaataagatagcagctgtacaaaatgactaaaatagattgtaggatcatatggcgtatatcttggttcatcttcaaaatcagagactgagctttgaaactagtggtttttaatcaaagttggctttataggaggagtataatgtatgcactactgttttaaaagaattagtgtgagtgtgtttttgtatgaatgagcccattcatggtaagtcttaagcttgttggaaataatgtacccatgtagactagcaaaatagtatgtagatgtgatctcagttgtaaatagaaaaatctaattcaataaactctgtatcagcccccaaaaaaaaacacaagataataaaccattaaggaaaac

SEQ ID NO: 71541 - DNA, 1373 bp, Homo sapiens
gttgccagggagcggcgcgggagccctgaggggactgcggcggctgcgcggaggagcgaggcgcttgctggggtcggggctgcgcgacggcgcaggggctgcggggagcgccgcgcaggccgtgcagttcctagcgaggaggcgccgccgccattgccgctctctcggtgagcgcagccccgctctccgggccgggccttcgcgggccaccggcgccatgggccagtgcggcatcacctcctccaagaccgtgctggtctttctcaacctcatcttctggggggcagctggcattttatgctatgtgggagcctatgtcttcatcacttatgatgactatgaccacttctttgaagatgtgtacacgctcatccctgctgtagtgatcatagctgtaggagccctgcttttcatcattgggctaattggctgctgtgccacaatccgggaaagtcgctgtggacttgccacgtttgtcatcatcctgctcttggtttttgtcacagaagttgttgtagtggttttgggatatgtttacagagcaaaggtggaaaatgaggttgatcgcagcattcagaaagtgtataagacctacaatggaaccaaccctgatgctgctagccgggctattgattatgtacagagacagctgcattgttgtggaattcacaactactcagactgggaaaatacagattggttcaaagaaaccaaaaaccagagtgtccctcttagctgctgcagagagactgccagcaattgtaatggcagcctggcccacccttccgacctctatgctgaggggtgtgaggctctagttgtgaagaagctacaagaaatcatgatgcatgtgatctgggccgcactggcatttgcagctattcagctgctgggcatgctgtgtgcttgcatcgtgttgtgcagaaggagtagagatcctgcttacgagctcctcatcactggcggaacctatgcatagttgacaactcaagcctgagctttttggtcttgttctgatttggaaggtgaattgagcaggtctgctgctgttggcctctggagttcatttagttaaagcacatgtacactggtgttggacagagcagcttggcttttcatgtgcccacctacttacctactacctgcgactttctttttccttgttctagctgactcttcatgcccctaagattttaagtacgatggtgaacgttctaatttcagaaccaattgcggcatgagatgttggagggcgcgatgagatgttggaagggggcatgagatgttggaaggagggatgagatgttggaaggggagatgagatgttggaagggggcataagatgttggaaggaggcatgagatgttggaagg

SEQ ID NO: 71542 - DNA, 1329 bp, Homo sapiens
  misc_feature (1193)..(1193): n is a, c, g, or t
gttgccagggagcggcgcgggagccctgaggggactgcggcggctgcgcggaggagcgaggcgcttgctggggtcggggctgcgcgacggcgcaggggctgcggggagcgccgcgcaggccgtgcagttcctagcgaggaggcgccgccgccattgccgctctctcggtgagcgcagccccgctctccgggccgggccttcgcgggccaccggcgccatgggccagtgcggcatcacctcctccaagaccgtgctggtctttctcaacctcatcttctggggggcagctggcattttatgctatgtgggagcctatgtcttcatcacttatgatgactatgaccacttctttgaagatgtgtacacgctcatccctgctgtagtgatcatagctgtaggagccctgcttttcatcattgggctaattggctgctgtgccacaatccgggaaagtcgctgtggacttgccacgtttgtcatcatcctgctcttggtttttgtcacagaagttgttgtagtggttttgggatatgtttacagagcaaaggtggaaaatgaggttgatcgcagcattcagaaagtgtataagacctacaatggaaccaaccctgatgctgctagccgggctattgattatgtacagagacagctgcattgttgtggaattcacaactactcagactgggaaaatacagattggttcaaagaaaccaaaaaccagagtgtccctcttagctgctgcagagagactgccagcaattgtaatggcagcctggcccacccttccgacctctatgctgaggggtgtgaggctctagttgtgaagaagctacaagaaatcatgatgcatgtgatctgggccgcactggcatttgcagctattcagctgctgggcatgctgtgtgcttgcatcgtgttgtgcagaaggagtagagatcctgcttacgagctcctcatcactggcggaacctatgcatagttgacaactcaagcctgagctttttggtcttgttctgatttggaaggtgaattgagcaggtctgctgctgttggcctctggagttcatttagttaaagcacatgtacactggtgttggacagagcagcttggcttttcatgtgcccacctacttacctactacctgtaactgggaattctttcctgtctactgatcttctgcctaatttagtgnacgcgacggctcattccaacctggggtctgtggggggatagcggcacaccgttttccccgggtgggtgcgagaacccttctcccggactctcgttgggggagcactggtcaccccggtaatgcaccaattttttcc

SEQ ID NO: 71543 - DNA, 1095 bp, Homo sapiens
  misc_feature (1065)..(1066): n is a, c, g, or t
gttgccagggagcggcgcgggagccctgaggggactgcggcggctgcgcggaggagcgaggcgcttgctggggtcggggctgcgcgacggcgcaggggctgcggggagcgccgcgcaggccgtgcagttcctagcgaggaggcgccgccgccattgccgctctctcggtgagcgcagccccgctctccgggccgggccttcgcgggccaccggcgccatgggccagtgcggcatcacctcctccaagaccgtgctggtctttctcaacctcatcttctggggggcagctggcattttatgctatgtgggagcctatgtcttcatcacttatgatgactatgaccacttctttgaagatgtgtacacgctcatccctgctgtagtgatcatagctgtaggagccctgcttttcatcattgggctaattggctgctgtgccacaatccgggaaagtcgctgtggacttgccacgtttgtcatcatcctgctcttggtttttgtcacagaagttgttgtagtggttttgggatatgtttacagagcaaaggtggaaaatgaggttgatcgcagcattcagaaagtgtataagacctacaatggaaccaaccctgatgctgctagccgggctattgattatgtacagagacagctgcattgttgtggaattcacaactactcagactgggaaaatacagattggttcaaagaaaccaaaaaccagagtgtccctcttagctgctgcagagagactgccagcaattgtaatggcagcctggcccacccttccgacctctatgctgaggggtgtgaggctctagttgtgaagaagctacaagaaatcatgatgcatgtgatctgggccgcactggcatttgcagctattcagctgctgggcatgctgtgtgcttgcatcgtgttgtgcagaaggagtagagatcctgcttacgagctcctcatcactggcggaacctatgcatagttgacaactcaagcctgagctttttggtcttgttctgatttggaaggtgaattgagcaggtctgctgctgttggcctcaacttctnnactagggtccagctcgatctctatctgtt

SEQ ID NO: 71544 - DNA, 1683 bp, Homo sapiens
ccagtgctggtaccggctgggggttatggatatcgtcgacccacggcgctcggctgcgcggaggagcgaggcgcttgctggggtcggggctgcgcgacggcgcaggggctgcggggagcgccgcgcaggccgtgcagttcctagcgaggaggcgccgccgccattgccgctctctcgggggcagctggcattttatgctatgtgggagcctatgtcttcatcacttatgatgactatgaccacttctttgaagatgtgtacacgctcatccctgctgtagtgatcatagctgtaggagccctgcttttcatcattgggctaattggctgctgtgccacaatccgggaaagtcgctgtggacttgccacgtttgtcatcatcctgctcttggtttttgtcacagaagttgttgtagtggttttgggatatgtttacagagcaaaggtggaaaatgaggttgatcgcagcattcagaaagtgtataagacctacaatggaaccaaccctgatgctgctagccgggctattgattatgtacagagacagctgcattgttgtggaattcacaactactcagactgggaaaatacagattggttcaaagaaaccaaaaaccagagtgtccctcttagctgctgcagagagactgccagcaattgtaatggcagcctggcccacccttccgacctctatgctgaggggtgtgaggctctagttgtgaagaagctacaagaaatcatgatgcatgtgatctgggccgcactggcatttgcagctattcagctgctgggcatgctgtgtgcttgcatcgtgttgtgcagaaggagtagagatcctgcttacgagctcctcatcactggcggaacctatgcatagttgacaactcaagcctgagctttttggtcttgttctgatttggaaggtgaattgagcaggtctgctgctgttggcctctggagttcatttagttaaagcacatgtacactggtgttggacagagcagcttggcttttcatgtgcccacctacttacctactacctgcgactttctttttccttgttctagctgactcttcatgcccctaagattttaagtacgatggtgaacgttctaatttcagaaccaattgcgagtcatgtagtgtggtagaattaaaggaggacacgagcctgcttctgttacctccaagtggtaacaggactgatgccgaaatgtcaccaggtcctttcagtcttcacagtggagaactcttggccaaaggtttttggggggaggaggaggaaaccagctttctggttaaggttaacaccagatggtgcccctcattggtgtccttttaaaaaatatttactgtagtccaataagatagcagctgtacaaaatgactaaaatagattgtaggatcatatggcgtatatcttggttcatcttcaaaatcagagactgagctttgaaactagtggtttttaatcaaagttggctttataggaggagtataatgtatgcactactgttttaaaagaattagtgtgagtgtgtttttgtatgaatgagcccattcatggtaagtcttaagcttgttggaaataatgtacccatgtagactagcaaaatagtatgtagatgtgatctcagttgtaaatagaaaaatctaattcaataaactctgtatcagcccccaa

SEQ ID NO: 71545 - DNA, 1633 bp, Homo sapiens
gttgccagggagcggcgcgggagccctgaggggactgcggcggctgcgcggaggagcgaggcgcttgctggggtcggggctgcgcgacggcgcaggggctgcggggagcgccgcgcaggccgtgcagttcctagcgaggaggcgccgccgccattgccgctctctcggtgagcgcagccccgctctccgggccgggccttcgcgggccaccggcgccatgggccagtgcggcatcacctcctccaagaccgtgctggtctttctcaacctcatcttctggggggcagctggcattttatgctatgtgggagcctatgtcttcatcacttatgatgactatgaccacttctttgaagatgtgtacacgctcatccctgctgtagtgatcatagctgtaggagccctgcttttcatcattgggctaattggctgctgtgccacaatccgggaaagtcgctgtggacttgccacgtttgtcatcatcctgctcttggtttttgtcacagaagttgttgtagtggttttgggatatgtttacagagcaaaggtggaaaatgaggttgatcgcagcattcagaaagtgtataagacctacaatggaaccaaccctgatgctgctagccgggctattgattatgtacagagacaggggtgtgaggctctagttgtgaagaagctacaagaaatcatgatgcatgtgatctgggccgcactggcatttgcagctattcagctgctgggcatgctgtgtgcttgcatcgtgttgtgcagaaggagtagagatcctgcttacgagctcctcatcactggcggaacctatgcatagttgacaactcaagcctgagctttttggtcttgttctgatttggaaggtgaattgagcaggtctgctgctgttggcctctggagttcatttagttaaagcacatgtacactggtgttggacagagcagcttggcttttcatgtgcccacctacttacctactacctgcgactttctttttccttgttctagctgactcttcatgcccctaagattttaagtacgatggtgaacgttctaatttcagaaccaattgcgagtcatgtagtgtggtagaattaaaggaggacacgagcctgcttctgttacctccaagtggtaacaggactgatgccgaaatgtcaccaggtcctttcagtcttcacagtggagaactcttggccaaaggtttttggggggaggaggaggaaaccagctttctggttaaggttaacaccagatggtgcccctcattggtgtccttttaaaaaatatttactgtagtccaataagatagcagctgtacaaaatgactaaaatagattgtaggatcatatggcgtatatcttggttcatcttcaaaatcagagactgagctttgaaactagtggtttttaatcaaagttggctttataggaggagtataatgtatgcactactgttttaaaagaattagtgtgagtgtgtttttgtatgaatgagcccattcatggtaagtcttaagcttgttggaaataatgtacccatgtagactagcaaaatagtatgtagatgtgatctcagttgtaaatagaaaaatctaattcaataaactctgtatcagcccccaa

SEQ ID NO: 71546 - DNA, 1109 bp, Homo sapiens
ctatgtctggccaggcgcaatggctcacgcctgtaatcccagcactttgggaggccgaggcgggcggatcacgaggtcaggacatcgagaccatcctggcccacccttccgacctctatgctgaggggtgtgaggctctagttgtgaagaagctacaagaaatcatgatgcatgtgatctgggccgcactggcatttgcagctattcagctgctgggcatgctgtgtgcttgcatcgtgttgtgcagaaggagtagagatcctgcttacgagctcctcatcactggcggaacctatgcatagttgacaactcaagcctgagctttttggtcttgttctgatttggaaggtgaattgagcaggtctgctgctgttggcctctggagttcatttagttaaagcacatgtacactggtgttggacagagcagcttggcttttcatgtgcccacctacttacctactacctgcgactttctttttccttgttctagctgactcttcatgcccctaagattttaagtacgatggtgaacgttctaatttcagaaccaattgcgagtcatgtagtgtggtagaattaaaggaggacacgagcctgcttctgttacctccaagtggtaacaggactgatgccgaaatgtcaccaggtcctttcagtcttcacagtggagaactcttggccaaaggtttttggggggaggaggaggaaaccagctttctggttaaggttaacaccagatggtgcccctcattggtgtccttttaaaaaatatttactgtagtccaataagatagcagctgtacaaaatgactaaaatagattgtaggatcatatggcgtatatcttggttcatcttcaaaatcagagactgagctttgaaactagtggtttttaatcaaagttggctttataggaggagtataatgtatgcactactgttttaaaagaattagtgtgagtgtgtttttgtatgaatgagcccattcatggtaagtcttaagcttgttggaaataatgtacccatgtagactagcaaaatagtatgtagatgtgatctcagttgtaaatagaaaaatctaattcaataaactctgtatcagcccccaa

SEQ ID NO: 71547 - DNA, 933 bp, Homo sapiens
caaacaccgcaatctattttagtcattttgtacctgctgggcatgctgtgtgcttgcatcgtgttgtgcagaaggagtagagatcctgcttacgagctcctcatcactggcggaacctatgcatagttgacaactcaagcctgagctttttggtcttgttctgatttggaaggtgaattgagcaggtctgctgctgttggcctctggagttcatttagttaaagcacatgtacactggtgttggacagagcagcttggcttttcatgtgcccacctacttacctactacctgcgactttctttttccttgttctagctgactcttcatgcccctaagattttaagtacgatggtgaacgttctaatttcagaaccaattgcgagtcatgtagtgtggtagaattaaaggaggacacgagcctgcttctgttacctccaagtggtaacaggactgatgccgaaatgtcaccaggtcctttcagtcttcacagtggagaactcttggccaaaggtttttggggggaggaggaggaaaccagctttctggttaaggttaacaccagatggtgcccctcattggtgtccttttaaaaaatatttactgtagtccaataagatagcagctgtacaaaatgactaaaatagattgtaggatcatatggcgtatatcttggttcatcttcaaaatcagagactgagctttgaaactagtggtttttaatcaaagttggctttataggaggagtataatgtatgcactactgttttaaaagaattagtgtgagtgtgtttttgtatgaatgagcccattcatggtaagtcttaagcttgttggaaataatgtacccatgtagactagcaaaatagtatgtagatgtgatctcagttgtaaatagaaaaatctaattcaataaactctgtatcagcccccaa

SEQ ID NO: 71548 - DNA, 912 bp, Homo sapiens
gagggacctccaacatctcatggcgtagatagaagtagaggttaaggagggtgatggggctatgagatgttccttccaacatctcatggcggaacctatgcatagttgacaactcaagcctgagctttttggtcttgttctgatttggaaggtgaattgagcaggtctgctgctgttggcctctggagttcatttagttaaagcacatgtacactggtgttggacagagcagcttggcttttcatgtgcccacctacttacctactacctgcgactttctttttccttgttctagctgactcttcatgcccctaagattttaagtacgatggtgaacgttctaatttcagaaccaattgcgagtcatgtagtgtggtagaattaaaggaggacacgagcctgcttctgttacctccaagtggtaacaggactgatgccgaaatgtcaccaggtcctttcagtcttcacagtggagaactcttggccaaaggtttttggggggaggaggaggaaaccagctttctggttaaggttaacaccagatggtgcccctcattggtgtccttttaaaaaatatttactgtagtccaataagatagcagctgtacaaaatgactaaaatagattgtaggatcatatggcgtatatcttggttcatcttcaaaatcagagactgagctttgaaactagtggtttttaatcaaagttggctttataggaggagtataatgtatgcactactgttttaaaagaattagtgtgagtgtgtttttgtatgaatgagcccattcatggtaagtcttaagcttgttggaaataatgtacccatgtagactagcaaaatagtatgtagatgtgatctcagttgtaaatagaaaaatctaattcaataaactctgtatcagcccccaa

SEQ ID NO: 71549 - DNA, 679 bp, Homo sapiens
  misc_feature (653)..(653): n is a, c, g, or t
  misc_feature (675)..(675): n is a, c, g, or t
  misc_feature (677)..(678): n is a, c, g, or t
gttgccagggagcggcgcgggagccctgaggggactgcggcggctgcgcggaggagcgaggcgcttgctggggtcggggctgcgcgacggcgcaggggctgcggggagcgccgcgcaggccgtgcagttcctagcgaggaggcgccgccgccattgccgctctctcggtgagcgcagccccgctctccgggccgggccttcgcgggccaccggcgccatgggccagtgcggcatcacctcctccaagaccgtgctggtctttctcaacctcatcttctggggggcagctggcattttatgctatgtgggagcctatgtcttcatcacttatgatgactatgaccacttctttgaagatgtgtacacgctcatccctgctgtagtgatcatagctgtaggagccctgcttttcatcattgggctaattggctgctgtgccacaatccgggaaagtcgctgtggacttgccacgtttgtcatcatcctgctcttggtttttgtcacagaagttgttgtagtggttttgggatatgtttacagagcaaaggtggaaaatgaggttgatcgcagcattcagaaagtgtataagacctacaatggaaccaaccctgatgctgctagccgggctattgattatgtacagagacagcttnaatgggtatgaacacccacgananng

SEQ ID NO: 71550 - DNA, 588 bp, Homo sapiens
ccagtgctggtaccggctgggggttatggatatcgtcgacccacggcgctcggctgcgcggaggagcgaggcgcttgctggggtcggggctgcgcgacggcgcaggggctgcggggagcgccgcgcaggccgtgcagttcctagcgaggaggcgccgccgccattgccgctctctcggtgagcgcagccccgctctccgggccgggccttcgcgggccaccggcgccatgggccagtgcggcatcacctcctccaagaccgtgctggtctttctcaacctcatcttctggggggcagctggcattttatgctatgtgggagcctatgtcttcatcacttatgatgactatgaccacttctttgaagatgtgtacacgctcatccctgctgtagtgatcatagctgtaggagccctgcttttcatcattgggctaattggctgctgtgccacaatccgggaaagtcgctgtggacttgccacggtaagatgtgttgtgagaacatgcaggagtatttagtctatgctactctccttgaacatgagactccttggctcttatagttggaacagagttaacatttaaactt

SEQ ID NO: 71551 - DNA, 482 bp, Homo sapiens
ccagtgctggtaccggctgggggttatggatatcgtcgacccacggcgctcggctgcgcggaggagcgaggcgcttgctggggtcggggctgcgcgacggcgcaggggctgcggggagcgccgcgcaggccgtgcagttcctagcgaggaggcgccgccgccattgccgctctctcggtgagcgcagccccgctctccgggccgggccttcgcgggccaccggcgccatgggccagtgcggcatcacctcctccaagaccgtgctggtctttctcaacctcatcttctggcccatctggactttgcacccggataaatcttttaaaacgtttcctctatcacatcacttgatctgaaaataaggaaaacagaagcttcagcggtagaataaggttcaactccttcccctggtcttggagcagaagtcctcagtctggtcccaaatcaccttgcctctctgaacttgtcatttccttaaacac

SEQ ID NO: 71552 - DNA, 686 bp, Homo sapiens
tgggagggaagctgaagcttaggacttagttccttaaaaaataatgtactcataagaaattccttctatcactgttgttactgcctttttgatgatttgaagtcattgaactttgaaacagctcttttaccaacaaagaaatacacacctgccatgagagggttttcagccttttttccccattgttgttttctttcaacagctgctgggcatgctgtgtgcttgcatcgtgttgtgcagaaggagtagagatcctgcttacgagctcctcatcactggcggaacctatgcatagttgacaactcaagcctgagctttttggtcttgttctgatttggaaggtgaattgagcaggtctgctgctgttggcctctggagttcatttagttaaagcacatgtacactggtgttggacagagcagcttggcttttcatgtgcccacctacttacctactacctgcgactttctttttccttgttctagctgactcttcatgcccctaagattttaagtacgatggtgaacgttctaatttcagaaccaattgcgagtcatgtagtgtggtagaattaaaggaggacacgagcctgcttctgttacctccaagtggtaacaggactgatgccgaaatgtcaccaggtcctttcagtcttcacagtggagaactcttggccaaaggttttt

SEQ ID NO: 71553 - DNA, 1786 bp, Homo sapiens
gttgccagggagcggcgcgggagccctgaggggactgcggcggctgcgcggaggagcgaggcgcttgctggggtcggggctgcgcgacggcgcaggggctgcggggagcgccgcgcaggccgtgcagttcctagcgaggaggcgccgccgccattgccgctctctcggtgagcgcagccccgctctccgggccgggccttcgcgggccaccggcgccatgggccagtgcggcatcacctcctccaagaccgtgctggtctttctcaacctcatcttctggggggcagctggcattttatgctatgtgggagcctatgtcttcatcacttatgatgactatgaccacttctttgaagatgtgtacacgctcatccctgctgtagtgatcatagctgtaggagccctgcttttcatcattgggctaattggctgctgtgccacaatccgggaaagtcgctgtggacttgccacgtttgtcatcatcctgctcttggtttttgtcacagaagttgttgtagtggttttgggatatgtttacagagcaaaggtggaaaatgaggttgatcgcagcattcagaaagtgtataagacctacaatggaaccaaccctgatgctgctagccgggctattgattatgtacagagacagctgcattgttgtggaattcacaactactcagactgggaaaatacagattggttcaaagaaaccaaaaaccagagtgtccctcttagctgctgcagagagactgccagcaattgtaatggcagcctggcccacccttccgacctctatgctgaggggtgtgaggctctagttgtgaagaagctacaagaaatcatgatgcatgtgatctgggccgcactggcatttgcagctattcagctgctgggcatgctgtgtgcttgcatcgtgttgtgcagaaggagtagagatcctgcttacgagctcctcatcactggcggaacctatgcatagttgacaactcaagcctgagctttttggtcttgttctgatttggaaggtgaattgagcaggtctgctgctgttggcctctggagttcatttagttaaagcacatgtacactggtgttggacagagcagcttggcttttcatgtgcccacctacttacctactacctgcgactttctttttccttgttctagctgactcttcatgcccctaagattttaagtacgatggtgaacgttctaatttcagaaccaattgcgagtcatgtagtgtggtagaattaaaggaggacacgagcctgcttctgttacctccaagtggtaacaggactgatgccgaaatgtcaccaggtcctttcagtcttcacagtggagaactcttggccaaaggtttttggggggaggaggaggaaaccagctttctggttaaggttaacaccagatggtgcccctcattggtgtccttttaaaaaatatttactgtagtccaataagatagcagctgtacaaaatgactaaaatagattgtaggatcatatggcgtatatcttggttcatcttcaaaatcagagactgagctttgaaactagtggtttttaatcaaagttggctttataggaggagtataatgtatgcactactgttttaaaagaattagtgtgagtgtgtttttgtatgaatgagcccattcatggtaagtcttaagcttgttggaaataatgtacccatgtagactagcaaaatagtatgtagatgtgatctcagttgtaaatagaaaaatctaattcaataaactctgtatcagcccccaa

SEQ ID NO: 71554 - DNA, 1796 bp, Homo sapiens
ccagtgctggtaccggctgggggttatggatatcgtcgacccacggcgctcggctgcgcggaggagcgaggcgcttgctggggtcggggctgcgcgacggcgcaggggctgcggggagcgccgcgcaggccgtgcagttcctagcgaggaggcgccgccgccattgccgctctctcggtgagcgcagccccgctctccgggccgggccttcgcgggccaccggcgccatgggccagtgcggcatcacctcctccaagaccgtgctggtctttctcaacctcatcttctggggggcagctggcattttatgctatgtgggagcctatgtcttcatcacttatgatgactatgaccacttctttgaagatgtgtacacgctcatccctgctgtagtgatcatagctgtaggagccctgcttttcatcattgggctaattggctgctgtgccacaatccgggaaagtcgctgtggacttgccacgtttgtcatcatcctgctcttggtttttgtcacagaagttgttgtagtggttttgggatatgtttacagagcaaaggtggaaaatgaggttgatcgcagcattcagaaagtgtataagacctacaatggaaccaaccctgatgctgctagccgggctattgattatgtacagagacagctgcattgttgtggaattcacaactactcagactgggaaaatacagattggttcaaagaaaccaaaaaccagagtgtccctcttagctgctgcagagagactgccagcaattgtaatggcagcctggcccacccttccgacctctatgctgaggggtgtgaggctctagttgtgaagaagctacaagaaatcatgatgcatgtgatctgggccgcactggcatttgcagctattcagctgctgggcatgctgtgtgcttgcatcgtgttgtgcagaaggagtagagatcctgcttacgagctcctcatcactggcggaacctatgcatagttgacaactcaagcctgagctttttggtcttgttctgatttggaaggtgaattgagcaggtctgctgctgttggcctctggagttcatttagttaaagcacatgtacactggtgttggacagagcagcttggcttttcatgtgcccacctacttacctactacctgcgactttctttttccttgttctagctgactcttcatgcccctaagattttaagtacgatggtgaacgttctaatttcagaaccaattgcgagtcatgtagtgtggtagaattaaaggaggacacgagcctgcttctgttacctccaagtggtaacaggactgatgccgaaatgtcaccaggtcctttcagtcttcacagtggagaactcttggccaaaggtttttggggggaggaggaggaaaccagctttctggttaaggttaacaccagatggtgcccctcattggtgtccttttaaaaaatatttactgtagtccaataagatagcagctgtacaaaatgactaaaatagattgtaggatcatatggcgtatatcttggttcatcttcaaaatcagagactgagctttgaaactagtggtttttaatcaaagttggctttataggaggagtataatgtatgcactactgttttaaaagaattagtgtgagtgtgtttttgtatgaatgagcccattcatggtaagtcttaagcttgttggaaataatgtacccatgtagactagcaaaatagtatgtagatgtgatctcagttgtaaatagaaaaatctaattcaataaactctgtatcagcccccaa

SEQ ID NO: 71555 - DNA, 2043 bp, Homo sapiens
gttgccagggagcggcgcgggagccctgaggggactgcggcggctgcgcggaggagcgaggcgcttgctggggtcggggctgcgcgacggcgcaggggctgcggggagcgccgcgcaggccgtgcagttcctagcgaggaggcgccgccgccattgccgctctctcggtgagcgcagccccgctctccgggccgggccttcgcgggccaccggcgccatgggccagtgcggcatcacctcctccaagaccgtgctggtctttctcaacctcatcttctggggggcagctggcattttatgctatgtgggagcctatgtcttcatcacttatgatgactatgaccacttctttgaagatgtgtacacgctcatccctgctgtagtgatcatagctgtaggagccctgcttttcatcattgggctaattggctgctgtgccacaatccgggaaagtcgctgtggacttgccacgtttgtcatcatcctgctcttggtttttgtcacagaagttgttgtagtggttttgggatatgtttacagagcaaaggtggaaaatgaggttgatcgcagcattcagaaagtgtataagacctacaatggaaccaaccctgatgctgctagccgggctattgattatgtacagagacagctgcattgttgtggaattcacaactactcagactgggaaaatacagattggttcaaagaaaccaaaaaccagagtgtccctcttagctgctgcagagagactgccagcaattgtaatggcagcctggcccacccttccgacctctatgctgaggggtgtgaggctctagttgtgaagaagctacaagaaatcatgatgcatgtgatctgggccgcactggcatttgcagctattcagctgctgggcatgctgtgtgcttgcatcgtgttgtgcagaaggagtagagatcctgcttacgagctcctcatcactggcggaacctatgcatagttgacaactcaagcctgagctttttggtcttgttctgatttggaaggtgaattgagcaggtctgctgctgttggcctctggagttcatttagttaaagcacatgtacactggtgttggacagagcagcttggcttttcatgtgcccacctacttacctactacctgcgactttctttttccttgttctagctgactcttcatgcccctaagattttaagtacgatggtgaacgttctaatttcagaaccaattgcgagtcatgtagtgtggtagaattaaaggaggacacgagcctgcttctgttacctccaagtggtaacaggactgatgccgaaatgtcaccaggtcctttcagtcttcacagtggagaactcttggccaaaggtttttggggggaggaggaggaaaccagctttctggttaaggttaacaccagatggtgcccctcattggtgtccttttaaaaaatatttactgtagtccaataagatagcagctgtacaaaatgactaaaatagattgtaggatcatatggcgtatatcttggttcatcttcaaaatcagagactgagctttgaaactagtggtttttaatcaaagttggctttataggaggagtataatgtatgcactactgttttaaaagaattagtgtgagtgtgtttttgtatgaatgagcccattcatggtaagtcttaagcttgttggaaataatgtacccatgtagactagcaaaatagtatgtagatgtgatctcagttgtaaatagaaaaatctaattcaataaactctgtatcagcccccaaaaaaaaaaatatccctccctccatttcatcttattccactgggtgaaatcccacccgaaaaacaatgaatttttaaattttctagttcgccctttctctcctatattccacttcctccatattctttgtgcccgtctgggcccatttaatttatttttggccacgttttttcctgggccgcatttgtgtttttttggccatatttccttatgggggtcctaaacaagtattggcccgggtttaaacaggggggaggt

SEQ ID NO: 71556 - DNA, 1952 bp, Homo sapiens
  misc_feature (1788)..(1788): n is a, c, g, or t
  misc_feature (1791)..(1791): n is a, c, g, or t
  misc_feature (1797)..(1798): n is a, c, g, or t
gttgccagggagcggcgcgggagccctgaggggactgcggcggctgcgcggaggagcgaggcgcttgctggggtcggggctgcgcgacggcgcaggggctgcggggagcgccgcgcaggccgtgcagttcctagcgaggaggcgccgccgccattgccgctctctcggtgagcgcagccccgctctccgggccgggccttcgcgggccaccggcgccatgggccagtgcggcatcacctcctccaagaccgtgctggtctttctcaacctcatcttctggggggcagctggcattttatgctatgtgggagcctatgtcttcatcacttatgatgactatgaccacttctttgaagatgtgtacacgctcatccctgctgtagtgatcatagctgtaggagccctgcttttcatcattgggctaattggctgctgtgccacaatccgggaaagtcgctgtggacttgccacgtttgtcatcatcctgctcttggtttttgtcacagaagttgttgtagtggttttgggatatgtttacagagcaaaggtggaaaatgaggttgatcgcagcattcagaaagtgtataagacctacaatggaaccaaccctgatgctgctagccgggctattgattatgtacagagacagctgcattgttgtggaattcacaactactcagactgggaaaatacagattggttcaaagaaaccaaaaaccagagtgtccctcttagctgctgcagagagactgccagcaattgtaatggcagcctggcccacccttccgacctctatgctgaggggtgtgaggctctagttgtgaagaagctacaagaaatcatgatgcatgtgatctgggccgcactggcatttgcagctattcagctgctgggcatgctgtgtgcttgcatcgtgttgtgcagaaggagtagagatcctgcttacgagctcctcatcactggcggaacctatgcatagttgacaactcaagcctgagctttttggtcttgttctgatttggaaggtgaattgagcaggtctgctgctgttggcctctggagttcatttagttaaagcacatgtacactggtgttggacagagcagcttggcttttcatgtgcccacctacttacctactacctgcgactttctttttccttgttctagctgactcttcatgcccctaagattttaagtacgatggtgaacgttctaatttcagaaccaattgcgagtcatgtagtgtggtagaattaaaggaggacacgagcctgcttctgttacctccaagtggtaacaggactgatgccgaaatgtcaccaggtcctttcagtcttcacagtggagaactcttggccaaaggtttttggggggaggaggaggaaaccagctttctggttaaggttaacaccagatggtgcccctcattggtgtccttttaaaaaatatttactgtagtccaataagatagcagctgtacaaaatgactaaaatagattgtaggatcatatggcgtatatcttggttcatcttcaaaatcagagactgagctttgaaactagtggtttttaatcaaagttggctttataggaggagtataatgtatgcactactgttttaaaagaattagtgtgagtgtgtttttgtatgaatgagcccattcatggtaagtcttaagcttgttggaaataatgtacccatgtagactagcaaaatagtatgtagatgtgatctcagttgtaaatagaaaaatctaattcaataaactctgtatcagcccccaaanaanaagaanncgcaccgcaaagcaagggtggcggcaggcccagcgaaatagaaccacgtggggcggcgcccaaacgaacagaggcaagcgaaagaaacgggcggcgggggcacccaaaaagcggggggcggggaaaccagggtcgccgcggctcggggcgaaca

SEQ ID NO: 71557 - DNA, 2332 bp, Homo sapiens
gttgccagggagcggcgcgggagccctgaggggactgcggcggctgcgcggaggagcgaggcgcttgctggggtcggggctgcgcgacggcgcaggggctgcggggagcgccgcgcaggccgtgcagttcctagcgaggaggcgccgccgccattgccgctctctcggtgagcgcagccccgctctccgggccgggccttcgcgggccaccggcgccatgggccagtgcggcatcacctcctccaagaccgtgctggtctttctcaacctcatcttctggggggcagctggcattttatgctatgtgggagcctatgtcttcatcacttatgatgactatgaccacttctttgaagatgtgtacacgctcatccctgctgtagtgatcatagctgtaggagccctgcttttcatcattgggctaattggctgctgtgccacaatccgggaaagtcgctgtggacttgccacgtttgtcatcatcctgctcttggtttttgtcacagaagttgttgtagtggttttgggatatgtttacagagcaaaggtggaaaatgaggttgatcgcagcattcagaaagtgtataagacctacaatggaaccaaccctgatgctgctagccgggctattgattatgtacagagacagctgcattgttgtggaattcacaactactcagactgggaaaatacagattggttcaaagaaaccaaaaaccagagtgtccctcttagctgctgcagagagactgccagcaattgtaatggcagcctggcccacccttccgacctctatgctgaggggtgtgaggctctagttgtgaagaagctacaagaaatcatgatgcatgtgatctgggccgcactggcatttgcagctattcagctgctgggcatgctgtgtgcttgcatcgtgttgtgcagaaggagtagagatcctgcttacgagctcctcatcactggcggaacctatgcatagttgacaactcaagcctgagctttttggtcttgttctgatttggaaggtgaattgagcaggtctgctgctgttggcctctggagttcatttagttaaagcacatgtacactggtgttggacagagcagcttggcttttcatgtgcccacctacttacctactacctgcgactttctttttccttgttctagctgactcttcatgcccctaagattttaagtacgatggtgaacgttctaatttcagaaccaattgcgagtcatgtagtgtggtagaattaaaggaggacacgagcctgcttctgttacctccaagtggtaacaggactgatgccgaaatgtcaccaggtcctttcagtcttcacagtggagaactcttggccaaaggtttttggggggaggaggaggaaaccagctttctggttaaggttaacaccagatggtgcccctcattggtgtccttttaaaaaatatttactgtagtccaataagatagcagctgtacaaaatgactaaaatagattgtaggatcatatggcgtatatcttggttcatcttcaaaatcagagactgagctttgaaactagtggtttttaatcaaagttggctttataggaggagtataatgtatgcactactgttttaaaagaattagtgtgagtgtgtttttgtatgaatgagcccattcatggtaagtcttaagcttgttggaaataatgtacccatgtagactagcaaaatagtatgtagatgtgatctcagttgtaaatagaaaaatctaattcaataaactctgtatcagcccccaaaaaaaaaaaaaaaaaaaaaaaaaaaaaaaaaaaaaaaaaaaaaaaaaaaaaaaaaaaaaaaaaaaaaaaaaaaaaaaaaaaaaaaaaaaaaaaaaaagggggggggggtgcatataaaatttattctcccccttcaggcgagcaccacattatgtatcaccgccacacctcactttttgatgtgaagaaggaggggtcctcctaccttgttggtgtggacttcttaatataaaagacagaggaggcgagcggggcgcgtccttttaaaaacaagtccgatgcgggacggagaaaaagcgttgttgcgtgtctggtgctttctttgtcggcagaggcacacaccactcattctctgccggggggtggcgcatacttttgaggggaaacacccaccactggagatgatgattatcaccgtcggggggctacaaaaaacaagaggacagacgtgtcatggtgctgaaccaccaccgtcattcttgttgtccgcggagtaagatacatgttgctcacagagacgtattcattacgaacacaaatagcggt

SEQ ID NO: 71558 - DNA, 1750 bp, Homo sapiens
gttgccagggagcggcgcgggagccctgaggggactgcggcggctgcgcggaggagcgaggcgcttgctggggtcggggctgcgcgacggcgcaggggctgcggggagcgccgcgcaggccgtgcagttcctagcgaggaggcgccgccgccattgccgctctctcggtgagcgcagccccgctctccgggccgggccttcgcgggccaccggcgccatgggccagtgcggcatcacctcctccaagaccgtgctggtctttctcaacctcatcttctggggggcagctggcattttatgctatgtgggagcctatgtcttcatcacttatgatgactatgaccacttctttgaagatgtgtacacgctcatccctgctgtagtgatcatagctgtaggagccctgcttttcatcattgggctaattggctgctgtgccacaatccgggaaagtcgctgtggacttgccacgtttgtcatcatcctgctcttggtttttgtcacagaagttgttgtagtggttttgggatatgtttacagagcaaaggtggaaaatgaggttgatcgcagcattcagaaagtgtataagacctacaatggaaccaaccctgatgctgctagccgggctattgattatgtacagagacagctgcattgttgtggaattcacaactactcagactgggaaaatacagattggttcaaagaaaccaaaaaccagagtgtccctcttagctgctgcagagagactgccagcaattgtaatggcagcctggcccacccttccgacctctatgctgaggggtgtgaggctctagttgtgaagaagctacaagaaatcatgatgcatctgctgggcatgctgtgtgcttgcatcgtgttgtgcagaaggagtagagatcctgcttacgagctcctcatcactggcggaacctatgcatagttgacaactcaagcctgagctttttggtcttgttctgatttggaaggtgaattgagcaggtctgctgctgttggcctctggagttcatttagttaaagcacatgtacactggtgttggacagagcagcttggcttttcatgtgcccacctacttacctactacctgcgactttctttttccttgttctagctgactcttcatgcccctaagattttaagtacgatggtgaacgttctaatttcagaaccaattgcgagtcatgtagtgtggtagaattaaaggaggacacgagcctgcttctgttacctccaagtggtaacaggactgatgccgaaatgtcaccaggtcctttcagtcttcacagtggagaactcttggccaaaggtttttggggggaggaggaggaaaccagctttctggttaaggttaacaccagatggtgcccctcattggtgtccttttaaaaaatatttactgtagtccaataagatagcagctgtacaaaatgactaaaatagattgtaggatcatatggcgtatatcttggttcatcttcaaaatcagagactgagctttgaaactagtggtttttaatcaaagttggctttataggaggagtataatgtatgcactactgttttaaaagaattagtgtgagtgtgtttttgtatgaatgagcccattcatggtaagtcttaagcttgttggaaataatgtacccatgtagactagcaaaatagtatgtagatgtgatctcagttgtaaatagaaaaatctaattcaataaactctgtatcagcccccaa

SEQ ID NO: 71559 - DNA, 1169 bp, Homo sapiens
gttgccagggagcggcgcgggagccctgaggggactgcggcggctgcgcggaggagcgaggcgcttgctggggtcggggctgcgcgacggcgcaggggctgcggggagcgccgcgcaggccgtgcagttcctagcgaggaggcgccgccgccattgccgctctctcggtgagcgcagccccgctctccgggccgggccttcgcgggccaccggcgccatgggccagtgcggcatcacctcctccaagaccgtgctggtctttctcaacctcatcttctggggggcagctggcattttatgctatgtgggagcctatgtcttcatcacttatgatgactatgaccacttctttgaagatgtgtacacgctcatccctgctgtagtgatcatagctgtaggagccctgcttttcatcattgggctaattggctgctgtgccacaatccgggaaagtcgctgtggacttgccacgtttgtcatcatcctgctcttggtttttgtcacagaagttgttgtagtggttttgggatatgtttacagagcaaaggtggaaaatgaggttgatcgcagcattcagaaagtgtataagacctacaatggaaccaaccctgatgctgctagccgggctattgattatgtacagagacagctgcattgttgtggaattcacaactactcagactgggaaaatacagattggttcaaagaaaccaaaaaccagagtgtccctcttagctgctgcagagagactgccagcaattgtaatggcagcctggcccacccttccgacctctatgctgaggggtgtgaggctctagttgtgaagaagctacaagaaatcatgatgcatgtgatctgggccgcactggcatttgcagctattcagctgctgggcatgctgtgtgcttgcatcgtgttgtgcagaaggagtagagatcctgcttacgagctcctcatcactggcggaacctatgcatagttgacaactcaagcctgagctttttggtcttgttctgatttggaaggtgaattgagcaggtctgctgctgttggcctctggagttcatttagttaaagcacatgtacactggtgttggacagagcagcttggcttttcatgtgcccacctacttacctactacctgacctatgagggatcctctagacag

SEQ ID NO: 71560 - DNA, 1638 bp, Homo sapiens
gttgccagggagcggcgcgggagccctgaggggactgcggcggctgcgcggaggagcgaggcgcttgctggggtcggggctgcgcgacggcgcaggggctgcggggagcgccgcgcaggccgtgcagttcctagcgaggaggcgccgccgccattgccgctctctcggtgagcgcagccccgctctccgggccgggccttcgcgggccaccggcgccatgggccagtgcggcatcacctcctccaagaccgtgctggtctttctcaacctcatcttctggggggcagctggcattttatgctatgtgggagcctatgtcttcatcacttatgatgactatgaccacttctttgaagatgtgtacacgctcatccctgctgtagtgatcatagctgtaggagccctgcttttcatcattgggctaattggctgctgtgccacaatccgggaaagtcgctgtggacttgccacgtttgtcatcatcctgctcttggtttttgtcacagaagttgttgtagtggttttgggatatgtttacagagcaaaggtggaaaatgaggttgatcgcagcattcagaaagtgtataagacctacaatggaaccaaccctgatgctgctagccgggctattgattatgtacagagacagctgcattgttgtggaattcacaactactcagactgggaaaatacagattggttcaaagaaaccaaaaaccagagtgtccctcttagctgctgcagagagactgccagcaattgtaatggcagcctggcccacccttccgacctctatgctgaggggtgtgaggctctagttgtgaagaagctacaagaaatcatgatgcatgtgatctgggccgcactggcatttgcagctattcagctgctgggcatgctgtgtgcttgcatcgtgttgtgcagaaggagtagagatcctgcttacgagctcctcatcactggcggaacctatgcatagttgacaactcaagcctgagctttttggtcttgttctgatttggaaggtgaattgagcaggtctgctgctgttggcctctggagttcatttagttaaagcacatgtacactggtaaaaaaaaaaaaaaaaaaaaaaaaaaaaaaaaaaaaaaaaaaaaaaaaaaaaaaaaaaaaaaaaaaaaaaaaaaaaaaaaaaaaaaaaaaaaaaaaagggggggggggtgcatataaaatttattctcccccttcaggcgagcaccacattatgtatcaccgccacacctcactttttgatgtgaagaaggaggggtcctcctaccttgttggtgtggacttcttaatataaaagacagaggaggcgagcggggcgcgtccttttaaaaacaagtccgatgcgggacggagaaaaagcgttgttgcgtgtctggtgctttctttgtcggcagaggcacacaccactcattctctgccggggggtggcgcatacttttgaggggaaacacccaccactggagatgatgattatcaccgtcggggggctacaaaaaacaagaggacagacgtgtcatggtgctgaaccaccaccgtcattcttgttgtccgcggagtaagatacatgttgctcacagagacgtattcattacgaacacaaatagcggt

SEQ ID NO: 71561 - DNA, 1233 bp, Homo sapiens
gttgccagggagcggcgcgggagccctgaggggactgcggcggctgcgcggaggagcgaggcgcttgctggggtcggggctgcgcgacggcgcaggggctgcggggagcgccgcgcaggccgtgcagttcctagcgaggaggcgccgccgccattgccgctctctcggtgagcgcagccccgctctccgggccgggccttcgcgggccaccggcgccatgggccagtgcggcatcacctcctccaagaccgtgctggtctttctcaacctcatcttctggggggcagctggcattttatgctatgtgggagcctatgtcttcatcacttatgatgactatgaccacttctttgaagatgtgtacacgctcatccctgctgtagtgatcatagctgtaggagccctgcttttcatcattgggctaattggctgctgtgccacaatccgggaaagtcgctgtggacttgccacgtttgtcatcatcctgctcttggtttttgtcacagaagttgttgtagtggttttgggatatgtttacagagcaaaggtggaaaatgaggttgatcgcagcattcagaaagtgtataagacctacaatggaaccaaccctgatgctgctagccgggctattgattatgtacagagacagctgcattgttgtggaattcacaactactcagactgggaaaatacagattggttcaaagaaaccaaaaaccagagtgtccctcttagctgctgcagagagactgccagcaattgtaatggcagcctggcccacccttccgacctctatgctgaggggtgtgaggctctagttgtgaagaagctacaagaaatcatgatgcatgtgatctgggccgcactggcatttgcagctattcagctgctgggcatgctgtgtgcttgcatcgtgttgtgcagaaggagtagagatcctgcttacgagctcctcatcactggcggaacctatgcatagttgacaactcaagcactgagctttgaaactagtggtttttaatcaaagttggctttataggaggagtataatgtatgcactactgttttaaaagaattagtgtgagtgtgtttttgtatgaatgagcccattcatggtaagtcttaagcttgttggaaataatgtacccatgtagactagcaaaatagtatgtagatgtgatctcagttgtaaatagaaaaatctaattcaataaactctgtatcagcccccaa

SEQ ID NO: 71562 - DNA, 1103 bp, Homo sapiens
agattggacctctccggaagattggacctctccggaagattgtccctcttagctgctgcagagagactgccagcaattgtaatggcagcctggcccacccttccgacctctatgctgaggggtgtgaggctctagttgtgaagaagctacaagaaatcatgatgcatgtgatctgggccgcactggcatttgcagctattcagctgctgggcatgctgtgtgcttgcatcgtgttgtgcagaaggagtagagatcctgcttacgagctcctcatcactggcggaacctatgcatagttgacaactcaagcctgagctttttggtcttgttctgatttggaaggtgaattgagcaggtctgctgctgttggcctctggagttcatttagttaaagcacatgtacactggtgttggacagagcagcttggcttttcatgtgcccacctacttacctactacctgcgactttctttttccttgttctagctgactcttcatgcccctaagattttaagtacgatggtgaacgttctaatttcagaaccaattgcgagtcatgtagtgtggtagaattaaaggaggacacgagcctgcttctgttacctccaagtggtaacaggactgatgccgaaatgtcaccaggtcctttcagtcttcacagtggagaactcttggccaaaggtttttggggggaggaggaggaaaccagctttctggttaaggttaacaccagatggtgcccctcattggtgtccttttaaaaaatatttactgtagtccaataagatagcagctgtacaaaatgactaaaatagattgtaggatcatatggcgtatatcttggttcatcttcaaaatcagagactgagctttgaaactagtggtttttaatcaaagttggctttataggaggagtataatgtatgcactactgttttaaaagaattagtgtgagtgtgtttttgtatgaatgagcccattcatggtaagtcttaagcttgttggaaataatgtacccatgtagactagcaaaatagtatgtagatgtgatctcagttgtaaatagaaaaatctaattcaataaactctgtatcagcccccaa

SEQ ID NO: 71563 - DNA, 1219 bp, Homo sapiens
  misc_feature (13)..(13): n is a, c, g, or t
  misc_feature (15)..(15): n is a, c, g, or t
  misc_feature (22)..(22): n is a, c, g, or t
  misc_feature (51)..(51): n is a, c, g, or t
  misc_feature (63)..(64): n is a, c, g, or t
  misc_feature (87)..(87): n is a, c, g, or t
  misc_feature (89)..(89): n is a, c, g, or t
ttttcattttccncnctcgttntgtaaacatatcccacccccactactacnacttctgtgacnnaaaccaagagcaggatgatgacntncgtggcaagtccacagcgactttcccggattgtggcacagcagccaattagcccaatgatgaaaagcagggctcctacagctatgatcactacagcagggatgagcgtgtacacatcttcaaagaagtggtcatagtcatcataaggggtgtgaggctctagttgtgaagaagctacaagaaatcatgatgcatgtgatctgggccgcactggcatttgcagctattcagctgctgggcatgctgtgtgcttgcatcgtgttgtgcagaaggagtagagatcctgcttacgagctcctcatcactggcggaacctatgcatagttgacaactcaagcctgagctttttggtcttgttctgatttggaaggtgaattgagcaggtctgctgctgttggcctctggagttcatttagttaaagcacatgtacactggtgttggacagagcagcttggcttttcatgtgcccacctacttacctactacctgcgactttctttttccttgttctagctgactcttcatgcccctaagattttaagtacgatggtgaacgttctaatttcagaaccaattgcgagtcatgtagtgtggtagaattaaaggaggacacgagcctgcttctgttacctccaagtggtaacaggactgatgccgaaatgtcaccaggtcctttcagtcttcacagtggagaactcttggccaaaggtttttggggggaggaggaggaaaccagctttctggttaaggttaacaccagatggtgcccctcattggtgtccttttaaaaaatatttactgtagtccaataagatagcagctgtacaaaatgactaaaatagattgtaggatcatatggcgtatatcttggttcatcttcaaaatcagagactgagctttgaaactagtggtttttaatcaaagttggctttataggaggagtataatgtatgcactactgttttaaaagaattagtgtgagtgtgtttttgtatgaatgagcccattcatggtaagtcttaagcttgttggaaataatgtacccatgtagactagcaaaatagtatgtagatgtgatctcagttgtaaatagaaaaatctaattcaataaactctgtatcagcccccaa

SEQ ID NO: 71564 - DNA, 903 bp, Homo sapiens
gttgccagggagcggcgcgggagccctgaggggactgcggcggctgcgcggaggagcgaggcgcttgctggggtcggggctgcgcgacggcgcaggggctgcggggagcgccgcgcaggccgtgcagttcctagcgaggaggcgccgccgccattgccgctctctcggtgagcgcagccccgctctccgggccgggccttcgcgggccaccggcgccatgggccagtgcggcatcacctcctccaagaccgtgctggtctttctcaacctcatcttctggggggcagctggcattttatgctatgtgggagcctatgtcttcatcacttatgatgactatgaccacttctttgaagatgtgtacacgctcatccctgctgtagtgatcatagctgtaggagccctgcttttcatcattgggctaattggctgctgtgccacaatccgggaaagtcgctgtggacttgccacgtttgtcatcatcctgctcttggtttttgtcacagaagttgttgtagtggttttgggatatgtttacagagcaaaggtggaaaatgaggttgatcgcagcattcagaaagtgtataagacctacaatggaaccaaccctgatgctgctagccgggctattgattatgtacagagacagttctgctgaagaaccgcactggccacccagcctgaccggaccggtcatgcccgtccggaacgtctataagaaggagaaagctcgagtcatcactgaggaagagaagaatttcaaagccttcgctagtctccgtatggcccgtgccaacgcccggctcttcggcatacgggcaaaaagagccaaggaagccgcagaacaggatgttgaaaagaaaaaataaagccctcctggggacttggaatcagtcggcagtc

SEQ ID NO: 71565 - DNA, 535 bp, Homo sapiens
ccatggaaaggggtggtaacttttaggtgttgccatcactgtggtaaactgacatggtgttgctgggtatgtctcatggagaggtgctttcactgcttccctgttcacctagtcttcaatctggtccagagtttcagccccacctctggagttgagtcctgccttctccctcaatgtgacaaatgttggccaatggtatatcgcagttgtgatgcaagcagaggcttggtaaatgcctgcatactggggtttgtcctcttggaatgctcatttgtgggagccctgaacaactatgtaagaagtctggctaccctgctggagagaacacatggtgggaagagactaaaattatgtgaagagagtcaggccagccatcccagcttctctgctgagccccgccatcagccaacctgccagctgaatgcaaccgtaagagtgatcaccagcaagatcactagaaaaaccacctaactgagcccaccctggattgaacaatcataaacaaataaaatggttattgttttaaatcacaaag

SEQ ID NO: 71566 - DNA, 500 bp, Homo sapiens
tctccctatgctgtccagactggtcttgaactcctggcttcaagcacttctcacttcagcatgatggtgcatgcctatagtcccagctacttgggaggctaaggtggaaggatcacttgaagtcaggcagttgaggttacagtgatcatgtcactgcattccagcctgggtgacgaagcaagacactgtctcttaaaaaagaaaacagtcatctacactttcttgtatatctttacaaacgacaatgttttaaaattactaatttgagtgaaccaggccccacctttcagcctccctcccttccttagacgtaagaactctgcagccacactggatggcacgaagggtcaggactgctactttgggttattacttggtaattcaaaactattttgacctctagataaatgttgtggattgcacacttgtgcaaaaaataagcatgctttaaatccaactaagatagaagaaaccagcaaattagtgatgtcaacaaactg

SEQ ID NO: 71567 - DNA, 250 bp, Homo sapiens
tataaaggatatttttaatgatgaatggaaatttcccatcatctgtttgttacctggcttgtttaatttattgttatgaggaatcttttattctatcaactatgcaaacgtgtctcaagtcatatttcctctagaggaaaagcaaagggcttgtttttcttaactgagtgataacagattactttgttaatttttagttaaaaactgtaagttaaagtaaacataaataatacaagttctgttctcaaat

SEQ ID NO: 71568 - DNA, 277 bp, Homo sapiens
cctataatcaaaaagataataacaaatgtcaatgaggaagtagagaaattagaactcccatgcactactggcaagaaggtaaatggtgcgggtgtttggagaagagcctggcagtcctcaaaaggttaagcatagttaccataggaccctgcacttccatcctaggaacctaaccaagaaaactgaaacacatgtccagaaaaactcgaacacgagtgttcacagcagcatttattattcataacagccaaaaagtagaaacagcccaaatgtctat

SEQ ID NO: 71569 - DNA, 331 bp, Homo sapiens
ttgttgtttcctaccttaaccaatacctcctggaaaaaagaggtattggtataaaaataaaccatacccaaacattcccacaacatgaccttaataagctggtgcacagtagattatggcagaggaaagaaaattgactttagaattagagaaacttaggttcaaatctcagctctgtcatgctttggttgaccttcagtaagtcccattttcttcatctgtaaaatgggaataacatctactccacagcatcattagaaagattaaatagtggctgggcatggtggctcatgcctgtaatcccagcactttgggaggctgaggtgggcgg

SEQ ID NO: 71570 - DNA, 345 bp, Homo sapiens
tatagtgtagtaaatacataaaccagtaacataatcatttattatcattatcaaatattatgtaccatacataattgtatgtgctagaattttatacgactggccgtggaggtttgttgacaccagcatcaccacaattttgtattttgttgtgctatgacctcactaggtggtaggaatttttcagctcattataatcttatgggaaccctgttatatatgtggttcattgttgaccagaatgttatggggcacatgaccgtatatatatttgtatatacatgtgtacctaaccatatattaatatatgtatgtatgaatataccatttaggtacaaatacatg

SEQ ID NO: 71571 - DNA, 2341 bp, Homo sapiens
gttcttcgaaaaacagtcaacgtccaaaaagtttattttttgagtcacctttaatagagaaatttcccactggaaacagatccacctaagtgattatctagtatcagctgtatcaaggcaaaaggtaaaggttataagatgtaaatattagaccaaaatagccttttttaacaaacacaataatgctgtacgtctgtaacaaaacaaaatttgaaaaattgaggtaatgtacacagcgatgcacacacccccacaccacaccgtgattcctgagttttgatttggttgaattcaccttgtagttccctttcctgagaaaatacaggttcaacacatctagtccacgatgtacgtacaaggggaaggggtgaacaggaaatagactcccttattctgctcacatgagctggaacctgtactagctgcatatttcatagaccccagaggctcacctcaattgtactcctatgataaaatgtctctagcatttgtcatgagagaaactggctagaaatagtttgttcattgcgtccagcaagacacgcattgctgttgatatctttgtggctaagatggagaatgtgactggataatagttatccaggtggattactagctattgaaacagtctgagatagttgcatgatgattaacgttaaactgggagtaatttcaagtcatttggctaaaaatgaaaaaaaagtcccataaaaaggtatcaaatgtacagataatagggctggaattattaagtatgatgatgttattaacatctaaaattattttggccgggcaaggtgggtcacgcctgtaatctcagcactttgggatgccaagatgggtggatcacctgagttcaggagttcaagaccagcttggccaacatggcgaaacccgtctctactaaagaatacaaaaattagccaggtgttgtggcacatgcctgtactcccagctactcaggaggctgaggcagaagaatcatttgaaccccggaggtggaggttgcagtgagccgacattgtgccgcttcattccagcctgggcaacagagtgaaactcttgtctcaaaagtaaaaaaataataatgtttaaaaatatttcaatgtggagacaagctcaaaatgaaattagacacattccattacccaggtaaaagaaggggaagcctgacttgatagtagtattcaggaaaaaagagttggcagttttatttggccaaattccaatatcagctcatggtacagcacaccgggggagggggacgggaggcgagaactaaggctttttaagaatgtgttgatggaagtatgtgcctagatcaaaagaataatccccccggactccagtgtaagatcaattactgttggaatattgtgttcctttctagatatcacattttaagcagactttggccaagtagtacagtgtttgcaggagcagtaacaagatggtgataactttgaaaatacttctcaaaagaaaaataaaaaagaattagggaagttcagtctggagataattcagaaatacagatgataattgttttcaaattcttgaaggaaatgggagagagaataggctaattctgtattgcttcagaaaccaaatggaaacaattaaattccattagagaaatggttggaaaatatgaggaggatttagttcagtacgaggaagctgtttctaatactttttgttggttaaaaatacattccgctgctgtggaaagcctgtagctgccaggagtgttacagagggcattcctcccttgagttgacatttgtgccaaaccggctttgagggcttctccagcttttaagatgcgataatgataagatgatcatcgggaaaacatccctcagatgaaacgttcacaggctggctctgaaaactggcattcagatgattgcggctcccccatactgtaggaatattgtttatggcttaaggttgcctcgctcctcatctgtaatcagtgaaagtttatccagaggttaattaccggttttctggtgggtatctgggaactgaggatgggagattaactgttgtatatgaccatagtaaagcaaaagactgttagagaatgagtaaacgttcgttttcctccctacagaatttacagttactctctgtccattccactcactactgtcttcatcacacacacagaggcaaacgtctgattcagatagccaggtgtgccatgcatgcactccaccatattgtgatctcttcgaggcttgtttctgtcccctgtcctccacagtcctggattgttaatgaatagttcatacatgtttgttaaataaatataccttctttaaaattaaaaatt

SEQ ID NO: 71572 - DNA, 387 bp, Homo sapiens
tgccatgtaagcagtgcagagtgccacaggagtcactggtcagtcgcttccaccaaccgtttccttttgcagatactgcctgggtctgaacctgattaaagttctacattataggcttcctactccaaatcctaatgtttattctaactagtatcagtctgtttcagtcaaaatacaaactataacaatgaacacgctattttagaaatgtagccaaaatccttacttatgatctatgattatgtttcttttaaattttaaatgtattcctaggagtgaacgaaagcgtttcttcatagtgttttatggtcaccattagagcccaaatcctgctttccctatagcaactgggtggttgtgtttttattaatctattaatttatttta

SEQ ID NO: 71573 - DNA, 813 bp, Homo sapiens
aaaaacatgactctgcaaaagaaactggttcaagaacatgaatgggaagagaaaaaacagaagctatcagcaacagaggaagtgaaaacttacaagcagaaaattcattcaatgaagaatgaattacagaaaacagagagagacgacaaaaccagattgctcttcaggattagaaaattcaggacaattggtactattcatgcttcagaaagagttcttgctaactttcaaaaatagatgcaagctgtcagcctgagatagaattagtaaaaatttgccatcatggtaattatttaaaaaccagtgactataaacccaactccagacagaccccgttcatcaaataacaaaggcaagcctcctaaaccacgccagttcttttggcccatgactaatattgtttgaacgctctattcctcactaatgatgtatccacttgaaaaggctcttctctaaatttagaaatgtacctagaaggaaacatatgccactccatgggccctcacatgatcgtgagggtgggtggttattggaagtagctggaatacccttccctggctcatcgggtgaattaccaaaacccgtcaattctacccctagtacttagatctgttcactcttctccactcctaagagtataatatttcaaggttgagtttaaacgtaatctttcttgatactccaagaagagatttttttcacaaggatgttatttgtctttgaaaatatttttaccttttataaacgtttgcaataaacaacgatgcgaaagtttcttatttttggatatccatatctataatcccttcctac

SEQ ID NO: 71574 - DNA, 490 bp, Homo sapiens
gatcatcccgcctcagcctcccaaagtgctgggattacaggcgtgagccaccgtgcccggtggatctttccagtatttaggatcccattccttaagtggggctgggaaagaggggatgtaggaatggggaggaatctgacttcaacaattgatgtgggtttgagaaccttggatccaccccctaagtactgacatgcaaagaaacagcatgaaaaggaaaaaacatttaagggttgctggacctcagtgaaaaggcagaggtttatatggtttgtaatacatgaggagcttcacatttcctctttcaaagaagaggaaaacagtagcattttgtgtgtgtgtgtgtgtctgtttatttggaagagttgattctcagtcattgatactaaatgtaaattccagaagttcaaatgacaatatctggtgactcctttacaaaccataggacaggagtaggcacctgtcagaaataaggcaagttttaactttt

SEQ ID NO: 71575 - DNA, 373 bp, Homo sapiens
aaacttctcagccatagtgccaaagaacattatcagacccaattccctatatcccaacaaaaccactccccagtcacagattatccgacacaatttcattggggttctcaaatggcaagagtttgtttaaaatgcaaatctctgagccccaccctcagagaggccagcggggcagtggaatatgcactgaacacttcgggcactaactcgtgtgccaatggttgcacttggacatatactactctaggcctttgggctcctttcgtccctgcagcaccttctgtcctcaagacaggggctctcttgttttcctcatgcgagagctgttgcccagctagtccatcccactgaggacaaactctgactcaccttt

SEQ ID NO: 71576 - DNA, 276 bp, Homo sapiens
acacattatcacatttttgtaatccacctatgatctgaaacaatattcatgagtctcttcattgcttttcttaatattaccttcataatacatcattcttagccagattgctaggtatttcctcacaagtttttctaattatttcatgaagagtgcgtttttccttcattttcaagaatatttcaagattagctaatgttagtaattatatatgaaaatatatacatataaggcatctaaaataatgattaatatttttatgtgcataaaagcatg

SEQ ID NO: 71577 - DNA, 3793 bp, Homo sapiens
tagaaaagataaattctttatttgtggaaaacaacagaagtggggctatttaggcaccgccaatgtttattatattcatatggcagagaataaacacagcacactagaagtttgcgctttgggtattaaaaaaaaaaaaaagcaaaaccttcttaggtcactgactatcttcttttgctcctttctatctgactcctcaggcaaggtgcaattcaaatccctggagaacctctcaaatatagctgctgttcaatgttactcagaaataaggaaagaaatttgacacggagacactccacatcttggctgcctggaaaaatatcatctttgaggtcattcaactcactaagtcatttttattattgttttgtctgtctattttctggtacagtctcaatgaaagatatgtggccctaatcatgcaaaaccgatctggggggaatcagttgtttcttcaggtcttcgcaggattccagctcccccaactacctccgtcgccttctaaaactggcaggctctggacgttttgcatgctgaagaaaatcactgttttgcctccagcaaggaacataaatgttgcaacactgactcctcctctcatgaagaaagagtgaacaagtgcaccgagttgagcttcttctcacagagccaccgggctggggaccggggagcggaggctgaaatccccagacgccggttttctgggctgggctttctgccttactcactccttctccctctttctggattttaccgaccgttcgcgaaacagctttccacacaatggagcttcatgtcctcgtgcaggaagtactcatcgactgatgtggcagactttgctccctggcaaaactaaagaactctcctattcatggaggcgaacactgaggatgctttccacatgaaccctgaagtgaacttctgatacatttcctgcagcaagagaaggcagccaacatgaaggaaaatgtggcatctgcaaccgttttcactctgctactttttctcaacacctgccttctgaatggacagttacctcctggaaaacctgagatctttaaatgtcgttctcccaataaggaaacattcacctgctggtggaggcctgggacagatggaggacttcctaccaattattcactgacttaccacagggaaggagagacactcatgcatgaatgtccagactacataaccggtggccccaactcctgccactttggcaagcagtacacctccatgtggaggacatacatcatgatggtcaatgccactaaccagatgggaagcagtttctcggatgaactttatgtggacgtgacttacatagttcagccagaccctcctttggagctggctgtggaagtaaaacagccagaagacagaaaaccctacctgtggattaaatggtctccacctaccctgattgacttaaaaactggttggttcacgctcctgtatgaaattcgattaaaacccgagaaagcagctgagtgggagatccattttgctgggcagcaaacagagtttaagattctcagcctacatccaggacagaaataccttgtccaggttcgctgcaaaccagaccatggatactggagtgcatggagtccagcgaccttcattcagatacctagtgacttcaccatgaatgatacaaccgtgtggatctctgtggctgtcctttctgctgtcatctgtttgattattgtctgggcagtggctttgaagggctatagcatggtgacctgcatctttccgccagttcctgggccaaaaataaaaggatttgatgctcatctgttggagaagggcaagtctgaagaactactgagtgccttgggatgccaagactttcctcccacttctgactatgaggacttgctggtggagtatttagaagtagatgatagtgaggaccagcatctaatgtcagtccattcaaaagaacacccaagtcaaggtatgaaacccacatacctggatcctgacactgactcaggccgggggagctgtgacagcccttcccttttgtctgaaaagtgtgaggaaccccaggccaatccctccacattctatgatcctgaggtcattgagaagccagagaatcctgaaacaacccacacctgggacccccagtgcataagcatggaaggcaaaatcccctattttcatgctggtggatccaaatgttcaacatggcccttaccacagcccagccagcacaaccccagatcctcttaccacaatattactgatgtgtgtgagctggctgtgggccctgcaggtgcaccggccactctgttgaatgaagcaggtaaagatgctttaaaatcctctcaaaccattaagtctagagaagagggaaaggcaacccagcagagggaggtagaaagcttccattctgagactgaccaggatacgccctggctgctgccccaggagaaaaccccctttggctccgctaaacccttggattatgtggagattcacaaggtcaacaaagatggtgcattatcattgctaccaaaacagagagagaacagcggcaagcccaagaagcccgggactcctgagaacaataaggagtatgccaaggtgtccggggtcatggataacaacatcctggtgttggtgccagatccacatgctaaaaacgtggcttgctttgaagaatcagccaaagaggccccaccatcacttgaacagaatcaagctgagaaagccctggccaacttcactgcaacatcaagcaagtgcaggctccagctgggtggtttggattacctggatcccgcatgttttacacactcctttcactgatagcttgactaatggaatgattggttaaaatgtgatttttcttcaggtaacactacagagtacgtgaaatgctcaagaatgtagtcagactgacactactaaagctcccagctcctttcatgctccatttttaaccacttgcctctttctccagcagctgattccagaacaaatcattatgtttcctaactgtgatttgtagatttactttttgctgttagttataaaactatgtgttcaatgaaataaaagcacactgcttagtattcttgagggacaatgccaataggtatatcctctggaaaaggctttcatgatttggcatgggacagacggaaatgaaattgtcaaaattgtttaccatagaaagatgacaaaagaaaattttccacataggaaaatgccatgaaaattgcttttgaaaaacaactgcataacctttacactcctcgtccattttattaggattacccaaatataaccatttaaagaaagaatgcattccagaacaaattgtttacataagttcctataccttactgacacattgctgatatgcaagtaagaaataatgcctccaattttttcttaaaatagtttagatatgttaagcatggattttccccctaaattctactctaaagcttctataaaatatagtttggaaataaaaatgttcttacacaaggggcaaatgaatttcatgtgaatccctttaggatgttttcctccttcatttcagcatgatagataatttattatacaccttagtctttccttagttaaaaaaaaattccctaaagactaacttgaaaagaaaaccacagcaggatgctaatggaattactgccttactgtacatacaaattctactttaatataaacccataagtttaactgtatttttgaagactatttttctatgacttaggtaaaataaaagactattttctattttaaaaataca

SEQ ID NO: 71578 - DNA, 216 bp, Homo sapiens
gatggaagaagaatacttgaggccctaaaataacctttccaacatgctcttccctctctcactcccagctgaaatgggcagaacatggaagcctaaggaaccatttgtcagctctgggttttgcgcttggaatttctgatacccaaaggccagtggtattgatctatgaagaaaaaaactagactctctttattactttcttattcattcctaata

SEQ ID NO: 71579 - DNA, 3490 bp, Homo sapiens
tagaaaagataaattctttatttgtggaaaacaacagaagtggggctatttaggcaccgccaatgtttattatattcatatggcagagaataaacacagcacactagaagtttgcgctttgggtattaaaaaaaaaaaaaagcaaaaccttcttaggtcactgactatcttcttttgctcctttctatctgactcctcaggcaaggtgcaattcaaatccctggagaacctctcaaatatagctgctgttcaatgttactcagaaataaggaaagaaatttgacacggagacactccacatcttggctgcctggaaaaatatcatctttgaggtcattcaactcactaagtcatttttattattgttttgtctgtctattttctggtacagtctcaatgaaagatatgtggccctaatcatgcaaaaccgatctggggggaatcagttgtttcttcaggtcttcgcaggattccagctcccccaactacctccgtcgccttctaaaactggcaggctctggacgttttgcatgctgaagaaaatcactgttttgcctccagcaaggaacataaatgttgcaacactgactcctcctctcatgaagaaagagtgaacaagtgcaccgagttgagcttcttctcacagagccaccgggctggggaccggggagcggaggctgaaatccccagacgccggttttctgggctgggctttctgccttactcactccttctccctctttctggattttaccgaccgttcgcgaaacagctttccacacaatggagcttcatgtcctcgtgcaggaagtactcatcgactgatgtggcagactttgctccctggcaaaactaaagaactctcctattcatggaggcgaacactgaggatgctttccacatgaaccctgaagtgaacttctgatacatttcctgcagcaagagaaggcagccaacatgaaggaaaatgtggcatctgcaaccgttttcactctgctactttttctcaacacctgccttctgaatgttcagccagaccctcctttggagctggctgtggaagtaaaacagccagaagacagaaaaccctacctgtggattaaatggtctccacctaccctgattgacttaaaaactggttggttcacgctcctgtatgaaattcgattaaaacccgagaaagcagctgagtgggagatccattttgctgggcagcaaacagagtttaagattctcagcctacatccaggacagaaataccttgtccaggttcgctgcaaaccagaccatggatactggagtgcatggagtccagcgaccttcattcagatacctagtgacttcaccatgaatgatacaaccgtgtggatctctgtggctgtcctttctgctgtcatctgtttgattattgtctgggcagtggctttgaagggctatagcatggtgacctgcatctttccgccagttcctgggccaaaaataaaaggatttgatgctcatctgttggagaagggcaagtctgaagaactactgagtgccttgggatgccaagactttcctcccacttctgactatgaggacttgctggtggagtatttagaagtagatgatagtgaggaccagcatctaatgtcagtccattcaaaagaacacccaagtcaaggtatgaaacccacatacctggatcctgacactgactcaggccgggggagctgtgacagcccttcccttttgtctgaaaagtgtgaggaaccccaggccaatccctccacattctatgatcctgaggtcattgagaagccagagaatcctgaaacaacccacacctgggacccccagtgcataagcatggaaggcaaaatcccctattttcatgctggtggatccaaatgttcaacatggcccttaccacagcccagccagcacaaccccagatcctcttaccacaatattactgatgtgtgtgagctggctgtgggccctgcaggtgcaccggccactctgttgaatgaagcaggtaaagatgctttaaaatcctctcaaaccattaagtctagagaagagggaaaggcaacccagcagagggaggtagaaagcttccattctgagactgaccaggatacgccctggctgctgccccaggagaaaaccccctttggctccgctaaacccttggattatgtggagattcacaaggtcaacaaagatggtgcattatcattgctaccaaaacagagagagaacagcggcaagcccaagaagcccgggactcctgagaacaataaggagtatgccaaggtgtccggggtcatggataacaacatcctggtgttggtgccagatccacatgctaaaaacgtggcttgctttgaagaatcagccaaagaggccccaccatcacttgaacagaatcaagctgagaaagccctggccaacttcactgcaacatcaagcaagtgcaggctccagctgggtggtttggattacctggatcccgcatgttttacacactcctttcactgatagcttgactaatggaatgattggttaaaatgtgatttttcttcaggtaacactacagagtacgtgaaatgctcaagaatgtagtcagactgacactactaaagctcccagctcctttcatgctccatttttaaccacttgcctctttctccagcagctgattccagaacaaatcattatgtttcctaactgtgatttgtagatttactttttgctgttagttataaaactatgtgttcaatgaaataaaagcacactgcttagtattcttgagggacaatgccaataggtatatcctctggaaaaggctttcatgatttggcatgggacagacggaaatgaaattgtcaaaattgtttaccatagaaagatgacaaaagaaaattttccacataggaaaatgccatgaaaattgcttttgaaaaacaactgcataacctttacactcctcgtccattttattaggattacccaaatataaccatttaaagaaagaatgcattccagaacaaattgtttacataagttcctataccttactgacacattgctgatatgcaagtaagaaataatgcctccaattttttcttaaaatagtttagatatgttaagcatggattttccccctaaattctactctaaagcttctataaaatatagtttggaaataaaaatgttcttacacaaggggcaaatgaatttcatgtgaatccctttaggatgttttcctccttcatttcagcatgatagataatttattatacaccttagtctttccttagttaaaaaaaaattccctaaagactaacttgaaaagaaaaccacagcaggatgctaatggaattactgccttactgtacatacaaattctactttaatataaacccataagtttaactgtatttttgaagactatttttctatgacttaggtaaaataaaagactattttctattttaaaaataca

SEQ ID NO: 71580 - DNA, 2975 bp, Homo sapiens
tagaaaagataaattctttatttgtggaaaacaacagaagtggggctatttaggcaccgccaatgtttattatattcatatggcagagaataaacacagcacactagaagtttgcgctttgggtattaaaaaaaaaaaaaagcaaaaccttcttaggtcactgactatcttcttttgctcctttctatctgactcctcaggcaaggtgcaattcaaatccctggagaacctctcaaatatagctgctgttcaatgttactcagaaataaggaaagaaatttgacacggagacactccacatcttggctgcctggaaaaatatcatctttgaggtcattcaactcactaagtcatttttattattgttttgtctgtctattttctggtacagtctcaatgaaagatatgtggccctaatcatgcaaaaccgatctggggggaatcagttgtttcttcaggtcttcgcaggattccagctcccccaactacctccgtcgccttctaaaactggcaggctctggacgttttgcatgctgaagaaaatcactgttttgcctccagcaaggaacataaatgttgcaacactgactcctcctctcatgaagaaagagtgaacaagtgcaccgagttgagcttcttctcacagagccaccgggctggggaccggggagcggaggctgaaatccccagacgccggttttctgggctgggctttctgccttactcactccttctccctctttctggattttaccgaccgttcgcgaaacagctttccacacaatggagcttcatgtcctcgtgcaggaagtactcatcgactgatgtggcagactttgctccctggcaaaactaaagaactctcctattcatggaggcgaacactgaggatgctttccacatgaaccctgaagtgaacttctgatacatttcctgcagcaagagaaggcagccaacatgaaggaaaatgtggcatctgcaaccgttttcactctgctactttttctcaacacctgccttctgaatgttcagccagaccctcctttggagctggctgtggaagtaaaacagccagaagacagaaaaccctacctgtggattaaatggtctccacctaccctgattgacttaaaaactggttggttcacgctcctgtatgaaattcgattaaaacccgagaaagcagctgagtgggagatccattttgctgggcagcaaacagagtttaagattctcagcctacatccaggacagaaataccttgtccaggttcgctgcaaaccagaccatggatactggagtgcatggagtccagcgaccttcattcagatacctagtgacttcaccatgaatgatacaaccgtgtggatctctgtggctgtcctttctgctgtcatctgtttgattattgtctgggcagtggctttgaagggctatagcatggtgacctgcatctttccgccagttcctgggccaaaaataaaaggatttgatgctcatctgttggagaagggcaagtctgaagaactactgagtgccttgggatgccaagactttcctcccacttctgactatgaggacttgctggtggagtatttagaagtagatgatagtgaggaccagcatctaatgtcagtccattcaaaagaacacccaagtcaaggtatgaaacccacatacctggatcctgacactgactcaggccgggggagctgtgacagcccttcccttttgtctgaaaagtgtgaggaaccccaggccaatccctccacattctatgatcctgaggtcattgagaagccagagaatcctgaaacaacccacacctgggacccccagtgcataagcatggaaggcaaaatcccctattttcatgctggtggatccaaatgttcaacatggcccttaccacagcccagccagcacaaccccagatcctcttaccacaatattactgatgtgtgtgagctggctgtgggccctgcaggtgcaccggccactctgttgaatgaagcaggtaaagatgctttaaaatcctctcaaaccattaagtctagagaagagggaaaggcaacccagcagagggaggtagaaagcttccattctgagactgaccaggatacgccctggctgctgccccaggagaaaaccccctttggctccgctaaacccttggattatgtggagattcacaaggtcaacaaagatggtgcattatcattgctaccaaaacagagagagaacagcggcaagcccaagaagcccgggactcctgagaacaataaggagtatgccaaggtgtccggggtcatggataacaacatcctggtgttggtgccagatccacatgctaaaaacgtggcttgctttgaagaatcagccaaagaggccccaccatcacttgaacagaatcaagctgagaaagccctggccaacttcactgcaacatcaagcaagtgcaggctccagctgggtggtttggattacctggatcccgcatgttttacacactcctttcactgatagcttgactaatggaatgattggttaaaatgtgatttttcttcaggtaacactacagagtacgtgaaatgctcaagaatgtagtcagactgacactactaaagctcccagctcctttcatgctccatttttaaccacttgcctctttctccagcagctgattccagaacaaatcattatgtttcctaactgtgatttgtagatttactttttgctgttagttataaaactatgtgttcaatgaaataaaagcacactgcttagtattcttgagggacaatgccaataggtatatcctctggaaaaggctttcatgatttggcatgggacagacggaaatgaaattgtcaaaattgtttaccatagaaagatgacaaaagaaaatttaaaataatacatatagggctgcatacataaaacacatatgtaccgtattgtactttatgtatcat

SEQ ID NO: 71581 - DNA, 3693 bp, Homo sapiens
tagaaaagataaattctttatttgtggaaaacaacagaagtggggctatttaggcaccgccaatgtttattatattcatatggcagagaataaacacagcacactagaagtttgcgctttgggtattaaaaaaaaaaaaaagcaaaaccttcttaggtcactgactatcttcttttgctcctttctatctgactcctcaggcaaggtgcaattcaaatccctggagaacctctcaaatatagctgctgttcaatgttactcagaaataaggaaagaaatttgacacggagacactccacatcttggctgcctggaaaaatatcatctttgaggtcattcaactcactaagtcatttttattattgttttgtctgtctattttctggtacagtctcaatgaaagatatgtggccctaatcatgcaaaaccgatctggggggaatcagttgtttcttcaggtcttcgcaggattccagctcccccaactacctccgtcgccttctaaaactggcaggctctggacgttttgcatgctgaagaaaatcactgttttgcctccagcaaggaacataaatgttgcaacactgactcctcctctcatgaagaaagagtgaacaagtgcaccgagttgagcttcttctcacagagccaccgggctggggaccggggagcggaggctgaaatccccagacgccggttttctgggctgggctttctgccttactcactccttctccctctttctggattttaccgaccgttcgcgaaacagctttccacacaatggagcttcatgtcctcgtgcaggaagtactcatcgactgatgtggcagactttgctccctggcaaaactaaagaactctcctattcatggaggcgaacactgaggatgctttccacatgaaccctgaagtgaacttctgatacatttcctgcagcaagagaaggcagccaacatgaaggaaaatgtggcatctgcaaccgttttcactctgctactttttctcaacacctgccttctgaatggacagttacctcctggaaaacctgagatctttaaatgtcgttctcccaataaggaaacattcacctgctggtggaggcctgggacagatggaggacttcctaccaattattcactgacttaccacagggaaggagagacactcatgcatgaatgtccagactacataaccggtggccccaactcctgccactttggcaagcagtacacctccatgtggaggacatacatcatgatggtcaatgccactaaccagatgggaagcagtttctcggatgaactttatgtggacgtgacttacatagttcagccagaccctcctttggagctggctgtggaagtaaaacagccagaagacagaaaaccctacctgtggattaaatggtctccacctaccctgattgacttaaaaactggttggttcacgctcctgtatgaaattcgattaaaacccgagaaagcagctgagtgggagatccattttgctgggcagcaaacagagtttaagattctcagcctacatccaggacagaaataccttgtccaggttcgctgcaaaccagaccatggatactggagtgcatggagtccagcgaccttcattcagatacctagtgcatggtgacctgcatctttccgccagttcctgggccaaaaataaaaggatttgatgctcatctgttggagaagggcaagtctgaagaactactgagtgccttgggatgccaagactttcctcccacttctgactatgaggacttgctggtggagtatttagaagtagatgatagtgaggaccagcatctaatgtcagtccattcaaaagaacacccaagtcaaggtatgaaacccacatacctggatcctgacactgactcaggccgggggagctgtgacagcccttcccttttgtctgaaaagtgtgaggaaccccaggccaatccctccacattctatgatcctgaggtcattgagaagccagagaatcctgaaacaacccacacctgggacccccagtgcataagcatggaaggcaaaatcccctattttcatgctggtggatccaaatgttcaacatggcccttaccacagcccagccagcacaaccccagatcctcttaccacaatattactgatgtgtgtgagctggctgtgggccctgcaggtgcaccggccactctgttgaatgaagcaggtaaagatgctttaaaatcctctcaaaccattaagtctagagaagagggaaaggcaacccagcagagggaggtagaaagcttccattctgagactgaccaggatacgccctggctgctgccccaggagaaaaccccctttggctccgctaaacccttggattatgtggagattcacaaggtcaacaaagatggtgcattatcattgctaccaaaacagagagagaacagcggcaagcccaagaagcccgggactcctgagaacaataaggagtatgccaaggtgtccggggtcatggataacaacatcctggtgttggtgccagatccacatgctaaaaacgtggcttgctttgaagaatcagccaaagaggccccaccatcacttgaacagaatcaagctgagaaagccctggccaacttcactgcaacatcaagcaagtgcaggctccagctgggtggtttggattacctggatcccgcatgttttacacactcctttcactgatagcttgactaatggaatgattggttaaaatgtgatttttcttcaggtaacactacagagtacgtgaaatgctcaagaatgtagtcagactgacactactaaagctcccagctcctttcatgctccatttttaaccacttgcctctttctccagcagctgattccagaacaaatcattatgtttcctaactgtgatttgtagatttactttttgctgttagttataaaactatgtgttcaatgaaataaaagcacactgcttagtattcttgagggacaatgccaataggtatatcctctggaaaaggctttcatgatttggcatgggacagacggaaatgaaattgtcaaaattgtttaccatagaaagatgacaaaagaaaattttccacataggaaaatgccatgaaaattgcttttgaaaaacaactgcataacctttacactcctcgtccattttattaggattacccaaatataaccatttaaagaaagaatgcattccagaacaaattgtttacataagttcctataccttactgacacattgctgatatgcaagtaagaaataatgcctccaattttttcttaaaatagtttagatatgttaagcatggattttccccctaaattctactctaaagcttctataaaatatagtttggaaataaaaatgttcttacacaaggggcaaatgaatttcatgtgaatccctttaggatgttttcctccttcatttcagcatgatagataatttattatacaccttagtctttccttagttaaaaaaaaattccctaaagactaacttgaaaagaaaaccacagcaggatgctaatggaattactgccttactgtacatacaaattctactttaatataaacccataagtttaactgtatttttgaagactatttttctatgacttaggtaaaataaaagactattttctattttaaaaataca

SEQ ID NO: 71582 - DNA, 758 bp, Homo sapiens
gaggcaacccaatgggcatgacctgggtatggtggtgcctgggccattgaaagctcgagtgtttatcagcagggaatataggtccccgagcccacaagaacacttatagaaaggaagggttgatggaagaagaatacttgaggccctaaaataacctttccaacatgctcttccctctctcactcccagctgaaatgggcagaacatggaagcctaaggaaccatttgtcagctctgggttttgcgcttggaatttctgatacccaaaggccagtggtattgatctatgaagaaaaaaactagactctctttattactttcttattcattcctaatacattacttattgcagagagacactcatgcatgaatgtccagactacataaccggtggccccaactcctgccactttggcaagcagtacacctccatgtggaggacatacatcatgatggtcaatgccactaaccagatgggaagcagtttctcggatgaactttatgtggacgtgacttacataggtaaggggaaggaaagtgggtgaggaatttcttactccactatgtattagccaatagtcacactcagtttgagtcttcttgggttttggatggatccccaaaaagaaagatgagaaaactcacgatatgcttgtcaacagaacagttcaaatcattttttatcaagtcattcatgacactaaggctggcacttgggatccttgtgttcctgtgctttcccttgaccctcatcctct

SEQ ID NO: 71583 - DNA, 356 bp, Homo sapiens
cttgaactctctaccttgtcatctgaggacctctggtggtggaaattttcccagcgtgtgtgaattgatgtttctgtgccaagccatccaaccctgttacattttcctacattcctttcctcctattttgtcattcacattaagcaaggagcaacaatcagttgcaaatacccagaataaagtggtggatgtgcctgaccagactgccatttcacaaaagttacctgctaccttctcttccagtgaacttctgatacatttcctgcagcaagagaaggcagccaacatgaaggaaaatgtggcatctgcaaccgttttcactctgctactttttctcaacacctgccttctgaatg

SEQ ID NO: 71584 - DNA, 1411 bp, Homo sapiens
tagaaaagataaattctttatttgtggaaaacaacagaagtggggctatttaggcaccgccaatgtttattatattcatatggcagagaataaacacagcacactagaagtttgcgctttgggtattaaaaaaaaaaaaaagcaaaaccttcttaggtcactgactatcttcttttgctcctttctatctgactcctcaggcaaggtgcaattcaaatccctggagaacctctcaaatatagctgctgttcaatgttactcagaaataaggaaagaaatttgacacggagacactccacatcttggctgcctggaaaaatatcatctttgaggtcattcaactcactaagtcatttttattattgttttgtctgtctattttctggtacagtctcaatgaaagatatgtggccctaatcatgcaaaaccgatctggggggaatcagttgtttcttcaggtcttcgcaggattccagctcccccaactacctccgtcgccttctaaaactggcaggctctggacgttttgcatgctgaagaaaatcactgttttgcctccagcaaggaacataaatgttgcaacactgactcctcctctcatgaagaaagagtgaacaagtgcaccgagttgagcttcttctcacagagccaccgggctggggaccggggagcggaggctgaaatccccagacgccggttttctgggctgggctttctgccttactcactccttctccctctttctggattttaccgaccgttcgcgaaacagctttccacacaatggagcttcatgtcctcgtgcaggaagtactcatcgactgatgtggcagactttgctccctggcaaaagtgagtacccatggcgagctgaggccgcctccgacggcgcgcggcaggggctgcgcgggcggccgctctccgggatgcgggttcgaggcccgcgtgctgaaggggagagcggggccaccggcgcgggctcctggagagaacgccagccaggagccagagtcggcagccggcggggaagcccgggatccgcccgcctcccgcccggatgtcccttctcagaggggctaaaaaatactcttaaggtgctttgcctccaccactgcccccaaccccagcttttacaaactgcactcggctcgcattcgcctttgtcaaaggcatcttcacctgtatccttgagcatgagtttcggcgttgattgtgggattctcagaatgcaaattatttgcgtcaaaataaaaagaaaagaaaaaaagagcggggagggggaaggggcgcagacaggtgatgtgatgaaagccggactcgagactctcccatcagcagcagccgccgccgcagcagcctcgcgggcatccggcggggaaagtttagggttagcaatgctgacctgaaaggt

SEQ ID NO: 71585 - DNA, 3221 bp, Homo sapiens
tagaaaagataaattctttatttgtggaaaacaacagaagtggggctatttaggcaccgccaatgtttattatattcatatggcagagaataaacacagcacactagaagtttgcgctttgggtattaaaaaaaaaaaaaagcaaaaccttcttaggtcactgactatcttcttttgctcctttctatctgactcctcaggcaaggtgcaattcaaatccctggagaacctctcaaatatagctgctgttcaatgttactcagaaataaggaaagaaatttgacacggagacactccacatcttggctgcctggaaaaatatcatctttgaggtcattcaactcactaagtcatttttattattgttttgtctgtctattttctggtacagtctcaatgaaagatatgtggccctaatcatgcaaaaccgatctggggggaatcagttgtttcttcaggtcttcgcaggattccagctcccccaactacctccgtcgccttctaaaactggcaggctctggacgttttgcatgctgaagaaaatcactgttttgcctccagcaaggaacataaatgttgcaacactgactcctcctctcatgaagaaagagtgaacaagtgcaccgagttgagcttcttctcacagagccaccgggctggggaccggggagcggaggctgaaatccccagacgccggttttctgggctgggctttctgccttactcactccttctccctctttctggattttaccgaccgttcgcgaaacagctttccacacaatggagcttcatgtcctcgtgcaggaagtactcatcgactgatgtggcagactttgctccctggcaaaactaaagaactctcctattcatggaggcgaacactgaggatgctttccacatgaaccctgaagtgaacttctgatacatttcctgcagcaagagaaggcagccaacatgaaggaaaatgtggcatctgcaaccgttttcactctgctactttttctcaacacctgccttctgaatggacagttacctcctggaaaacctgagatctttaaatgtcgttctcccaataaggaaacattcacctgctggtggaggcctgggacagatggaggacttcctaccaattattcactgacttaccacagggaaggagagacactcatgcatgaatgtccagactacataaccggtggccccaactcctgccactttggcaagcagtacacctccatgtggaggacatacatcatgatggtcaatgccactaaccagatgggaagcagtttctcggatgaactttatgtggacgtgacttacatagttcagccagaccctcctttggagctggctgtggaagtaaaacagccagaagacagaaaaccctacctgtggattaaatggtctccacctaccctgattgacttaaaaactggttggttcacgctcctgtatgaaattcgattaaaacccgagaaagcagctgagtgggagatccattttgctgggcagcaaacagagtttaagattctcagcctacatccaggacagaaataccttgtccaggttcgctgcaaaccagaccatggatactggagtgcatggagtccagcgaccttcattcagatacctagtgacttcaccatgaatgatacaaccgtgtggatctctgtggctgtcctttctgctgtcatctgtttgattattgtctgggcagtggctttgaagggctatagcatggtgacctgcatctttccgccagttcctgggccaaaaataaaaggatttgatgctcatctgttggagaagggcaagtctgaagaactactgagtgccttgggatgccaagactttcctcccacttctgactatgaggacttgctggtggagtatttagaagtagatgatagtgaggaccagcatctaatgtcagtccattcaaaagaacacccaagtcaagagagagaacagcggcaagcccaagaagcccgggactcctgagaacaataaggagtatgccaaggtgtccggggtcatggataacaacatcctggtgttggtgccagatccacatgctaaaaacgtggcttgctttgaagaatcagccaaagaggccccaccatcacttgaacagaatcaagctgagaaagccctggccaacttcactgcaacatcaagcaagtgcaggctccagctgggtggtttggattacctggatcccgcatgttttacacactcctttcactgatagcttgactaatggaatgattggttaaaatgtgatttttcttcaggtaacactacagagtacgtgaaatgctcaagaatgtagtcagactgacactactaaagctcccagctcctttcatgctccatttttaaccacttgcctctttctccagcagctgattccagaacaaatcattatgtttcctaactgtgatttgtagatttactttttgctgttagttataaaactatgtgttcaatgaaataaaagcacactgcttagtattcttgagggacaatgccaataggtatatcctctggaaaaggctttcatgatttggcatgggacagacggaaatgaaattgtcaaaattgtttaccatagaaagatgacaaaagaaaattttccacataggaaaatgccatgaaaattgcttttgaaaaacaactgcataacctttacactcctcgtccattttattaggattacccaaatataaccatttaaagaaagaatgcattccagaacaaattgtttacataagttcctataccttactgacacattgctgatatgcaagtaagaaataatgcctccaattttttcttaaaatagtttagatatgttaagcatggattttccccctaaattctactctaaagcttctataaaatatagtttggaaataaaaatgttcttacacaaggggcaaatgaatttcatgtgaatccctttaggatgttttcctccttcatttcagcatgatagataatttattatacaccttagtctttccttagttaaaaaaaaattccctaaagactaacttgaaaagaaaaccacagcaggatgctaatggaattactgccttactgtacatacaaattctactttaatataaacccataagtttaactgtatttttgaagactatttttctatgacttaggtaaaataaaagactattttctattttaaaaataca

SEQ ID NO: 71586 - DNA, 2897 bp, Homo sapiens
tagaaaagataaattctttatttgtggaaaacaacagaagtggggctatttaggcaccgccaatgtttattatattcatatggcagagaataaacacagcacactagaagtttgcgctttgggtattaaaaaaaaaaaaaagcaaaaccttcttaggtcactgactatcttcttttgctcctttctatctgactcctcaggcaaggtgcaattcaaatccctggagaacctctcaaatatagctgctgttcaatgttactcagaaataaggaaagaaatttgacacggagacactccacatcttggctgcctggaaaaatatcatctttgaggtcattcaactcactaagtcatttttattattgttttgtctgtctattttctggtacagtctcaatgaaagatatgtggccctaatcatgcaaaaccgatctggggggaatcagttgtttcttcaggtcttcgcaggattccagctcccccaactacctccgtcgccttctaaaactggcaggctctggacgttttgcatgctgaagaaaatcactgttttgcctccagcaaggaacataaatgttgcaacactgactcctcctctcatgaagaaagagtgaacaagtgcaccgagttgagcttcttctcacagagccaccgggctggggaccggggagcggaggctgaaatccccagacgccggttttctgggctgggctttctgccttactcactccttctccctctttctggattttaccgaccgttcgcgaaacagctttccacacaatggagcttcatgtcctcgtgcaggaagtactcatcgactgatgtggcagactttgctccctggcaaaactaaagaactctcctattcatggaggcgaacactgaggatgctttccacatgaaccctgaagtgaacttctgatacatttcctgcagcaagagaaggcagccaacatgaaggaaaatgtggcatctgcaaccgttttcactctgctactttttctcaacacctgccttctgaatggacagttacctcctggaaaacctgagatctttaaatgtcgttctcccaataaggaaacattcacctgctggtggaggcctgggacagatggaggacttcctaccaattattcactgacttaccacagggaaggagagacactcatgcatgaatgtccagactacataaccggtggccccaactcctgccactttggcaagcagtacacctccatgtggaggacatacatcatgatggtcaatgccactaaccagatgggaagcagtttctcggatgaactttatgtggacgtgacttacatagttcagccagaccctcctttggagctggctgtggaagtaaaacagccagaagacagaaaaccctacctgtggattaaatggtctccacctaccctgattgacttaaaaactggttggttcacgctcctgtatgaaattcgattaaaacccgagaaagcagctgagtgggagatccattttgctgggcagcaaacagagtttaagattctcagcctacatccaggacagaaataccttgtccaggttcgctgcaaaccagaccatggatactggagtgcatggagtccagcgaccttcattcagatacctagtgcatggtgacctgcatctttccgccagttcctgggccaaaaataaaaggatttgatgctcatctgttggagaagggcaagtctgaagaactactgagtgccttgggatgccaagactttcctcccacttctgactatgaggacttgctggtggagtatttagaagtagatgatagtgaggaccagcatctaatgtcagtccattcaaaagaacacccaagtcaaggtatgaaacccacatacctggatcctgacactgactcaggccgggggagctgtgacagcccttcccttttgtctgaaaagtgtgaggaaccccaggccaatccctccacattctatgatcctgaggtcattgagaagccagagaatcctgaaacaacccacacctgggacccccactcctttcatgctccatttttaaccacttgcctctttctccagcagctgattccagaacaaatcattatgtttcctaactgtgatttgtagatttactttttgctgttagttataaaactatgtgttcaatgaaataaaagcacactgcttagtattcttgagggacaatgccaataggtatatcctctggaaaaggctttcatgatttggcatgggacagacggaaatgaaattgtcaaaattgtttaccatagaaagatgacaaaagaaaattttccacataggaaaatgccatgaaaattgcttttgaaaaacaactgcataacctttacactcctcgtccattttattaggattacccaaatataaccatttaaagaaagaatgcattccagaacaaattgtttacataagttcctataccttactgacacattgctgatatgcaagtaagaaataatgcctccaattttttcttaaaatagtttagatatgttaagcatggattttccccctaaattctactctaaagcttctataaaatatagtttggaaataaaaatgttcttacacaaggggcaaatgaatttcatgtgaatccctttaggatgttttcctccttcatttcagcatgatagataatttattatacaccttagtctttccttagttaaaaaaaaattccctaaagactaacttgaaaagaaaaccacagcaggatgctaatggaattactgccttactgtacatacaaattctactttaatataaacccataagtttaactgtatttttgaagactatttttctatgacttaggtaaaataaaagactattttctattttaaaaataca

SEQ ID NO: 71587 - DNA, 465 bp, Homo sapiens
ctctgactctactaaaaaaatacaaaaatgtgccaggtgtggtggtatactcttgtaattccagctactcaggaggctgaggtgggaggatcacttgaacccgggaggtcctagaagttgcagtgagccaagatcacgccactgtactccagccttggtgacagagcaagactccatctcaaaaaaaaaaaaaaaaaaaggctgggcgtagtggctcacacttgtaaatgggaggcagaggcaggccgatcacgaggtcaggagttcgagaccagcctggccaacatcgtgaaaccccatctctactaaaaatacaaaaaattatccgggtgtggtggcgggcacctgtaatcccagctactcaggaggctgaggcaggagaatcgcttgaatccgcgaggcagaggttgcagtgacccgagatcaccaccattccattgcactctagctcgggcgggcgtcaaa

SEQ ID NO: 71588 - DNA, 1482 bp, Homo sapiens
gttacataagaacaaaaacctatgaatgtaatatatgtgaaaaaatcttcaaacaacctattcaccttactgaacatatgagaattcatactggtgagaaacctttcagatgtaaggaatgtggaagggcctttagtcaaagtgcatccctcagtacacaccagagaatccatactggtgagaaaccctttgaatgtgaggaatgtgggaaagccttcagacatcgctcatcacttaatcagcatcatagaactcacactggggagaaaccctatgtatgtgataaatgtcagaaagctttcagccagaacattagcttggttcaacatttgaggactcattctggagagaaaccttttacttgcaatgaatgtgggaaaacctttagacagattagacaccttagtgaacatataagaattcataccggggagaagccctatgcatgcactgcatgttgtaaaacctttagtcatagagcgtatctaacacatcaccagagaatccatactggggagagaccctacaaatgtaaagaatgtggaaaagcctttaggcagaggatacaccttagcaaccataaaactgttcatacaggagtgaaagcatatgaatgcaaccgctgtggaaaagcctataggcatgattcatcctttaaaaaacatcagagacatcacactggagaaaaaccttacgaatgtaacgaatgtggaaaagccttcagctataactcttcacttagtcgacatcatgaaatacacaggaggaacgccttccgaaataaggtgtaaaaacagatatttgacttgagaacaaaagccaagtgtaaattggtgatttagagtgctttaaaatttcaggactcagatatgaggaattgatgtaatgatgccaacttttaatttttcccattgtaaataaacattacattgacaggtattgactactaacacctctaaaaagtacttaagattaaaatctggtccttaaaattaaatgaattcagcattatgaaaaattcataacagtttttttctgatttcatggtggattaataaattattcttcatgggtattcatgatttgcagaccagcatttgggaactatagcttaaaatatcaccaaccgtattttttaaattaaaattttatttttttggccaggcatagtggcttgtgcctgtaattgggaggtcaaggaaggaggatcacttgccagaagtcaagaccagcctggacaacatagcaagacccatctctgcaaaaaagtttttaaaaaattagccaggcatggtagcatgcgcctgtagtcctagctgtgcagaaggctgaagcagaaggatcacctgagcccaggagttcaaggttgcaatgagctgtgatcaccactgcatttcagggtctcactctgttgctcaggctggagtgcagttggtatgatcatggttcactgcagcctcaatctcccaggctcaagcaaac

SEQ ID NO: 71589 - DNA, 1787 bp, Homo sapiens
  misc_feature (257)..(257): n is a, c, g, or t
  misc_feature (305)..(305): n is a, c, g, or t
  misc_feature (325)..(325): n is a, c, g, or t
  misc_feature (381)..(381): n is a, c, g, or t
  misc_feature (407)..(407): n is a, c, g, or t
  misc_feature (630)..(630): n is a, c, g, or t
  misc_feature (633)..(633): n is a, c, g, or t
  misc_feature (770)..(771): n is a, c, g, or t
ccacggtgcacttatcaccacctgataccatacatacttatttgtacagtaaatatgtcctccactaaagtgagacaagatgatggtagagatgacatctgttgtattcactgttatctcaccactacctggctcattgtagaaataccagagtgttattgttacaaatgtactgtaagtgcgtacatgtccaaaataacacattccaaggccaggtgtggtggctcatgcctgcaattcccagcactttggaaggncgaggagggtggatcacttgaggtcaggagttcgagaccagcctggcnaacatggagaaaccccatcnctactgaaactacaaaaattagctgggcatggtggagggtgcctgtaattccagcnactcaggacgctgaggcaggagaatngcttaaacccgggaggcagaggttgcagtgagccaagatcgcaccattgcactccagcctaggcgacaagagcaaaactccgtctcaaaacaaacaaaaacaaattaacacattccagatacaagcagcattacaaaaaatcagtgctatgtgggaaaccattagatgggaaggcaaataatatgaatagaaaagtggctttttttttttttctgtaaatcanggntccttgttttttaaagctaccttagaagctgaccagtattctgatgctcaataagttggtgaagaattcactatagttctgtcacagctaataaatctttttttttttttagatagagtcttgccctgtcgccaggnnggagcacagcggcgcaatctcagctcactgcaacctccgcaaagaaaaacaggaaatggtgcactctgctctgatacgtattaacagttgtcgttagcagagtcaccgtgtttcctggaaacaaattctttataggaaactttgttaagaccgtcaaccatctgaataatccttgcatccttaaaatattaacttttattctgcataaggtgaaggactagagacccaaatgaactgctatgttagtgtggaggggacattaggcaaaatgtctcttcccataactttttacataattacatcataattattaaagataatgaactaaacaatttggagtatatccaaggaggcgagaagcaggttaatttcaaaggatttgctactgtgagaaccttatttgcatccttatctaaacaatatgtatataaccatactatatctacctccctcacatttctggcatatggatcaactgtagcttctagaaaacagtaattacatcatcacttaaaagttaaaactttcccaaagactattctctgggcagcttagtgtgcaaacacatgtcactgagaagcaaatgaaggccaggtcccatcaggttagcagaaggcctacagtaagagtaaaagatggtacagcctgaggtagttctagaagcagatacagagtgaataaagaaaatgaaaatacttgccatctgggacagtgaaaaaagctggaactttcagggtataaaatagcaatcatttatgcaaatgtggccaaagtaaatgaaaggttgaaagctatgctgactcaactttatgacctagagaaagtcagttgagttgtgtaactaaatccctaaatctatgaattaaatctaacaagcccactatttccaaattgtgtcttggggcatcccagcaaaacccaggggtgccagggttttctatttgagggaaacacagtgaggctcaatgtgtgtttgacactgagtgaactaccagcttcagataatttgtaacccc

SEQ ID NO: 71590 - DNA, 392 bp, Homo sapiens
cgagctgcctccaggcctgttcccagacctcggtgcccgccagatgctctgcgaattccctccgcccgccccagccttcccgcaccctccgcgctccctgaacgtcccagggaagctctgttcgcttttgttttttttttttttccctttttcgcaaccccttcttggcttcctttatcccttgaattttgtatgtttcctgaaagacacgtgggaggccagtgtctcgtgtggaatctgccagtcagtgcagcgctttcccggagttgagtttactctgcagctcttttgaatgtttgagccctgtctgcctataggtctcgtcaagaccagcccatgtttcttaaaaactgcagtattatgaagagttcctgtgccttgccgcgttttca

SEQ ID NO: 71591 - DNA, 1080 bp, Homo sapiens
gttcaactactgctcccagctggaggacgagaatagctcagctgggctggatattcctgggccaccctgcaccaaggccagtccagagcctgctaagcccaagcccggggctgagccggagccggagcccagcacagcctgcccacagaagcagaggcaccggccggcgagcgtgaggcgagccatgggcacggtgatcattgcaggggtcgtgtgcggcgtcgtctgcatcatgatggtggtggccgctgcctatggctgcatctacgcctccctcatggccaagtaccaccgggagctcaaaaagcgccagcccctgatgggggaccccgagggcgagcacgaggaccagaagcagatctcttctgtggcctgagcgcccatccccacccggccaggtaggaagggcggggagagcacacggcattgctcagccacagctcccaccttgacccggcgctggccactgcctccccgagtccaccctcctccccgccctccagcagacaagccacaccgggttctctccctgcactttcgaggctccctgaaagccaccgtgctgggggctcctgctgatgctcctgtctgggccagtaaatctttggaacatgtgggggggatctccctaagctctggccacagcaaagcaaggaggtgtgtgcaagaggaggcttccggactgggcattcccctgtcgcccttcctgccctggggtggccatagctggtgactcttcctaccttgctggtcccacctcacctgcattgaggggacggggagggagggatctgagggatgaaggtagatttctgagactctctcctaagccagaaagacgttcttaacacccctgcagtgtgaaagctggtccagctctacaactgttggtaccaatgtgcaaacacaccagccctgccatctggacccagcactcagaaacaccatacacccctggccgacgccatcatgcccctggatctgctataggccacactgaccacatgctcctggattcgctaattcactcacacacccattgcatcaccagtgcggtcacatggattgaaagaattaata

SEQ ID NO: 71592 - DNA, 510 bp, Homo sapiens
cgcccagactggagtgcagtggtgtgatcgtggctcactgcaacccctgccttctgggttcaagtgattctcttgcctcatccacccgagtggctgggactaccagcatgcaccaccacgcccagctaatttttgtatttttagtagagatgaggtctcaccatgttggccagggctggtcttgaactcctggcctcaagtgatccgcccgctttggtgtcccaaagtgctgggattacaggtgtgaaccaccacgcccagcccctgctgagctatttgatagttttggtacaccaagagcaaaattctaccagaaatgtacctcttgctgacataattggagctgggtccaatccctaacaatcaactcgtttctcccattcaatcctcttctgttttttctttttttagagataagatcttgctctgttgcccagacttggagtggcacgatcacggctcactgcagccttgaactcctggactcaagcgaacctcccacctcagctt

SEQ ID NO: 71593 - DNA, 547 bp, Homo sapiens
attccatactaaacagatttataataagtaactaatatttattattaatatttgctatgtgcctggcattagattaaatattttaaatcccatatataacttaccacaataattttacaaagtaggtatattaatatatttacactttagatgaggttacagatttaggaagtgtaaattgaccaagtggatttaaagccagatctgcccaacagaagggcttgtttattcactatagcacatcactttgctttttatatcacttatttatcagtgaattcaaatcctaccaactccatgaaatctttcttccttccccacagtaatctttttctttataaacaattcagtgattttagtatattcacagagttatgcatgctttaccacattcgattttagagtattttcacagccccaaaaagaaaccccataccctttggccccaacttctccctcctctccccagccctaggcaaccagtaatccactttccgtctgtatgcatttgtctatcttgaacatttcatataaatggaatcatgca

SEQ ID NO: 71594 - DNA, 328 bp, Homo sapiens
gtatttcagaaaatataagcttttaaagtatttattttgaagacaaacattacaaataaaagagggttgtaatacctttatttgtatcacagatcttattgtacacattttgtactagagaaaaccctgaagcagttacttaaactttgttcaacatcagggaattcagattggagaaaaaccctgcaaatgtaataaatttgaaaaaaaagttttccaaaactacaacttagacaacaccagagggttcatactgagatatatttttgcagatgcagtatatatttaaaacatttaatccaaaataaaaatgtaaatatcagagaat

SEQ ID NO: 71595 - DNA, 838 bp, Homo sapiens
gaaattgagttcctaagctgtagagccttagaaccctggcatacatttctgtggagaaacagaaagcccagacatcccagtccacacacgtctttcttctgaccaacaccagccataggaagcaaggcccgggagagcactggggacagggcatgtccgcccggagcagggcaggagagcacaggcatgtgatgcagccctgggtctgtcgtcccgtttgcgccgggaatgaatcgggtttttctagcctctaagcacagaggtatttttgactcagcaccgtgaagagacgacaatagctcagcttctgccagctgcccgatttagacacgagaccttcactacatatttctgtctcttgccctactcagaagaaggacttaaaaatcccccaagacggaactgagttttcctctgttcatttttttaaattacactacttgaagaaccccaaacaaataaggctctgggcctccaagaccatgtaatccattgtgctcgtgtggaagagctgcccccagtagaggcaacaggaatggcctggtcactcagcaggtcccctgcccatcttcccaccaccccttgccccacccaccgggaaggaggagggagcacaggctgctttgagcagtcatcgtgcctctacctggagcctgtactcactgtcttgggggccggtatttcccaggagggctattgtgtgtttccttgtctgtttctctttctggaatgcgagctgtttcaaaatgaactgaagatcattcacctccacccctcagctctcagcatagaggtgtgcacagagtacatgctcagtaaatgtttaacagatataaaa

SEQ ID NO: 71596 - DNA, 163 bp, Homo sapiens
gcatctattcctagcaactggagtttttgagaaacaaggaggacactaatgtgactggaatgggttgaacaagggaaagacaagtactgagagctaatgggggatcagatgatacagtgtctggtaggtcacggtaagactcactaaagatttttatcctcat

SEQ ID NO: 71597 - DNA, 376 bp, Homo sapiens
tgttcttggattctttatttgtatcccaccaacttccaaaatgatgacttgcagcaggttacaacaaaagacacacaaacaatagaaatattcagacaagggtaaaaggtcaagagaccgggtatttgagctatccatttagcacattatttttccagctgggaaatctactgcaaaactgaactaagatcagaaaggtgcttcataaatatatagtttaattctagcaatatatttgaagtgcttagatagcaaacctctctgtatttcactataatggcccagcttaatttgtcatctttttttccctccttttaaagcattgctgagactttaagatactcattgtgaattaatttgggatttggcataataa

SEQ ID NO: 71598 - DNA, 818 bp, Homo sapiens
tgaatattcacaaagtgtgcaactattaccactatttaaatctaaaatacttcatcaccctcacgtcccattcccattagcacttactccctattcccctctccccccagtttctggcgtcctattttctgtctttatggatttgcctattcaggacattttgtataattggaatcatacaatatttggcttttgtgtctggtgtctttcacttagcataatgttttcaaggttcatccataatgtagcatgtatcagaagttcatttctttttatggctgaacaagattccattgtgtgattagattgcattttctttatccgtctgttgatggacgtttggggttgttccactttttggccattgtgaagaatgattctttgaacattgatgtaaaagatttcatgtggatatgtattttcatttctgttggctgtataccttgcagtagaattgctgggttgtacctttaactttctgagtaactgctcaaacacagtaaacacacagttttccagttttgcagcactattttatgttcttaccagcaacctgggaagaatttccactttctccacatcctcgccaacaattgtcattgtctatctttttcattatagtcaccatagtggggtgtaaagtgggtatctcattgtgggtattgatttggctttaccttgatgagtaatgggtattgaacatctttttcatgtgcttattagcccttaaataccttgcttggagaaatgtctattcaaataaatcttttgcccattttctaaaggagttaattgcctatttattgttgagttttaag

SEQ ID NO: 71599 - DNA, 548 bp, Homo sapiens
ccaaatgctgcttggaggcccgaggtactgtcctggccttcagggaacctgagctttgggtaggttatgctgaagagcctgtaggccatatgcacagttggcttatttagaaactgtagacatttgtctgtgtgaagattatctgctgtcaacactgcttttgaggccattatcacgttcagctagaagacttgcttctctccaagagtttgagcaggttgggcacagtgatttacacctgtaatcccagtgctttgggaggctgaggtaggaggatcacttgagaccaggagttcgagaccagcctgggcaacacggtgaaactcagctctacaaaaaataaaaaaaaatcagccaggcgtggtggtacatgcctgtagtcccagctgcaggggaggctgaggcaggaggattgcttgagccaaggctaccatgaggtagggtcacatcattgcattctagcctgggcaatagagtgacaccctgtgtcataaagaaaagagtctgggtgccaggaaagacctgtccattggtctagagtgattttg

SEQ ID NO: 71600 - DNA, 169 bp, Homo sapiens
aatcagacacacatcttctaacctgaagtgcttttaacagagcatggctgcatgttggaatcatccacaccattaagaggagaattctggaaaggcaatatgttacattttgcttaaagtctgtccaacaacttcagtctttcaaggaccaccgtcaaggtttttgcaa

SEQ ID NO: 71601 - DNA, 1252 bp, Homo sapiens
  misc_feature (1164)..(1164): n is a, c, g, or t
  misc_feature (1241)..(1241): n is a, c, g, or t
ggggaacgctcgcgcggttgccagagaaagccccggacgtgacggatttgcgcgaccccaagcagcccgcccttccccctcccatccgtcattcccctgcgctctctttcctcacccttccccccgccaccgtgggttccagacttgggataagtaaacagcgggtggagcgaggcctacggacccaggccaggtgggagtctgcactcttcaaggggcctgggctgctgctcacgggtattaaagaactccgcgttgttcatggctgaggcgatgcattaggaagatcctggacctagagaacaagtcccccgaacgctgagttggaggcgggacttcgggtgcgcgttggcgggagcatgctggggctctgggggcagcggctccccgcggcgtgggtcctgcttctgttgcctttcctgccgctgctgctgcttgcagcccccgcgccccaccgcgcgtcctacaagccggtcatcgtggtgcatgggctcttcgacagctcgtacagcttccgccacctgctggaatacatcaatgagacacaccccgggactgtggtgacagtgctcgatctcttcgatgggagagagagcttgcggacccctgtgggaacaggtgcaagggttccgagaggctgtggtccccatcatggcaaaggcccctcaaggggtgcatctcatctgctactcgcaggggggccttgtgtgccgggctctgctttctgtcatggatgatcacaacgtggattctttcatctccctctcctctccacagatgggacagtatggagacacggactacttgaagtggctgttccccacctccatgcggtctaacctctatcggatctgctatagcccctggggccaggaattctccatctgcaactactggcatgatccccaccacgatgacttgtacctcaatgccagcagcttcctggccctgatcaatggggaaagagaccatcccaatgccacagtatggcggaagaactttctgcgtgtgggccacctggtgctgattgggggccctgatgatggtgttattactccctggcagtccagcttctttggtttctatgatgcaaatgagaccgtcctggagatggaggagcaactggtttatctgcgggattcttttgggttgaagactctattngcccgggggcattaagttgaggtgttccaatgggccggtattttcccacaacagcctgggcactccaaccgttaccntttatggagta

SEQ ID NO: 71602 - DNA, 257 bp, Homo sapiens
  misc_feature (217)..(217): n is a, c, g, or t
ctcgacgaacgaacgactgagaatgcccagtggtgcagctcttctctcctgtgaactaacagccagattgtttgtaatttcccgtgctatttaaaacagggttctcatgtatcagccatcttctgtaagggtgcccagtgtgacttcggttgatcctgctgctattccgccttcattaaaaaacaaaagaaacaaaaacactccacatacctggcanatctgatgacatgcttgatattggcggtcgacgcggccgc

SEQ ID NO: 71603 - DNA, 1392 bp, Homo sapiens
  misc_feature (1392)..(1392): n is a, c, g, or t
agaactctttgcagtcaaacctacccaacccatccaggagctgctacacattgaggaaggggcagaatgaatgctgggaagcaactacaaagaacactgcacaatatggtttctagttttagggtttctgaactacaagtattactaggctttgctggacggaataaaagtggacgcaagcatgacctcctgatgagggcgctgcatttattgaagagcggctgcagccctgcggttcagattaaaatccgagaattgtatagacgccgatatccacgaactcttgaaggactttctgatttatccacaatcaaatcatcggttttcagtttggatggtggctcatcacctgtagaacctgacttggccgtggctggaatccactcgttgccttccacttcagttacacctcactcaccatcctctcctgttggttctgtgctgcttcaagatactaagcccacatttgagatgcagcagccatctcccccaattcctcctgtccatcctgatgtgcagttaaaaaatctgcccttttatgatgtccttgatgttctcatcaagcccacgagtttagttcaaagcagtattcagcgatttcaagagaagttttttatttttgctttgacacctcaacaagttagagagatatgcatatccagggattttttgccaggtggtaggagagattatacagtccaagttcagttgagactttgcctggcagagacaagttgccctcaagaagataactatccaaatagtctatgtataaaagtaaatgggaagctatttcctttgcctggctatgcaccaccgcctaaaaatgggattgaacagaagcgccctggacgccccttgaatattacatctttagttaggttatcttcagctgtgccaaaccaaatttccatttcttgggcatcagaaattgggaagaattactctatgtctgtatatcttgtacggcagcttacatcagccatgttattacagagattaaaaatgaaaggtattagaaaccctgatcattccagagcactaattaaagaaaaacttactgcagatcctgatagtgaaattgctacaactagccttcgggtatccttgatgtgccctttaggaaaaatgaggctgacaatcccatgccgtgcagtgacttgtacacatctgcagtgttttgatgctgccctctatctacaaatgaatgagaaaaagcccacctggatttgtcctgtgtgtgacaaaaaagctgcctatgaaagtctaatattagatgggtaagtatatcccttttaacagctgatatggactaatacaacagctgttggcaatgcctttgttcactacaacttactgaactaaattctaaataaattctactctagcatn

SEQ ID NO: 71604 - DNA, 790 bp, Homo sapiens
tcttttttgtgttctgttaaatggagctaaataacgcctatattacaggatcattttcaggttttaatgagatgaaagaaagcctcggtgtcaggcatgtggtaatttcccaataaaaattgattcctttcccttttcaccctctccagggcaaaatataggtgggtaggatggcattctacctgaattttagcgtggattctctgtaagttatctggcagaaggcattactgacctgcattaaaaatcaggtttgggtatttaacaatagttgctttttcagagaggttttgaaccataaaaggagataacaggagagttctcctggctgtctacgaacacattctttcaaacttgggtttgctagtgtcatctttttggcctcttggtccacttggttttctaatggctttactgagttataatttacatagcataaaatgtacccatcttaagtatataatggcacaattcagtgattttagtaaatacatagagctgtgcaatcatcaccatgattcagtagtagaatattttcaacacccaaaaaactttcttcatgttcttttgtagtttattcctatttacaccccaaatctaggcaatcgtttttttgtgtctataatgcctgtttagacattttatataaaatgtcttgttttgcaacattgtttatttttataattttaagaattaaaccttttcagctgccttctttgctgttaaaatacttacatttccaaatataatttacacatatattaaaggcatatatttacttctacccatt

SEQ ID NO: 71605 - DNA, 476 bp, Homo sapiens
tactactactaaattcgcggccgcgtcgatatagtatttctttctaataaagttttatgttgctgctctaaatacagatgcaatatttattgactctgtaatcagatagaaaaaacttaacttggtttgtgtggtatgacttataaagaaatgatgtatatttgttattttgttaccctttagattgtcagagactcccccaatttaatcaacaaagttttataaagtaaatgaaaatattaatagaaattagtttatttacttggttcttataactgatatctctgtgcttttataattgtgatttgtttttttgttttttttcaagatgataaacttcaaagtgtattttttaaaatgcaagttgcctgtatgaaataaattaaaaatttatatgtaatttcagtgtaaaacaccaaaaccgaacattaaaactgttcacagaaaatagaaaaaaagtcgacgcggccgcgaat

SEQ ID NO: 71606 - DNA, 4048 bp, Homo sapiens
agcggggcggaggcggagctcccgcgccgttcacgtgacgggcccggctgtagcggcggcggccgcggcgtcttaagcggcgcccagtgcaggatggtgctggaggcggcggcggccgtggtggcggcagcgtcgttggcggcagcgggagtgggtgcggcggcagcggcggcggcgcccgcgggtggtataaaatggcggatttcgaagagttgaggaatatggtttctagttttagggtttctgaactacaagtattactaggctttgctggacggaataaaagtggacgcaagcatgacctcctgatgagggcgctgcatttattgaagagcggctgcagccctgcggttcagattaaaatccgagaattgtatagacgccgatatccacgaactcttgaaggactttctgatttatccacaatcaaatcatcggttttcagtttggatggtggctcatcacctgtagaacctgacttggccgtggctggaatccactcgttgccttccacttcagttacacctcactcaccatcctctcctgttggttctgtgctgcttcaagatactaagcccacatttgagatgcagcagccatctcccccaattcctcctgtccatcctgatgtgcagttaaaaaatctgcccttttatgatgtccttgatgttctcatcaagcccacgagtttagttcaaagcagtattcagcgatttcaagagaagttttttatttttgctttgacacctcaacaagttagagagatatgcatatccagggattttttgccaggtggtaggagagattatacagtccaagttcagttgagactttgcctggcagagacaagttgccctcaagaagataactatccaaatagtctatgtataaaagtaaatgggaagctatttcctttgcctggctatgcaccaccgcctaaaaatgggattgaacagaagcgccctggacgccccttgaatattacatctttagttaggttatcttcagctgtgccaaaccaaatttccatttcttgggcatcagaaattgggaagaattactctatgtctgtatatcttgtacggcagcttacatcagccatgttattacagagattaaaaatgaaaggtattagaaaccctgatcattccagagcactaattaaagaaaaacttactgcagatcctgatagtgaaattgctacaactagccttcgggtatccttgatgtgccctttaggaaaaatgaggctgacaatcccatgccgtgcagtgacttgtacacatctgcagtgttttgatgctgccctctatctacaaatgaatgagaaaaagcccacctggatttgtcctgtgtgtgacaaaaaagctgcctatgaaagtctaatattagatgggctttttatggaaattctcaatgactgttctgatgtagatgagatcaaattccaagaagatggttcttggtgtccaatgagaccgaagaaagaagctatgaaagtatccagccaaccgtgtacaaaaatagaaagttcaagcgtcctcagtaagccttgttcagtgactgtagccagtgaggcaagcaagaagaaagtagatgttattgatcttacaatagaaagctcttctgacgaagaggaagaccctcctgccaaaaggaaatgcatctttatgtcagaaacacaaagcagcccaaccaaaggggttctcatgtatcagccatcttctgtaagggtgcccagtgtgacttcggttgatcctgctgctattccgccttcattaacagactactcagtaccattccaccatacgccaatatcaagcatgtcatcagatttgccaggtttggattttctttcccttattccagttgatccccagcagtactgtcctcctatgtttttggatagtctcacctcacccttaacagcaagcagtacgtctgtcaccaccaccagctcccatgaaagcagtactcatgttagttcatccagcagcaggagtgagacaggggtcataaccagcagtggaagtaacattcctgacatcatctcattggactaaaggaggactcacttgattctgggaatcattcatcagaactgctttttcttggatctctagtctgtggaaacgttcttttttttttttttttaataatttggtatttattgaaagtcagatggattcttttgctttctgaggggtgaacacagaagactgcaacaagaaccaaatgacatgcaaggatttttcttaattatgctgtactctcagcatcagatacattcaaccataactgtatcttcctgagagatggatttcactttcatacgttaatggatggagtctacaaatcagtgaaaaaagtttttgttaaaataaagagcaataaaattatgtaaatattcaagtaaccttttttctaattaaaaaaaaaattgtaatcactgattctagaatgacagcaacttctgtttaaccttacgtgaaggaaaaaaaatatatggaaagaacttaatgtttgctgaatgagtcctttccatggagatttgctctgtttcattgaagtaatgaagtttcagtacgtggccaaagcttggattccacttttcgtcctgcatttccacttttcttcgtgattgcatcaaagaaaaatggcattcgtgttacttggtttttttcctgcttatcatttacactttgacgttgtttgctaatgagtgctgtgtgaagttctgggatttggctactcttcattggtgattatgtttaaaagcactatgcagattctgccctgacataaagtgtgttattatgtttttagtaattgtacatttttcattctagagttttctataaatttgaggcttgccttctcaaaaaagaaactatgcagccattgaatgaaatgtctttggggtacggtgtgactggaatgtttgttagaaatttgttcacactatcaaatattgatatcttggagccagcagaagagcagattttgggaggtggtaataacaaaatttaatttcttcccaacaacttaattttctcatttattttacagaatagtagtgaaatatttgatgaaactttgtattttggtagcactacatagaaaatgtgttttagatttatgatgatcatatttctcaccaatgtaatttcagtctcagcagtgattttcaaacttagggaaagggacagcattagatttttttttttttcatttttttaaaatgatatcttacctgaaactacaaacgacaaaagagaattagaaatgtttgaattaaagtgaagaagggttgggggagatgggcctgaacccacttcctgtctcaatccatgctaccccaaacactccagggaacctctgaggttttattgggtgcactttgaaaatttctcttctatagtgtgtttgtttgattttaaatcacagagaaaactgggttttactcttagagaaacattttcatccagttttttagtttgcttcatttgacttcctaaatcatttttgagttcacaaggatttggtacttttctgtttagctttctctctctaagctttatctaccttaaaaacaaagtcctttttttaatggccagtccaaccaattgatttctcaaactgaagtgcccaggtgtggactcatcaatttccgttagaatagggacatcctacttaagagttggtgcagctccaaggagctgacttgtccttgcttggggttttttttttttttcacccttctcaagtttccatggcctttgtgtgttctttttatgttgatttaaattcatatggttttccacaaatcccttctttggctacattgtctccttattcaatggattatccctttgtgggggctgcttattttaaagatgttgggggggaaacaaacccaaatctacgagcagtagttgcacatagttgccagttttaccttcttagtcattagatttccaaaccatgttgcagttttttggtccagatatagtatttctttctaataaagttttatgttgctgctcta

SEQ ID NO: 71607 - DNA, 1896 bp, Homo sapiens
agcggggcggaggcggagctcccgcgccgttcacgtgacgggcccggctgtagcggcggcggccgcggcgtcttaagcggcgcccagtgcaggatggtgctggaggcggcggcggccgtggtggcggcagcgtcgttggcggcagcgggagtgggtgcggcggcagcggcggcggcgcccgcgggtggtataaaatggcggatttcgaagagttgaggaatatggtttctagttttagggtttctgaactacaagtattactaggctttgctggacggaataaaagtggacgcaagcatgacctcctgatgagggcgctgcatttattgaagagcggctgcagccctgcggttcagattaaaatccgagaattgtatagacgccgatatccacgaactcttgaaggactttctgatttatccacaatcaaatcatcggttttcagtttggatggtggctcatcacctgtagaacctgacttggccgtggctggaatccactcgttgccttccacttcagttacacctcactcaccatcctctcctgttggttctgtgctgcttcaagatactaagcccacatttgagatgcagcagccatctcccccaattcctcctgtccatcctgatgtgcagttaaaaaatctgcccttttatgatgtccttgatgttctcatcaagcccacgagtttagttcaaagcagtattcagcgatttcaagagaagttttttatttttgctttgacacctcaacaagttagagagatatgcatatccagggattttttgccaggtggtaggagagattatacagtccaagttcagttgagactttgcctggcagagacaagttgccctcaagaagataactatccaaatagtctatgtataaaagtaaatgggaagctatttcctttgcctggctatgcaccaccgcctaaaaatgggattgaacagaagcgccctggacgccccttgaatattacatctttagttaggttatcttcagctgtgccaaaccaaatttccatttcttgggcatcagaaattgggaagaattactctatgtctgtatatcttgtacggcagcttacatcagccatgttattacagagattaaaaatgaaaggtattagaaaccctgatcattccagagcactaattaaagaaaaacttactgcagatcctgatagtgaaattgctacaactagccttcgggtatccttgatgtgccctttaggaaaaatgaggctgacaatcccatgccgtgcagtgacttgtacacatctgcagtgttttgatgctgccctctatctacaaatgaatgagaaaaagcccacctggatttgtcctgtgtgtgacaaaaaagctgcctatgaaagtctaatattagatgggctttttatggaaattctcaatgactgttctgatgtagatgagatcaaattccaagaagatggttcttggtgtccaatgagaccgaagaaagaagctatgaaagtatccagccaaccgtgtacaaaaatagaaagttcaagcgtcctcagtaagccttgttcagtgactgtagccagtgaggcaagcaagaagaaagtagatgttattgatcttacaatagaaagctcttctgacgaagaggaagaccctcctgccaaaaggaaatgcatctttatgtcagaaacacaaagcagcccaaccaaaggggttctcatgtatcagccatcttctgtaagggtgcccagtgtgacttcggttgatcctgctgctattccgccttcattaacagactactcagtaccattccaccatacgccaatatcaagcatgtcatcagatttgccagagaacaaagtataaatgattttattgacttgagctttgtacttttctgtctggg

SEQ ID NO: 71608 - DNA, 2080 bp, Homo sapiens
agcggggcggaggcggagctcccgcgccgttcacgtgacgggcccggctgtagcggcggcggccgcggcgtcttaagcggcgcccagtgcaggatggtgctggaggcggcggcggccgtggtggcggcagcgtcgttggcggcagcgggagtgggtgcggcggcagcggcggcggcgcccgcgggtggtataaaatggcggatttcgaagagttgaggaatatggtttctagttttagggtttctgaactacaagtattactaggctttgctggacggaataaaagtggacgcaagcatgacctcctgatgagggcgctgcatttattgaagagcggctgcagccctgcggttcagattaaaatccgagaattgtatagacgccgatatccacgaactcttgaaggactttctgatttatccacaatcaaatcatcggttttcagtttggatggtggctcatcacctgtagaacctgacttggccgtggctggaatccactcgttgccttccacttcagttacacctcactcaccatcctctcctgttggttctgtgctgcttcaagatactaagcccacatttgagatgcagcagccatctcccccaattcctcctgtccatcctgatgtgcagttaaaaaatctgcccttttatgatgtccttgatgttctcatcaagcccacgagtttagttcaaagcagtattcagcgatttcaagagaagttttttatttttgctttgacacctcaacaagttagagagatatgcatatccagggattttttgccaggtggtaggagagattatacagtccaagttcagttgagactttgcctggcagagacaagttgccctcaagaagataactatccaaatagtctatgtataaaagtaaatgggaagctatttcctttgcctggctatgcaccaccgcctaaaaatgggattgaacagaagcgccctggacgccccttgaatattacatctttagttaggttatcttcagctgtgccaaaccaaatttccatttcttgggcatcagaaattgggaagaattactctatgtctgtatatcttgtacggcagcttacatcagccatgttattacagagattaaaaatgaaaggtattagaaaccctgatcattccagagcactaattaaagaaaaacttactgcagatcctgatagtgaaattgctacaactagccttcgggtatccttgatgtgccctttaggaaaaatgaggctgacaatcccatgccgtgcagtgacttgtacacatctgcagtgttttgatgctgccctctatctacaaatgaatgagaaaaagcccacctggatttgtcctgtgtgtgacaaaaaagctgcctatgaaagtctaatattagatgggctttttatggaaattctcaatgactgttctgatgtagatgagatcaaattccaagaagatggttcttggtgtccaatgagaccgaagaaagaagctatgaaagtatccagccaaccgtgtacaaaaatagaaagttcaagcgtcctcagtaagccttgttcagtgactgtagccagtgaggcaagcaagaagaaagtagatgttattgatcttacaatagaaagctcttctgacgaagaggaagaccctcctgccaaaaggaaatgcatctttatgtcagaaacacaaagcagcccaaccaaaggggttctcatgtatcagccatcttctgtaagggtgcccagtgtgacttcggttgatcctgctgctattccgccttcattaacagactactcagtaccattccaccatacgccaatatcaagcatgtcatcagatttgccaggagaacaaagaagaaatgatattaataatgaactgaagcttggaacatcttctgatactgtgcaacagtgaatacaaaataaaacaaataatttgtatttatggagtggaaaacagcttatttcaaggaaaaatatgactgccttattattgctagtgccatattgtcaggtgcgaatggtgctcaaaagttgtatcattaaaatttgaaagtgctaaacatttacatatttaatcat

SEQ ID NO: 71609 - DNA, 3424 bp, Homo sapiens
ctctgagagctccaggaatttggcacgagcagacattgggaagaattactctatgtctgtatatcttgtacggcagcttacatcagccatgttattacagagattaaaaatgaaaggtattagaaaccctgatcattccagagcactaattaaagaaaaacttactgcagatcctgatagtgaaattgctacaactagccttcgggtatccttgatgtgccctttaggaaaaatgaggctgacaatcccatgccgtgcagtgacttgtacacatctgcagtgttttgatgctgccctctatctacaaatgaatgagaaaaagcccacctggatttgtcctgtgtgtgacaaaaaagctgcctatgaaagtctaatattagatgggctttttatggaaattctcaatgactgttctgatgtagatgagatcaaattccaagaagatggttcttggtgtccaatgagaccgaagaaagaagctatgaaagtatccagccaaccgtgtacaaaaatagaaagttcaagcgtcctcagtaagccttgttcagtgactgtagccagtgaggcaagcaagaagaaagtagatgttattgatcttacaatagaaagctcttctgacgaagaggaagaccctcctgccaaaaggaaatgcatctttatgtcagaaacacaaagcagcccaaccaaaggggttctcatgtatcagccatcttctgtaagggtgcccagtgtgacttcggttgatcctgctgctattccgccttcattaacagactactcagtaccattccaccatacgccaatatcaagcatgtcatcagatttgccaggtttggattttctttcccttattccagttgatccccagcagtactgtcctcctatgtttttggatagtctcacctcacccttaacagcaagcagtacgtctgtcaccaccaccagctcccatgaaagcagtactcatgttagttcatccagcagcaggagtgagacaggggtcataaccagcagtggaagtaacattcctgacatcatctcattggactaaaggaggactcacttgattctgggaatcattcatcagaactgctttttcttggatctctagtctgtggaaacgttcttttttttttttttttaataatttggtatttattgaaagtcagatggattcttttgctttctgaggggtgaacacagaagactgcaacaagaaccaaatgacatgcaaggatttttcttaattatgctgtactctcagcatcagatacattcaaccataactgtatcttcctgagagatggatttcactttcatacgttaatggatggagtctacaaatcagtgaaaaaagtttttgttaaaataaagagcaataaaattatgtaaatattcaagtaaccttttttctaattaaaaaaaaaattgtaatcactgattctagaatgacagcaacttctgtttaaccttacgtgaaggaaaaaaaatatatggaaagaacttaatgtttgctgaatgagtcctttccatggagatttgctctgtttcattgaagtaatgaagtttcagtacgtggccaaagcttggattccacttttcgtcctgcatttccacttttcttcgtgattgcatcaaagaaaaatggcattcgtgttacttggtttttttcctgcttatcatttacactttgacgttgtttgctaatgagtgctgtgtgaagttctgggatttggctactcttcattggtgattatgtttaaaagcactatgcagattctgccctgacataaagtgtgttattatgtttttagtaattgtacatttttcattctagagttttctataaatttgaggcttgccttctcaaaaaagaaactatgcagccattgaatgaaatgtctttggggtacggtgtgactggaatgtttgttagaaatttgttcacactatcaaatattgatatcttggagccagcagaagagcagattttgggaggtggtaataacaaaatttaatttcttcccaacaacttaattttctcatttattttacagaatagtagtgaaatatttgatgaaactttgtattttggtagcactacatagaaaatgtgttttagatttatgatgatcatatttctcaccaatgtaatttcagtctcagcagtgattttcaaacttagggaaagggacagcattagatttttttttttttcatttttttaaaatgatatcttacctgaaactacaaacgacaaaagagaattagaaatgtttgaattaaagtgaagaagggttgggggagatgggcctgaacccacttcctgtctcaatccatgctaccccaaacactccagggaacctctgaggttttattgggtgcactttgaaaatttctcttctatagtgtgtttgtttgattttaaatcacagagaaaactgggttttactcttagagaaacattttcatccagttttttagtttgcttcatttgacttcctaaatcatttttgagttcacaaggatttggtacttttctgtttagctttctctctctaagctttatctaccttaaaaacaaagtcctttttttaatggccagtccaaccaattgatttctcaaactgaagtgcccaggtgtggactcatcaatttccgttagaatagggacatcctacttaagagttggtgcagctccaaggagctgacttgtccttgcttggggttttttttttttttcacccttctcaagtttccatggcctttgtgtgttctttttatgttgatttaaattcatatggttttccacaaatcccttctttggctacattgtctccttattcaatggattatccctttgtgggggctgcttattttaaagatgttgggggggaaacaaacccaaatctacgagcagtagttgcacatagttgccagttttaccttcttagtcattagatttccaaaccatgttgcagttttttggtccagatatagtatttctttctaataaagttttatgttgctgctctaaatacagatgcaatatttattgactctgtaatcagatagaaaaaacttaacttggtttgtgtggtatgacttataaagaaatgatgtatatttgttattttgttaccctttagattgtcagagactcccccaatttaatcaacaaagttttataaagtaaatgaaaatattaatagaaattagtttatttacttggttcttataactgatatctctgtgcttttataattgtgatttgtttttttgtttttttttctattttctgtgaacagttttaatgttcggttttggtgttttacactgaaattacatataaatttttaatttatttcatacaggcaacttgcattttaaaaaatacactttgaagtttatcatcttgaaattg

SEQ ID NO: 71610 - DNA, 3561 bp, Homo sapiens
aaattcatactggttagtagatattttaaatgtacccactgatattctctattttgcataaaagcataatgtcagactttctctgtgtggtggttatattcggggtgtctctgaatgccagcataaaaattcacggaattgaatagaaattggcctgtcttaatgacctatggtttcttttttaatgttttgaaataattaaagagagtttagtcacacagggaggtctaggtgaactgatgttgaagtttattactagacttttcagacctaaaaattttatttattgttattacttgaatatgtcaaaagtatattactggacaaccttttacacattcctctttctaaaatcgaattggacaattacagttctctggttcagaaaattacattagctcagaacccagtaacccttgataaccctgttagcgcagcaattcccgagtgtgtgctttgtgcagagcgttggactatgtactgctcttgatgtggggacagcggggacagagagctgtcattgaaatagacatctgtttaagaagcgatacttagatgaacctctgtatttctgaaaaataaatgtgaaatatcttaagagcttaagtatgtttttttttttagatggttcaaatccagatcattagctcatcatttttattgcttctcattctgttaagcggcaaagggggaaatatttgttttgactagtccttcactggaaagttttggacttctgcatttgagtctctgggagctagtttttccagttgttttatcagagaatatattcatctttgggttttaaacacttcaaatatcactgatcatggtatagaacttctctgtgacagagtggtaagcacttaccacaaatgttttgtgatttgtgataaagatgatttagggaaataattctggtctcccaaaatatgagacaactattaacaaagcatttttgttttaggtttggattttctttcccttattccagttgatccccagcagtactgtcctcctatgtttttggatagtctcacctcacccttaacagcaagcagtacgtctgtcaccaccaccagctcccatgaaagcagtactcatgttagttcatccagcagcaggagtgagacaggggtcataaccagcagtggaagtaacattcctgacatcatctcattggactaaaggaggactcacttgattctgggaatcattcatcagaactgctttttcttggatctctagtctgtggaaacgttcttttttttttttttttaataatttggtatttattgaaagtcagatggattcttttgctttctgaggggtgaacacagaagactgcaacaagaaccaaatgacatgcaaggatttttcttaattatgctgtactctcagcatcagatacattcaaccataactgtatcttcctgagagatggatttcactttcatacgttaatggatggagtctacaaatcagtgaaaaaagtttttgttaaaataaagagcaataaaattatgtaaatattcaagtaaccttttttctaattaaaaaaaaaattgtaatcactgattctagaatgacagcaacttctgtttaaccttacgtgaaggaaaaaaaatatatggaaagaacttaatgtttgctgaatgagtcctttccatggagatttgctctgtttcattgaagtaatgaagtttcagtacgtggccaaagcttggattccacttttcgtcctgcatttccacttttcttcgtgattgcatcaaagaaaaatggcattcgtgttacttggtttttttcctgcttatcatttacactttgacgttgtttgctaatgagtgctgtgtgaagttctgggatttggctactcttcattggtgattatgtttaaaagcactatgcagattctgccctgacataaagtgtgttattatgtttttagtaattgtacatttttcattctagagttttctataaatttgaggcttgccttctcaaaaaagaaactatgcagccattgaatgaaatgtctttggggtacggtgtgactggaatgtttgttagaaatttgttcacactatcaaatattgatatcttggagccagcagaagagcagattttgggaggtggtaataacaaaatttaatttcttcccaacaacttaattttctcatttattttacagaatagtagtgaaatatttgatgaaactttgtattttggtagcactacatagaaaatgtgttttagatttatgatgatcatatttctcaccaatgtaatttcagtctcagcagtgattttcaaacttagggaaagggacagcattagatttttttttttttcatttttttaaaatgatatcttacctgaaactacaaacgacaaaagagaattagaaatgtttgaattaaagtgaagaagggttgggggagatgggcctgaacccacttcctgtctcaatccatgctaccccaaacactccagggaacctctgaggttttattgggtgcactttgaaaatttctcttctatagtgtgtttgtttgattttaaatcacagagaaaactgggttttactcttagagaaacattttcatccagttttttagtttgcttcatttgacttcctaaatcatttttgagttcacaaggatttggtacttttctgtttagctttctctctctaagctttatctaccttaaaaacaaagtcctttttttaatggccagtccaaccaattgatttctcaaactgaagtgcccaggtgtggactcatcaatttccgttagaatagggacatcctacttaagagttggtgcagctccaaggagctgacttgtccttgcttggggttttttttttttttcacccttctcaagtttccatggcctttgtgtgttctttttatgttgatttaaattcatatggttttccacaaatcccttctttggctacattgtctccttattcaatggattatccctttgtgggggctgcttattttaaagatgttgggggggaaacaaacccaaatctacgagcagtagttgcacatagttgccagttttaccttcttagtcattagatttccaaaccatgttgcagttttttggtccagatatagtatttctttctaataaagttttatgttgctgctctaaatacagatgcaatatttattgactctgtaatcagatagaaaaaacttaacttggtttgtgtggtatgacttataaagaaatgatgtatatttgttattttgttaccctttagattgtcagagactcccccaatttaatcaacaaagttttataaagtaaatgaaaatattaatagaaattagtttatttacttggttcttataactgatatctctgtgcttttataattgtgatttgtttttttgtttttttttctattttctgtgaacagttttaatgttcggttttggtgttttacactgaaattacatataaatttttaatttatttcatacaggcaacttgcattttaaaaaatacactttgaagtttatcatcttgaaattg

SEQ ID NO: 71611 - DNA, 2913 bp, Homo sapiens
  misc_feature (197)..(197): n is a, c, g, or t
ttgattttgactggtttttcctctgagtgacaaaagagaaagccttggttcaagtagtctggcactggaaattttgggactgctgcttttgagttgttgtgttgggaagcacttttttctagttgttttggtcaaaaaaaatgtatttgggttttagatgcattcaatataaccagctatgatcatagaacttcacntgtggcagtgaaatgaacattaccacagatgtctcttggcttataaatacagaatgatttagggaaataattctggtctcccaaaatatgagacaactattaacaaagcatttttgttttaggtttggattttctttcccttattccagttgatccccagcagtactgtcctcctatgtttttggatagtctcacctcacccttaacagcaagcagtacgtctgtcaccaccaccagctcccatgaaagcagtactcatgttagttcatccagcagcaggagtgagacaggggtcataaccagcagtggaagtaacattcctgacatcatctcattggactaaaggaggactcacttgattctgggaatcattcatcagaactgctttttcttggatctctagtctgtggaaacgttcttttttttttttttttaataatttggtatttattgaaagtcagatggattcttttgctttctgaggggtgaacacagaagactgcaacaagaaccaaatgacatgcaaggatttttcttaattatgctgtactctcagcatcagatacattcaaccataactgtatcttcctgagagatggatttcactttcatacgttaatggatggagtctacaaatcagtgaaaaaagtttttgttaaaataaagagcaataaaattatgtaaatattcaagtaaccttttttctaattaaaaaaaaaattgtaatcactgattctagaatgacagcaacttctgtttaaccttacgtgaaggaaaaaaaatatatggaaagaacttaatgtttgctgaatgagtcctttccatggagatttgctctgtttcattgaagtaatgaagtttcagtacgtggccaaagcttggattccacttttcgtcctgcatttccacttttcttcgtgattgcatcaaagaaaaatggcattcgtgttacttggtttttttcctgcttatcatttacactttgacgttgtttgctaatgagtgctgtgtgaagttctgggatttggctactcttcattggtgattatgtttaaaagcactatgcagattctgccctgacataaagtgtgttattatgtttttagtaattgtacatttttcattctagagttttctataaatttgaggcttgccttctcaaaaaagaaactatgcagccattgaatgaaatgtctttggggtacggtgtgactggaatgtttgttagaaatttgttcacactatcaaatattgatatcttggagccagcagaagagcagattttgggaggtggtaataacaaaatttaatttcttcccaacaacttaattttctcatttattttacagaatagtagtgaaatatttgatgaaactttgtattttggtagcactacatagaaaatgtgttttagatttatgatgatcatatttctcaccaatgtaatttcagtctcagcagtgattttcaaacttagggaaagggacagcattagatttttttttttttcatttttttaaaatgatatcttacctgaaactacaaacgacaaaagagaattagaaatgtttgaattaaagtgaagaagggttgggggagatgggcctgaacccacttcctgtctcaatccatgctaccccaaacactccagggaacctctgaggttttattgggtgcactttgaaaatttctcttctatagtgtgtttgtttgattttaaatcacagagaaaactgggttttactcttagagaaacattttcatccagttttttagtttgcttcatttgacttcctaaatcatttttgagttcacaaggatttggtacttttctgtttagctttctctctctaagctttatctaccttaaaaacaaagtcctttttttaatggccagtccaaccaattgatttctcaaactgaagtgcccaggtgtggactcatcaatttccgttagaatagggacatcctacttaagagttggtgcagctccaaggagctgacttgtccttgcttggggttttttttttttttcacccttctcaagtttccatggcctttgtgtgttctttttatgttgatttaaattcatatggttttccacaaatcccttctttggctacattgtctccttattcaatggattatccctttgtgggggctgcttattttaaagatgttgggggggaaacaaacccaaatctacgagcagtagttgcacatagttgccagttttaccttcttagtcattagatttccaaaccatgttgcagttttttggtccagatatagtatttctttctaataaagttttatgttgctgctctaaatacagatgcaatatttattgactctgtaatcagatagaaaaaacttaacttggtttgtgtggtatgacttataaagaaatgatgtatatttgttattttgttaccctttagattgtcagagactcccccaatttaatcaacaaagttttataaagtaaatgaaaatattaatagaaattagtttatttacttggttcttataactgatatctctgtgcttttataattgtgatttgtttttttgtttttttttctattttctgtgaacagttttaatgttcggttttggtgttttacactgaaattacatataaatttttaatttatttcatacaggcaacttgcattttaaaaaatacactttgaagtttatcatcttgaaattg

SEQ ID NO: 71612 - DNA, 3114 bp, Homo sapiens
ctcaacagggatgactcagtacggggcgccgtactgctcttgatgtggggacagcggggacagagagctgtcattgaaatagacatctgtttaagaagcgatacttagatgaacctctgtatttctgaaaaataaatgtgaaatatcttaagagcttaagtatgtttttttttttagatggttcaaatccagatcattagctcatcatttttattgcttctcattctgttaagcggcaaagggggaaatatttgttttgactagtccttcactggaaagttttggacttctgcatttgagtctctgggagctagtttttccagttgttttatcagagaatatattcatctttgggttttaaacacttcaaatatcactgatcatggtatagaacttctctgtgacagagtggtaagcacttaccacaaatgttttgtgatttgtgataaagatgatttagggaaataattctggtctcccaaaatatgagacaactattaacaaagcatttttgttttaggtttggattttctttcccttattccagttgatccccagcagtactgtcctcctatgtttttggatagtctcacctcacccttaacagcaagcagtacgtctgtcaccaccaccagctcccatgaaagcagtactcatgttagttcatccagcagcaggagtgagacaggggtcataaccagcagtggaagtaacattcctgacatcatctcattggactaaaggaggactcacttgattctgggaatcattcatcagaactgctttttcttggatctctagtctgtggaaacgttcttttttttttttttttaataatttggtatttattgaaagtcagatggattcttttgctttctgaggggtgaacacagaagactgcaacaagaaccaaatgacatgcaaggatttttcttaattatgctgtactctcagcatcagatacattcaaccataactgtatcttcctgagagatggatttcactttcatacgttaatggatggagtctacaaatcagtgaaaaaagtttttgttaaaataaagagcaataaaattatgtaaatattcaagtaaccttttttctaattaaaaaaaaaattgtaatcactgattctagaatgacagcaacttctgtttaaccttacgtgaaggaaaaaaaatatatggaaagaacttaatgtttgctgaatgagtcctttccatggagatttgctctgtttcattgaagtaatgaagtttcagtacgtggccaaagcttggattccacttttcgtcctgcatttccacttttcttcgtgattgcatcaaagaaaaatggcattcgtgttacttggtttttttcctgcttatcatttacactttgacgttgtttgctaatgagtgctgtgtgaagttctgggatttggctactcttcattggtgattatgtttaaaagcactatgcagattctgccctgacataaagtgtgttattatgtttttagtaattgtacatttttcattctagagttttctataaatttgaggcttgccttctcaaaaaagaaactatgcagccattgaatgaaatgtctttggggtacggtgtgactggaatgtttgttagaaatttgttcacactatcaaatattgatatcttggagccagcagaagagcagattttgggaggtggtaataacaaaatttaatttcttcccaacaacttaattttctcatttattttacagaatagtagtgaaatatttgatgaaactttgtattttggtagcactacatagaaaatgtgttttagatttatgatgatcatatttctcaccaatgtaatttcagtctcagcagtgattttcaaacttagggaaagggacagcattagatttttttttttttcatttttttaaaatgatatcttacctgaaactacaaacgacaaaagagaattagaaatgtttgaattaaagtgaagaagggttgggggagatgggcctgaacccacttcctgtctcaatccatgctaccccaaacactccagggaacctctgaggttttattgggtgcactttgaaaatttctcttctatagtgtgtttgtttgattttaaatcacagagaaaactgggttttactcttagagaaacattttcatccagttttttagtttgcttcatttgacttcctaaatcatttttgagttcacaaggatttggtacttttctgtttagctttctctctctaagctttatctaccttaaaaacaaagtcctttttttaatggccagtccaaccaattgatttctcaaactgaagtgcccaggtgtggactcatcaatttccgttagaatagggacatcctacttaagagttggtgcagctccaaggagctgacttgtccttgcttggggttttttttttttttcacccttctcaagtttccatggcctttgtgtgttctttttatgttgatttaaattcatatggttttccacaaatcccttctttggctacattgtctccttattcaatggattatccctttgtgggggctgcttattttaaagatgttgggggggaaacaaacccaaatctacgagcagtagttgcacatagttgccagttttaccttcttagtcattagatttccaaaccatgttgcagttttttggtccagatatagtatttctttctaataaagttttatgttgctgctctaaatacagatgcaatatttattgactctgtaatcagatagaaaaaacttaacttggtttgtgtggtatgacttataaagaaatgatgtatatttgttattttgttaccctttagattgtcagagactcccccaatttaatcaacaaagttttataaagtaaatgaaaatattaatagaaattagtttatttacttggttcttataactgatatctctgtgcttttataattgtgatttgtttttttgtttttttttctattttctgtgaacagttttaatgttcggttttggtgttttacactgaaattacatataaatttttaatttatttcatacaggcaacttgcattttaaaaaatacactttgaagtttatcatcttgaaattg

SEQ ID NO: 71613 - DNA, 2799 bp, Homo sapiens
tgtggtcagcaaacaagttccacaagtttagagagaatcaagaatatatgctgcattctctaaataatgtaaaatagctaaattcatgctatcttccacccaaagatgtgaagttttgagcaatttttaaatcccactgggatttaaatatgtgactattgcttgtgcatatctaataatttctagtctctttatttaaaatcaagtagcctcttcctcattggcatcattgtttgtttcaagcagtactgtcctcctatgtttttggatagtctcacctcacccttaacagcaagcagtacgtctgtcaccaccaccagctcccatgaaagcagtactcatgttagttcatccagcagcaggagtgagacaggggtcataaccagcagtggaagtaacattcctgacatcatctcattggactaaaggaggactcacttgattctgggaatcattcatcagaactgctttttcttggatctctagtctgtggaaacgttcttttttttttttttttaataatttggtatttattgaaagtcagatggattcttttgctttctgaggggtgaacacagaagactgcaacaagaaccaaatgacatgcaaggatttttcttaattatgctgtactctcagcatcagatacattcaaccataactgtatcttcctgagagatggatttcactttcatacgttaatggatggagtctacaaatcagtgaaaaaagtttttgttaaaataaagagcaataaaattatgtaaatattcaagtaaccttttttctaattaaaaaaaaaattgtaatcactgattctagaatgacagcaacttctgtttaaccttacgtgaaggaaaaaaaatatatggaaagaacttaatgtttgctgaatgagtcctttccatggagatttgctctgtttcattgaagtaatgaagtttcagtacgtggccaaagcttggattccacttttcgtcctgcatttccacttttcttcgtgattgcatcaaagaaaaatggcattcgtgttacttggtttttttcctgcttatcatttacactttgacgttgtttgctaatgagtgctgtgtgaagttctgggatttggctactcttcattggtgattatgtttaaaagcactatgcagattctgccctgacataaagtgtgttattatgtttttagtaattgtacatttttcattctagagttttctataaatttgaggcttgccttctcaaaaaagaaactatgcagccattgaatgaaatgtctttggggtacggtgtgactggaatgtttgttagaaatttgttcacactatcaaatattgatatcttggagccagcagaagagcagattttgggaggtggtaataacaaaatttaatttcttcccaacaacttaattttctcatttattttacagaatagtagtgaaatatttgatgaaactttgtattttggtagcactacatagaaaatgtgttttagatttatgatgatcatatttctcaccaatgtaatttcagtctcagcagtgattttcaaacttagggaaagggacagcattagatttttttttttttcatttttttaaaatgatatcttacctgaaactacaaacgacaaaagagaattagaaatgtttgaattaaagtgaagaagggttgggggagatgggcctgaacccacttcctgtctcaatccatgctaccccaaacactccagggaacctctgaggttttattgggtgcactttgaaaatttctcttctatagtgtgtttgtttgattttaaatcacagagaaaactgggttttactcttagagaaacattttcatccagttttttagtttgcttcatttgacttcctaaatcatttttgagttcacaaggatttggtacttttctgtttagctttctctctctaagctttatctaccttaaaaacaaagtcctttttttaatggccagtccaaccaattgatttctcaaactgaagtgcccaggtgtggactcatcaatttccgttagaatagggacatcctacttaagagttggtgcagctccaaggagctgacttgtccttgcttggggttttttttttttttcacccttctcaagtttccatggcctttgtgtgttctttttatgttgatttaaattcatatggttttccacaaatcccttctttggctacattgtctccttattcaatggattatccctttgtgggggctgcttattttaaagatgttgggggggaaacaaacccaaatctacgagcagtagttgcacatagttgccagttttaccttcttagtcattagatttccaaaccatgttgcagttttttggtccagatatagtatttctttctaataaagttttatgttgctgctctaaatacagatgcaatatttattgactctgtaatcagatagaaaaaacttaacttggtttgtgtggtatgacttataaagaaatgatgtatatttgttattttgttaccctttagattgtcagagactcccccaatttaatcaacaaagttttataaagtaaatgaaaatattaatagaaattagtttatttacttggttcttataactgatatctctgtgcttttataattgtgatttgtttttttgtttttttttctattttctgtgaacagttttaatgttcggttttggtgttttacactgaaattacatataaatttttaatttatttcatacaggcaacttgcattttaaaaaatacactttgaagtttatcatcttgaaattg

SEQ ID NO: 71614 - DNA, 1069 bp, Homo sapiens
agcggggcggaggcggagctcccgcgccgttcacgtgacgggcccggctgtagcggcggcggccgcggcgtcttaagcggcgcccagtgcaggatggtgctggaggcggcggcggccgtggtggcggcagcgtcgttggcggcagcgggagtgggtgcggcggcagcggcggcggcgcccgcgggtggtataaaatggcggatttcgaagagttgaggaatatggtttctagttttagggtttctgaactacaagtattactaggctttgctggacggaataaaagtggacgcaagcatgacctcctgatgagggcgctgcatttattgaagagcggctgcagccctgcggttcagattaaaatccgagaattgtatagacgccgatatccacgaactcttgaaggactttctgatttatccacaatcaaatcatcggttttcagtttggatggtggctcatcacctgtagaacctgacttggccgtggctggaatccactcgttgccttccacttcagttacacctcactcaccatcctctcctgttggttctgtgctgcttcaagatactaagcccacatttgagatgcagcagccatctcccccaattcctcctgtccatcctgatgtgcagttaaaaaatctgcccttttatgatgtccttgatgttctcatcaagcccacgagtttaggtaagtgtttgagaattcacaagaagaaagtagatgttattgatcttacaatagaaagctcttctgacgaagaggaagaccctcctgccaaaaggaaatgcatctttatgtcagaaacacaaagcagcccaaccaaaggggttctcatgtatcagccatcttctgtaagggtgcccagtgtgacttcggttgatcctgctgctattccgccttcattaacagactactcagtaccattccaccatacgccaatatcaagcatgtcatcagatttgccaggagaacaaagaagaaatgatattaataatgaactgaagcttggaacatcttctgatactgtgcaacagtgaatacaaaataaaacaaataatttgta

SEQ ID NO: 71615 - DNA, 1149 bp, Homo sapiens
aaattcatactggttagtagatattttaaatgtacccactgatattctctattttgcataaaagcataatgtcagactttctctgtgtggtggttatattcggggtgtctctgaatgccagcataaaaattcacggaattgaatagaaattggcctgtcttaatgacctatggtttcttttttaatgttttgaaataattaaagagagtttagtcacacagggaggtctaggtgaactgatgttgaagtttattactagacttttcagacctaaaaattttatttattgttattacttgaatatgtcaaaagtatattactggacaaccttttacacattcctctttctaaaatcgaattggacaattacagttctctggttcagaaaattacattagctcagaacccagtaacccttgataaccctgttagcgcagcaattcccgagtgtgtgctttgtgcagagcgttggactatgtactgctcttgatgtggggacagcggggacagagagctgtcattgaaatagacatctgtttaagaagcgatacttagatgaacctctgtatttctgaaaaataaatgtgaaatatcttaagagcttaagtatgtttttttttttagatggttcaaatccagatcattagctcatcatttttattgcttctcattctgttaagcggcaaagggggaaatatttgttttgactagtccttcactggaaagttttggacttctgcatttgagtctctgggagctagtttttccagttgttttatcagagaatatattcatctttgggttttaaacacttcaaatatcactgatcatggtatagaacttctctgtgacagagtggtaagcacttaccacaaatgttttgtgatttgtgataaagatgatttagggaaataattctggtctcccaaaatatgagacaactattaacaaagcatttttgttttaggtttggattttctttcccttattccagttgatccccaggtatgtatcctgaatttaagcaactaatttgtatttgattgttggttatgtcatactaactaaaaatgaccagttgcataaaatcaggacagtcatctctgaattacttacattgatggaaaggaagtactgtgcaaatatttc

SEQ ID NO: 71616 - DNA, 489 bp, Homo sapiens
agccagtattaacagttatggtgatactggttgttattattgaaaagctttcttaccagttgataactgaatagaataggatctattttgctttagaagaattgctagtttatcatcatgtatgaattatgtagcagttactatatctaaatagtttagttttactttgattttattgttaatgtgctcttttgtgattagtaatttggttttatttttatgcataatttttatgtagttagtcatactgtgaagagttttggtattgataaacttaataatttataataaaatattaaatagaacaccaagaatggagagataacaaagttttaatacatttcttaacattccttttaaacatcataaacatgaatcttctgaatctgcaggagaacaaagaagaaatgatattaataatgaactgaagcttggaacatcttctgatactgtgcaacagtgaatacaaaataaaacaaataatttgta

SEQ ID NO: 71617 - DNA, 338 bp, Homo sapiens
atacctttaaaatgattgagcttttattttcagtgaagtagcttggtgaattttgtccccttcgcagtgattgaccattccatggaagttattttgaatgttatttttagaaaccagagtttcttaaataagtatttcatgtaaacaaagagaatattatctctcatctttaatgcaggttttttttgtttgtttgtagaattactctatgtctgtatatcttgtacggcagcttacatcagccatgttattacagagattaaaaatgaaaggtattagaaaccctgatcattccagagcactaagtaagtaatgtttaataagaccaagcatttaaa

SEQ ID NO: 71618 - DNA, 1939 bp, Homo sapiens
agcggggcggaggcggagctcccgcgccgttcacgtgacgggcccggctgtagcggcggcggccgcggcgtcttaagcggcgcccagtgcaggatggtgctggaggcggcggcggccgtggtggcggcagcgtcgttggcggcagcgggagtgggtgcggcggcagcggcggcggcgcccgcgggtggtataaaatggcggatttcgaagagttgaggaatatggtttctagttttagggtttctgaactacaagtattactaggctttgctggacggaataaaagtggacgcaagcatgacctcctgatgagggcgctgcatttattgaagagcggctgcagccctgcggttcagattaaaatccgagaattgtatagacgccgatatccacgaactcttgaaggactttctgatttatccacaatcaaatcatcggttttcagtttggatggtggctcatcacctgtagaacctgacttggccgtggctggaatccactcgttgccttccacttcagttacacctcactcaccatcctctcctgttggttctgtgctgcttcaagatactaagcccacatttgagatgcagcagccatctcccccaattcctcctgtccatcctgatgtgcagttaaaaaatctgcccttttatgatgtccttgatgttctcatcaagcccacgagtttagttcaaagcagtattcagcgatttcaagagaagttttttatttttgctttgacacctcaacaagttagagagatatgcatatccagggattttttgccaggtggtaggagagattatacagtccaagttcagttgagactttgcctggcagagacaagttgccctcaagaagataactatccaaatagtctatgtataaaagtaaatgggaagctatttcctttgcctggctatgcaccaccgcctaaaaatgggattgaacagaagcgccctggacgccccttgaatattacatctttagttaggttatcttcagctgtgccaaaccaaatttccatttcttgggcatcagaaattgggaagaattactctatgtctgtatatcttgtacggcagcttacatcagccatgttattacagagattaaaaatgaaaggtattagaaaccctgatcattccagagcactaattaaagaaaaacttactgcagatcctgatagtgaaattgctacaactagccttcgggtatccttgatgtgccctttaggaaaaatgaggctgacaatcccatgccgtgcagtgacttgtacacatctgcagtgttttgatgctgccctctatctacaaatgaatgagaaaaagcccacctggatttgtcctgtgtgtgacaaaaaagctgcctatgaaagtctaatattagatgggctttttatggaaattctcaatgactgttctgatgtagatgagatcaaattccaagaagatggttcttggtgtccaatgagaccgaagaaagaagctatgaaagtatccagccaaccgtgtacaaaaatagaaagttcaagcgtcctcagtaagccttgttcagtgactgtagccagtgaggcaagcaagaagaaagtagatgttattgatcttacaatagaaagctcttctgacgaagaggaagaccctcctgccaaaaggaaatgcatctttatgtcagaaacacaaagcagcccaaccaaaggggttctcatgtatcagccatcttctgtaagggtgcccagtgtgacttcggttgatcctgctgctattccgccttcattaacagactactcagtaccattccaccatacgccaatatcaagcatgtcatcagatttgccaggagaacaaagaagaaatgatattaataatgaactgaagcttggaacatcttctgatactgtgcaacagtgaatacaaaataaaacaaataatttgta

SEQ ID NO: 71619 - DNA, 4436 bp, Homo sapiens
agcggggcggaggcggagctcccgcgccgttcacgtgacgggcccggctgtagcggcggcggccgcggcgtcttaagcggcgcccagtgcaggatggtgctggaggcggcggcggccgtggtggcggcagcgtcgttggcggcagcgggagtgggtgcggcggcagcggcggcggcgcccgcgggtggtataaaatggcggatttcgaagagttgaggaatatggtttctagttttagggtttctgaactacaagtattactaggctttgctggacggaataaaagtggacgcaagcatgacctcctgatgagggcgctgcatttattgaagagcggctgcagccctgcggttcagattaaaatccgagaattgtatagacgccgatatccacgaactcttgaaggactttctgatttatccacaatcaaatcatcggttttcagtttggatggtggctcatcacctgtagaacctgacttggccgtggctggaatccactcgttgccttccacttcagttacacctcactcaccatcctctcctgttggttctgtgctgcttcaagatactaagcccacatttgagatgcagcagccatctcccccaattcctcctgtccatcctgatgtgcagttaaaaaatctgcccttttatgatgtccttgatgttctcatcaagcccacgagtttagttcaaagcagtattcagcgatttcaagagaagttttttatttttgctttgacacctcaacaagttagagagatatgcatatccagggattttttgccaggtggtaggagagattatacagtccaagttcagttgagactttgcctggcagagacaagttgccctcaagaagataactatccaaatagtctatgtataaaagtaaatgggaagctatttcctttgcctggctatgcaccaccgcctaaaaatgggattgaacagaagcgccctggacgccccttgaatattacatctttagttaggttatcttcagctgtgccaaaccaaatttccatttcttgggcatcagaaattgggaagaattactctatgtctgtatatcttgtacggcagcttacatcagccatgttattacagagattaaaaatgaaaggtattagaaaccctgatcattccagagcactaattaaagaaaaacttactgcagatcctgatagtgaaattgctacaactagccttcgggtatccttgatgtgccctttaggaaaaatgaggctgacaatcccatgccgtgcagtgacttgtacacatctgcagtgttttgatgctgccctctatctacaaatgaatgagaaaaagcccacctggatttgtcctgtgtgtgacaaaaaagctgcctatgaaagtctaatattagatgggctttttatggaaattctcaatgactgttctgatgtagatgagatcaaattccaagaagatggttcttggtgtccaatgagaccgaagaaagaagctatgaaagtatccagccaaccgtgtacaaaaatagaaagttcaagcgtcctcagtaagccttgttcagtgactgtagccagtgaggcaagcaagaagaaagtagatgttattgatcttacaatagaaagctcttctgacgaagaggaagaccctcctgccaaaaggaaatgcatctttatgtcagaaacacaaagcagcccaaccaaaggggttctcatgtatcagccatcttctgtaagggtgcccagtgtgacttcggttgatcctgctgctattccgccttcattaacagactactcagtaccattccaccatacgccaatatcaagcatgtcatcagatttgccaggtttggattttctttcccttattccagttgatccccagcagtactgtcctcctatgtttttggatagtctcacctcacccttaacagcaagcagtacgtctgtcaccaccaccagctcccatgaaagcagtactcatgttagttcatccagcagcaggagtgagacaggggtcataaccagcagtggaagtaacattcctgacatcatctcattggactaaaggaggactcacttgattctgggaatcattcatcagaactgctttttcttggatctctagtctgtggaaacgttcttttttttttttttttaataatttggtatttattgaaagtcagatggattcttttgctttctgaggggtgaacacagaagactgcaacaagaaccaaatgacatgcaaggatttttcttaattatgctgtactctcagcatcagatacattcaaccataactgtatcttcctgagagatggatttcactttcatacgttaatggatggagtctacaaatcagtgaaaaaagtttttgttaaaataaagagcaataaaattatgtaaatattcaagtaaccttttttctaattaaaaaaaaaattgtaatcactgattctagaatgacagcaacttctgtttaaccttacgtgaaggaaaaaaaatatatggaaagaacttaatgtttgctgaatgagtcctttccatggagatttgctctgtttcattgaagtaatgaagtttcagtacgtggccaaagcttggattccacttttcgtcctgcatttccacttttcttcgtgattgcatcaaagaaaaatggcattcgtgttacttggtttttttcctgcttatcatttacactttgacgttgtttgctaatgagtgctgtgtgaagttctgggatttggctactcttcattggtgattatgtttaaaagcactatgcagattctgccctgacataaagtgtgttattatgtttttagtaattgtacatttttcattctagagttttctataaatttgaggcttgccttctcaaaaaagaaactatgcagccattgaatgaaatgtctttggggtacggtgtgactggaatgtttgttagaaatttgttcacactatcaaatattgatatcttggagccagcagaagagcagattttgggaggtggtaataacaaaatttaatttcttcccaacaacttaattttctcatttattttacagaatagtagtgaaatatttgatgaaactttgtattttggtagcactacatagaaaatgtgttttagatttatgatgatcatatttctcaccaatgtaatttcagtctcagcagtgattttcaaacttagggaaagggacagcattagatttttttttttttcatttttttaaaatgatatcttacctgaaactacaaacgacaaaagagaattagaaatgtttgaattaaagtgaagaagggttgggggagatgggcctgaacccacttcctgtctcaatccatgctaccccaaacactccagggaacctctgaggttttattgggtgcactttgaaaatttctcttctatagtgtgtttgtttgattttaaatcacagagaaaactgggttttactcttagagaaacattttcatccagttttttagtttgcttcatttgacttcctaaatcatttttgagttcacaaggatttggtacttttctgtttagctttctctctctaagctttatctaccttaaaaacaaagtcctttttttaatggccagtccaaccaattgatttctcaaactgaagtgcccaggtgtggactcatcaatttccgttagaatagggacatcctacttaagagttggtgcagctccaaggagctgacttgtccttgcttggggttttttttttttttcacccttctcaagtttccatggcctttgtgtgttctttttatgttgatttaaattcatatggttttccacaaatcccttctttggctacattgtctccttattcaatggattatccctttgtgggggctgcttattttaaagatgttgggggggaaacaaacccaaatctacgagcagtagttgcacatagttgccagttttaccttcttagtcattagatttccaaaccatgttgcagttttttggtccagatatagtatttctttctaataaagttttatgttgctgctctaaatacagatgcaatatttattgactctgtaatcagatagaaaaaacttaacttggtttgtgtggtatgacttataaagaaatgatgtatatttgttattttgttaccctttagattgtcagagactcccccaatttaatcaacaaagttttataaagtaaatgaaaatattaatagaaattagtttatttacttggttcttataactgatatctctgtgcttttataattgtgatttgtttttttgtttttttttctattttctgtgaacagttttaatgttcggttttggtgttttacactgaaattacatataaatttttaatttatttcatacaggcaacttgcattttaaaaaatacactttgaagtttatcatcttgaaattg

SEQ ID NO: 71620 - DNA, 3470 bp, Homo sapiens
  misc_feature (3412)..(3412): n is a, c, g, or t
agcggggcggaggcggagctcccgcgccgttcacgtgacgggcccggctgtagcggcggcggccgcggcgtcttaagcggcgcccagtgcaggatggtgctggaggcggcggcggccgtggtggcggcagcgtcgttggcggcagcgggagtgggtgcggcggcagcggcggcggcgcccgcgggtggtataaaatggcggatttcgaagagttgaggaatatggtttctagttttagggtttctgaactacaagtattactaggctttgctggacggaataaaagtggacgcaagcatgacctcctgatgagggcgctgcatttattgaagagcggctgcagccctgcggttcagattaaaatccgagaattgtatagacgccgatatccacgaactcttgaaggactttctgatttatccacaatcaaatcatcggttttcagtttggatggtggctcatcacctgtagaacctgacttggccgtggctggaatccactcgttgccttccacttcagttacacctcactcaccatcctctcctgttggttctgtgctgcttcaagatactaagcccacatttgagatgcagcagccatctcccccaattcctcctgtccatcctgatgtgcagttaaaaaatctgcccttttatgatgtccttgatgttctcatcaagcccacgagtttagttcaaagcagtattcagcgatttcaagagaagttttttatttttgctttgacacctcaacaagttagagagatatgcatatccagggattttttgccaggtggtaggagagattatacagtccaagttcagttgagactttgcctggcagagacaagttgccctcaagaagataactatccaaatagtctatgtataaaagtaaatgggaagctatttcctttgcctggctatgcaccaccgcctaaaaatgggattgaacagaagcgccctggacgccccttgaatattacatctttagttaggttatcttcagctgtgccaaaccaaatttccatttcttgggcatcagaaattgggaagaattactctatgtctgtatatcttgtacggcagcttacatcagccatgttattacagagattaaaaatgaaaggtattagaaaccctgatcattccagagcactaattaaagaaaaacttactgcagatcctgatagtgaaattgctacaactagccttcgggtatccttgatgtgccctttaggaaaaatgaggctgacaatcccatgccgtgcagtgacttgtacacatctgcagtgttttgatgctgccctctatctacaaatgaatgagaaaaagcccacctggatttgtcctgtgtgtgacaaaaaagctgcctatgaaagtctaatattagatgggctttttatggaaattctcaatgactgttctgatgtagatgagatcaaattccaagaagatggttcttggtgtccaatgagaccgaagaaagaagctatgaaagtatccagccaaccgtgtacaaaaatagaaagttcaagcgtcctcagtaagccttgttcagtgactgtagccagtgaggcaagcaagaagaaagtagatgttattgatcttacaatagaaagctcttctgacgaagaggaagaccctcctgccaaaaggaaatgcatctttatgtcagaaacacaaagcagcccaaccaaaggggttctcatgtatcagccatcttctgtaagggtgcccagtgtgacttcggttgatcctgctgctattccgccttcattaacagactactcagtaccattccaccatacgccaatatcaagcatgtcatcagatttgccaggtttggattttctttcccttattccagttgatccccagcagtactgtcctcctatgtttttggatagtctcacctcacccttaacagcaagcagtacgtctgtcaccaccaccagctcccatgaaagcagtactcatgttagttcatccagcagcaggagtgagacaggggtcataaccagcagtggaagtaacattcctgacatcatctcattggactaaaggaggactcacttgattctgggaatcattcatcagaactgctttttcttggatctctagtctgtggaaacgttcttttttttttttttttaataatttggtatttattgaaagtcagatggattcttttgctttctgaggggtgaacacagaagactgcaacaagaaccaaatgacatgcaaggatttttcttaattatgctgtactctcagcatcagatacattcaaccataactgtatcttcctgagagatggatttcactttcatacgttaatggatggagtctacaaatcagtgaaaaaagtttttgttaaaataaagagcaataaaattatgtaaatattcaagtaaccttttttctaattaaaaaaaaaattgtaatcactgattctagaatgacagcaacttctgtttaaccttacgtgaaggaaaaaaaatatatggaaagaacttaatgtttgctgaatgagtcctttccatggagatttgctctgtttcattgaagtaatgaagtttcagtacgtggccaaagcttggattccacttttcgtcctgcatttccacttttcttcgtgattgcatcaaagaaaaatggcattcgtgttacttggtttttttcctgcttatcatttacactttgacgttgtttgctaatgagtgctgtgtgaagttctgggatttggctactcttcattggtgattatgtttaaaagcactatgcagattctgccctgacataaagtgtgttattatgtttttagtaattgtacatttttcattctagagttttctataaatttgaggcttgccttctcaaaaaagaaactatgcagccattgaatgaaatgtctttggggtacggtgtgactggaatgtttgttagaaatttgttcacactatcaaatattgatatcttggagccagcagaagagcagattttgggaggtggtaataacaaaatttaatttcttcccaacaacttaattttctcatttattttacagaatagtagtgaaatatttgatgaaactttgtattttggtagcactacatagaaaatgtgttttagatttatgatgatcatatttctcaccaatgtaatttcagtctcagcagtgattttcaaacttagggaaagggacagcattagatttttttttttttcatttttttaaaatgatatcttacctgaaactacaaacgacaaaagagaattagaaatgtttgaattaaagtgaagaagggttgggggagatgggcctgaacccacttcctgtctcaatccatgctaccccaaacactccagggaacctctgaggttttattgggtgcacttggttcatttanaggaccattttcatccatttttaggttgttaattgacttcctaaacattttgaaggca

SEQ ID NO: 71621 - DNA, 2299 bp, Homo sapiens
agcggggcggaggcggagctcccgcgccgttcacgtgacgggcccggctgtagcggcggcggccgcggcgtcttaagcggcgcccagtgcaggatggtgctggaggcggcggcggccgtggtggcggcagcgtcgttggcggcagcgggagtgggtgcggcggcagcggcggcggcgcccgcgggtggtataaaatggcggatttcgaagagttgaggaatatggtttctagttttagggtttctgaactacaagtattactaggctttgctggacggaataaaagtggacgcaagcatgacctcctgatgagggcgctgcatttattgaagagcggctgcagccctgcggttcagattaaaatccgagaattgtatagacgccgatatccacgaactcttgaaggactttctgatttatccacaatcaaatcatcggttttcagtttggatggtggctcatcacctgtagaacctgacttggccgtggctggaatccactcgttgccttccacttcagttacacctcactcaccatcctctcctgttggttctgtgctgcttcaagatactaagcccacatttgagatgcagcagccatctcccccaattcctcctgtccatcctgatgtgcagttaaaaaatctgcccttttatgatgtccttgatgttctcatcaagcccacgagtttagttcaaagcagtattcagcgatttcaagagaagttttttatttttgctttgacacctcaacaagttagagagatatgcatatccagggattttttgccaggtggtaggagagattatacagtccaagttcagttgagactttgcctggcagagacaagttgccctcaagaagataactatccaaatagtctatgtataaaagtaaatgggaagctatttcctttgcctggctatgcaccaccgcctaaaaatgggattgaacagaagcgccctggacgccccttgaatattacatctttagttaggttatcttcagctgtgccaaaccaaatttccatttcttgggcatcagaaattgggaagaattactctatgtctgtatatcttgtacggcagcttacatcagccatgttattacagagattaaaaatgaaaggtattagaaaccctgatcattccagagcactaattaaagaaaaacttactgcagatcctgatagtgaaattgctacaactagccttcgggtatccttgatgtgccctttaggaaaaatgaggctgacaatcccatgccgtgcagtgacttgtacacatctgcagtgttttgatgctgccctctatctacaaatgaatgagaaaaagcccacctggatttgtcctgtgtgtgacaaaaaagctgcctatgaaagtctaatattagatgggctttttatggaaattctcaatgactgttctgatgtagatgagatcaaattccaagaagatggttcttggtgtccaatgagaccgaagaaagaagctatgaaagtatccagccaaccgtgtacaaaaatagaaagttcaagcgtcctcagtaagccttgttcagtgactgtagccagtgaggcaagcaagaagaaagtagatgttattgatcttacaatagaaagctcttctgacgaagaggaagaccctcctgccaaaaggaaatgcatctttatgtcagaaacacaaagcagcccaaccaaaggggttctcatgtatcagccatcttctgtaagggtgcccagtgtgacttcggttgatcctgctgctattccgccttcattaacagactactcagtaccattccaccatacgccaatatcaagcatgtcatcagatttgccaggagaacaaagaagaaatgatattaataatgaactgaagcttggaacatcttctgatactgtgcaacagtgaatacaaaataaaacaaataatttgtaaaaaaaaaaaaaaaaaaaaaaaaaattaaaaaaaaaaaaaaaaaaaaaaaaagcaaaaaaagaaaaaaaaaaaaacaaagaaaatacaaaaagaaaagaggagggggcggggcgcgcctacaaaaatcacccccgccggggggggacgcagcacttgactaagcccacccccgcgtgttcgtgagcaaggggggcccccataatgagggagcgcgcatataaacaaaaacgacggcgaggcgcggccgcttaaaacaaacgcgggcggaggggggaaaacacgatcccgcggggcgaccctcgtggagagaaacaccccacacccgggggggggcaccacagtgggcgaccaacgcccac

SEQ ID NO: 71622 - DNA, 1796 bp, Homo sapiens
agcggggcggaggcggagctcccgcgccgttcacgtgacgggcccggctgtagcggcggcggccgcggcgtcttaagcggcgcccagtgcaggatggtgctggaggcggcggcggccgtggtggcggcagcgtcgttggcggcagcgggagtgggtgcggcggcagcggcggcggcgcccgcgggtggtataaaatggcggatttcgaagagttgaggaatatggtttctagttttagggtttctgaactacaagtattactaggctttgctggacggaataaaagtggacgcaagcatgacctcctgatgagggcgctgcatttattgaagagcggctgcagccctgcggttcagattaaaatccgagaattgtatagacgccgatatccacgaactcttgaaggactttctgatttatccacaatcaaatcatcggttttcagtttggatggtggctcatcacctgtagaacctgacttggccgtggctggaatccactcgttgccttccacttcagttacacctcactcaccatcctctcctgttggttctgtgctgcttcaagatactaagcccacatttgagatgcagcagccatctcccccaattcctcctgtccatcctgatgtgcagttaaaaaatctgcccttttatgatgtccttgatgttctcatcaagcccacgagtttagttcaaagcagtattcagcgatttcaagagaagttttttatttttgctttgacacctcaacaagttagagagatatgcatatccagggattttttgccaggtggtaggagagattatacagtccaagttcagttgagactttgcctggcagagacaagttgccctcaagaagataactatccaaatagtctatgtataaaagtaaatgggaagctatttcctttgcctggctatgcaccaccgcctaaaaatgggattgaacagaagcgccctggacgccccttgaatattacatctttagttaggttatcttcagctgtgccaaaccaaatttccatttcttgggcatcagaaattgggaagaattactctatgtctgtatatcttgtacggcagcttacatcagccatgttattacagagattaaaaatgaaaggtattagaaaccctgatcattccagagcactaattaaagaaaaacttactgcagatcctgatagtgaaattgctacaactagccttcgggtatccttgatgtgccctttaggaaaaatgaggctgacaatcccatgccgtgcagtgacttgtacacatctgcagtgttttgatgctgccctctatctacaaatgaatgagaaaaagcccacctggatttgtcctgtgtgtgacaaaaaagctgcctatgaaagtctaatattagatgggctttttatggaaattctcaatgactgttctgatgtagatgagatcaaattccaagaagatggttcttggtgtccaatgagaccgaagaaagaagctatgaaagtatccagccaaccgtgtacaaaaatagaaagttcaagcgtcctcagtaagccttgttcagtgactgtagccagtgaggcaagcaagaagaaagtagatgttattgatcttacaatagaaagctcttctgacgaagaggaagaccctcctgccaaaaggaaatgcatctttatgtcagaaacacaaagcagcccaaccaaagggtttgttaatttatagttcactattgttcattacccttgcaactaattgctcttggatagatttataaatgtctctttgggaaatggcataact

SEQ ID NO: 71623 - DNA, 3244 bp, Homo sapiens
ttcaactttctacgcaactagcttcgggtatcttgatgtgcctttaggaaaaatgaggctgacaatcccatgccgtgcagtgacttgtacacatctgcagtgttttgatgctgccctctatctacaaatgaatgagaaaaagcccacctggatttgtcctgtgtgtgacaaaaaagctgcctatgaaagtctaatattagatgggctttttatggaaattctcaatgactgttctgatgtagatgagatcaaattccaagaagatggttcttggtgtccaatgagaccgaagaaagaagctatgaaagtatccagccaaccgtgtacaaaaatagaaagttcaagcgtcctcagtaagccttgttcagtgactgtagccagtgaggcaagcaagaagaaagtagatgttattgatcttacaatagaaagctcttctgacgaagaggaagaccctcctgccaaaaggaaatgcatctttatgtcagaaacacaaagcagcccaaccaaaggggttctcatgtatcagccatcttctgtaagggtgcccagtgtgacttcggttgatcctgctgctattccgccttcattaacagactactcagtaccattccaccatacgccaatatcaagcatgtcatcagatttgccaggtttggattttctttcccttattccagttgatccccagcagtactgtcctcctatgtttttggatagtctcacctcacccttaacagcaagcagtacgtctgtcaccaccaccagctcccatgaaagcagtactcatgttagttcatccagcagcaggagtgagacaggggtcataaccagcagtggaagtaacattcctgacatcatctcattggactaaaggaggactcacttgattctgggaatcattcatcagaactgctttttcttggatctctagtctgtggaaacgttcttttttttttttttttaataatttggtatttattgaaagtcagatggattcttttgctttctgaggggtgaacacagaagactgcaacaagaaccaaatgacatgcaaggatttttcttaattatgctgtactctcagcatcagatacattcaaccataactgtatcttcctgagagatggatttcactttcatacgttaatggatggagtctacaaatcagtgaaaaaagtttttgttaaaataaagagcaataaaattatgtaaatattcaagtaaccttttttctaattaaaaaaaaaattgtaatcactgattctagaatgacagcaacttctgtttaaccttacgtgaaggaaaaaaaatatatggaaagaacttaatgtttgctgaatgagtcctttccatggagatttgctctgtttcattgaagtaatgaagtttcagtacgtggccaaagcttggattccacttttcgtcctgcatttccacttttcttcgtgattgcatcaaagaaaaatggcattcgtgttacttggtttttttcctgcttatcatttacactttgacgttgtttgctaatgagtgctgtgtgaagttctgggatttggctactcttcattggtgattatgtttaaaagcactatgcagattctgccctgacataaagtgtgttattatgtttttagtaattgtacatttttcattctagagttttctataaatttgaggcttgccttctcaaaaaagaaactatgcagccattgaatgaaatgtctttggggtacggtgtgactggaatgtttgttagaaatttgttcacactatcaaatattgatatcttggagccagcagaagagcagattttgggaggtggtaataacaaaatttaatttcttcccaacaacttaattttctcatttattttacagaatagtagtgaaatatttgatgaaactttgtattttggtagcactacatagaaaatgtgttttagatttatgatgatcatatttctcaccaatgtaatttcagtctcagcagtgattttcaaacttagggaaagggacagcattagatttttttttttttcatttttttaaaatgatatcttacctgaaactacaaacgacaaaagagaattagaaatgtttgaattaaagtgaagaagggttgggggagatgggcctgaacccacttcctgtctcaatccatgctaccccaaacactccagggaacctctgaggttttattgggtgcactttgaaaatttctcttctatagtgtgtttgtttgattttaaatcacagagaaaactgggttttactcttagagaaacattttcatccagttttttagtttgcttcatttgacttcctaaatcatttttgagttcacaaggatttggtacttttctgtttagctttctctctctaagctttatctaccttaaaaacaaagtcctttttttaatggccagtccaaccaattgatttctcaaactgaagtgcccaggtgtggactcatcaatttccgttagaatagggacatcctacttaagagttggtgcagctccaaggagctgacttgtccttgcttggggttttttttttttttcacccttctcaagtttccatggcctttgtgtgttctttttatgttgatttaaattcatatggttttccacaaatcccttctttggctacattgtctccttattcaatggattatccctttgtgggggctgcttattttaaagatgttgggggggaaacaaacccaaatctacgagcagtagttgcacatagttgccagttttaccttcttagtcattagatttccaaaccatgttgcagttttttggtccagatatagtatttctttctaataaagttttatgttgctgctctaaatacagatgcaatatttattgactctgtaatcagatagaaaaaacttaacttggtttgtgtggtatgacttataaagaaatgatgtatatttgttattttgttaccctttagattgtcagagactcccccaatttaatcaacaaagttttataaagtaaatgaaaatattaatagaaattagtttatttacttggttcttataactgatatctctgtgcttttataattgtgatttgtttttttgtttttttttctattttctgtgaacagttttaatgttcggttttggtgttttacactgaaattacatataaatttttaatttatttcatacaggcaacttgcattttaaaaaatacactttgaagtttatcatcttgaaattg

SEQ ID NO: 71624 - DNA, 1132 bp, Homo sapiens
agcggggcggaggcggagctcccgcgccgttcacgtgacgggcccggctgtagcggcggcggccgcggcgtcttaagcggcgcccagtgcaggatggtgctggaggcggcggcggccgtggtggcggcagcgtcgttggcggcagcgggagtgggtgcggcggcagcggcggcggcgcccgcgggtggtataaaatggcggatttcgaagagttgaggaatatggtttctagttttagggtttctgaactacaagtattactaggctttgctggacggaataaaagtggacgcaagcatgacctcctgatgagggcgctgcatttattgaagagcggctgcagccctgcggttcagattaaaatccgagaattgtatagacgccgatatccacgaactcttgaaggactttctgatttatccacaatcaaatcatcggttttcagtttggatggtggctcatcacctgtagaacctgacttggccgtggctggaatccactcgttgccttccacttcagttacacctcactcaccatcctctcctgttggttctgtgctgcttcaagatactaagcccacatttgagatgcagcagccatctcccccaattcctcctgtccatcctgatgtgcagttaaaaaatctgcccttttatgatgtccttgatgttctcatcaagcccacgagtttagttcaaagcagtattcagcgatttcaagagaagttttttatttttgctttgacacctcaacaagttagagagatatgcatatccagggattttttgccaggtggtaggagagattatacagtccaagttcagttgagactttgcctggcagagacaagttgccctcaagaagataactatccaaatagtctatgtataaaagtaaatgggaagctatttcctttgcctgttcccttggtgcaaggaagacagcagctcatagtagggcttgtgggatggtgacatgcagtgtggacagacaagaacctgctgcagagaccatctcccatctttgactccaagggctgccagtgtacagactgacagccagatgagaacattccatgtttttaatgggcagaagaaagaaaaaggccctctttgtttagggagttatttta

SEQ ID NO: 71625 - DNA, 638 bp, Homo sapiens
ggatgataaaggagaaatgctttggtttaagagagggaaatctttgttaccaatactatcggtgagttcacctaatacttcctcgtcatcaagttcattggagtacgcatcttcttcatcctcatctcccggttcagtgggttcacttttgacagggcactccccgtttgggtgtaaaacgttgctttcttttggcctttcacagttgttctcttggtctttgctctctgacatcttgctagactcagacgatgagtggctgagggagacagaggtaattggggtgttcactactaaactagacagcccccccagattcacttcagcctttggcatttgggtaatccccagcggctgctctgctgagctcgaggtgctcgcgcttccttttaagaaggcaaagccagccggcaaagagtcaccattttcaacatgaaaagcgctccataaaccgcggaaggttggatcgggtcctatgaggtttgtagtagaaaaatggggataaacagaagtggatttttttggttccagaaagcttataagaggttctttgtctttgccaatcccctgtattatggcggagacgcatttattactgaggagcttctgctcctcgtcattgagggtcatccgatgat

SEQ ID NO: 71626 - DNA, 332 bp, Homo sapiens
ggattggaacttagaaaaaatccccagaaatcagaaatactggactgagaaagcctagatcctcattttcaaggtaccctaactaaggaaaatatcctacccctaccctcacctctgaagtttgtgtcttcccaaagaaggagggagtttaacaggaagtcaagaacaatcacattaaaaacaggctaaacaaataccagtagcaactgattcttcttggaaacagtggttgtagattatatatcactgcttttgaaatctaagtgcatatcaatatctaggtagtttttcaaaaaattcaggtgcctaggctcaccctagatccactccca

SEQ ID NO: 71627 - DNA, 484 bp, Homo sapiens
  misc_feature (1)..(1): n is a, c, g, or t
nggcaataccaagattttcttgaagatcttgaagaagatgaggcaattcgaaaaaatgtcaacatttacagagattcagccatccctgtggaaagtgacaccgatgatgaaggagcacctcgaattagtctggctgagatgcttgaagaccttcatatttcccaagatgccactggtgaagaaggtgcatcaatgctgacataatgagatgttgcaggcgtgacacgctcacgtggcccccctgtcttttgaggacaatacttaaggctcagtcctctgctctcttttccttgataacttttctttaaaccacttcatctgcttttttaatttaacttcatgggtaactcacagttccacatctcagacccaaacctcacttggaatcccaagtctgtgtcttcattagctaccagctagctagtttctcttgattgcctgcaacaccttttccatgtctacatgttctttgtcccaaaataag

SEQ ID NO: 71628 - DNA, 1014 bp, Homo sapiens
cggacgcgtgggtccgccgagctacgggtgccgggtggagcgaagcacggaatgtgtctcctgctgggggccacgggcgtcgggaagacgctgctggtgaaacggctgcaggaggtgagctcccgggatgggaaaggcgacctgggggagccgcccccgacacggcccacggtgggcaccaatcttactgacatcgtggcacagagaaagatcaccatccgggagcttggggggtgcatgggccccatctggtccagttactatggaaactgccgttctctcctgtttgtgatggacgcctctgaccccacccagctctctgcatcctgtgtgcagctcttaggtctcctttctgcagaacaacttgcagaagcatcggtgctgatactcttcaataaaatcgacctaccctgttacatgtccacggaggagatgaagtcattaatcaggcttccagacatcattgcttgtgccaagcagaacatcaccacggcagaaatcagcgcccgtgaaggcactggcttagcaggggtgctggcctggctccaggccacccacagagccaacgattgactgcacggcagaggcgcagctggcctgagctggggagaggtggcagagggcagtatggctttgctgccaatagtttcttctcacaggggcagaataacccaaagtaaccctacatgatggggctctgtgctgagatgcaatgatgtgtaaactgaggcatgtggagatggaagttgacatctggcctctgaaaaaagtgtccccaggggctaggcatggtggctcacacctgtaatcccagcactttgagaggccgaggcgggtgtatcacctgaggtcgggagttcgagactagcctgaccaacatgggaaccatgtctaaaaatccagaattagctgggtgtgctagcacatgcctgtaatcccagctacttgagaggctgagacaggagaaccccttgaacccaggaagcggaggttgcagtgagccaagatcacgcc

SEQ ID NO: 71629 - DNA, 850 bp, Homo sapiens
  misc_feature (51)..(51): n is a, c, g, or t
gggctgagagcgcgggaacggcgtggatatcttccgcgcggggacgggacnggggcgcggggggcaccggagtggggcggggactcaccctttactgctcgggtccttgaccgcttcgcactttgtgatggacgcctctgaccccacccagctctctgcatcctgtgtgcagctcttaggtctcctttctgcagaacaacttgcagaagcatcggtgctgatactcttcaataaaatcgacctaccctgttacatgtccacggaggagatgaagtcattaatcaggcttccagacatcattgcttgtgccaagcagaacatcaccacggcagaaatcagcgcccgtgaaggcactggcttagcaggggtgctggcctggctccaggccacccacagagccaacgattgactgcacggcagaggcgcagctggcctgagctggggagaggtggcagagggcagtatggctttgctgccaatagtttcttctcacaggggcagaataacccaaagtaaccctacatgatggggctctgtgctgagatgcaatgatgtgtaaactgaggcatgtggagatggaagttgacatctggcctctgaaaaaagtgtccccaggggctaggcatggtggctcacacctgtaatcccagcactttgagaggccgaggcgggtgtatcacctgaggtcgggagttcgagactagcctgaccaacatgggaaccatgtctaaaaatccagaattagctgggtgtgctagcacatgcctgtaatcccagctacttgagaggctgagacaggagaaccccttgaacccaggaagcggaggttgcagtgagccaagatcacgcc

SEQ ID NO: 71630 - DNA, 491 bp, Homo sapiens
cccctgtttactgaggtgactctagacgatccccttactaacactatgcaactaaggcagctgtgatgtcagaattggaatggggagaggtggcagagggcagtatggctttgctgccaatagtttcttctcacaggggcagaataacccaaagtaaccctacatgatggggctctgtgctgagatgcaatgatgtgtaaactgaggcatgtggagatggaagttgacatctggcctctgaaaaaagtgtccccaggggctaggcatggtggctcacacctgtaatcccagcactttgagaggccgaggcgggtgtatcacctgaggtcgggagttcgagactagcctgaccaacatgggaaccatgtctaaaaatccagaattagctgggtgtgctagcacatgcctgtaatcccagctacttgagaggctgagacaggagaaccccttgaacccaggaagcggaggttgcagtgagccaagatcacgcc

SEQ ID NO: 71631 - DNA, 943 bp, Homo sapiens
  misc_feature (9)..(9): n is a, c, g, or t
cgggcgttngaaaaagagtgcctgggtgaaacggctgcaggaggtgagctcccgggatgggaaaggcgacctgggggagccgcccccgacacggcccacggtgggcaccaatcttactgacatcgtggcacagagaaagatcaccatccgggagcttggggggtgcatgggccccatctggtccagttactatggaaactgccgttctctcctgtttgtgatggacgcctctgaccccacccagctctctgcatcctgtgtgcagctcttaggtctcctttctgcagaacaacttgcagaagcatcggtgctgatactcttcaataaaatcgacctaccctgttacatgtccacggaggagatgaagtcattaatcaggcttccagacatcattgcttgtgccaagcagaacatcaccacggcagaaatcagcgcccgtgaaggcactggcttagcaggggtgctggcctggctccaggccacccacagagccaacgattgactgcacggcagaggcgcagctggcctgagctggggagaggtggcagagggcagtatggctttgctgccaatagtttcttctcacaggggcagaataacccaaagtaaccctacatgatggggctctgtgctgagatgcaatgatgtgtaaactgaggcatgtggagatggaagttgacatctggcctctgaaaaaagtgtccccaggggctaggcatggtggctcacacctgtaatcccagcactttgagaggccgaggcgggtgtatcacctgaggtcgggagttcgagactagcctgaccaacatgggaaccatgtctaaaaatccagaattagctgggtgtgctagcacatgcctgtaatcccagctacttgagaggctgagacaggagaaccccttgaacccaggaagcggaggttgcagtgagccaagatcacgcc

SEQ ID NO: 71632 - DNA, 833 bp, Homo sapiens
caaaaaaaaaaatgcagttttgctctcccagtgccaggtcagtgaggcccaggggaggaagtttggcagcagggcgttgctgccatctttttctttttccccagtttgtgatggacgcctctgaccccacccagctctctgcatcctgtgtgcagctcttaggtctcctttctgcagaacaacttgcagaagcatcggtgctgatactcttcaataaaatcgacctaccctgttacatgtccacggaggagatgaagtcattaatcaggcttccagacatcattgcttgtgccaagcagaacatcaccacggcagaaatcagcgcccgtgaaggcactggcttagcaggggtgctggcctggctccaggccacccacagagccaacgattgactgcacggcagaggcgcagctggcctgagctggggagaggtggcagagggcagtatggctttgctgccaatagtttcttctcacaggggcagaataacccaaagtaaccctacatgatggggctctgtgctgagatgcaatgatgtgtaaactgaggcatgtggagatggaagttgacatctggcctctgaaaaaagtgtccccaggggctaggcatggtggctcacacctgtaatcccagcactttgagaggccgaggcgggtgtatcacctgaggtcgggagttcgagactagcctgaccaacatgggaaccatgtctaaaaatccagaattagctgggtgtgctagcacatgcctgtaatcccagctacttgagaggctgagacaggagaaccccttgaacccaggaagcggaggttgcagtgagccaagatcacgcc

SEQ ID NO: 71633 - DNA, 1023 bp, Homo sapiens
  misc_feature (51)..(51): n is a, c, g, or t
gggctgagagcgcgggaacggcgtggatatcttccgcgcggggacgggacnggggcgcggggggcaccggagtggggcggggactcaccctttactgctcgggtccttgaccgcttcgcacaggtgagctcccgggatgggaaaggcgacctgggggagccgcccccgacacggcccacggtgggcaccaatcttactgacatcgtggcacagagaaagatcaccatccgggagcttggggggtgcatgggccccatctggtccagttactatggaaactgccgttctctcctgtttgtgatggacgcctctgaccccacccagctctctgcatcctgtgtgcagctcttaggtctcctttctgcagaacaacttgcagaagcatcggtgctgatactcttcaataaaatcgacctaccctgttacatgtccacggaggagatgaagtcattaatcaggcttccagacatcattgcttgtgccaagcagaacatcaccacggcagaaatcagcgcccgtgaaggcactggcttagcaggggtgctggcctggctccaggccacccacagagccaacgattgactgcacggcagaggcgcagctggcctgagctggggagaggtggcagagggcagtatggctttgctgccaatagtttcttctcacaggggcagaataacccaaagtaaccctacatgatggggctctgtgctgagatgcaatgatgtgtaaactgaggcatgtggagatggaagttgacatctggcctctgaaaaaagtgtccccaggggctaggcatggtggctcacacctgtaatcccagcactttgagaggccgaggcgggtgtatcacctgaggtcgggagttcgagactagcctgaccaacatgggaaccatgtctaaaaatccagaattagctgggtgtgctagcacatgcctgtaatcccagctacttgagaggctgagacaggagaaccccttgaacccaggaagcggaggttgcagtgagccaagatcacgcc

SEQ ID NO: 71634 - DNA, 909 bp, Homo sapiens
cggacgcgtgggtccgccgagctacgggtgccgggtggagcgaagcacggaatgtgtctcctgctgggggccacgggcgtcgggaagacgctgctggtgaaacggctgcaggaggtgagctcccgggatgggaaaggcgacctgggggagccgcccccgacacggcccacggtgggcacctttgtgatggacgcctctgaccccacccagctctctgcatcctgtgtgcagctcttaggtctcctttctgcagaacaacttgcagaagcatcggtgctgatactcttcaataaaatcgacctaccctgttacatgtccacggaggagatgaagtcattaatcaggcttccagacatcattgcttgtgccaagcagaacatcaccacggcagaaatcagcgcccgtgaaggcactggcttagcaggggtgctggcctggctccaggccacccacagagccaacgattgactgcacggcagaggcgcagctggcctgagctggggagaggtggcagagggcagtatggctttgctgccaatagtttcttctcacaggggcagaataacccaaagtaaccctacatgatggggctctgtgctgagatgcaatgatgtgtaaactgaggcatgtggagatggaagttgacatctggcctctgaaaaaagtgtccccaggggctaggcatggtggctcacacctgtaatcccagcactttgagaggccgaggcgggtgtatcacctgaggtcgggagttcgagactagcctgaccaacatgggaaccatgtctaaaaatccagaattagctgggtgtgctagcacatgcctgtaatcccagctacttgagaggctgagacaggagaaccccttgaacccaggaagcggaggttgcagtgagccaagatcacgcc

SEQ ID NO: 71635 - DNA, 966 bp, Homo sapiens
cggacgcgtgggtccgccgagctacgggtgccgggtggagcgaagcacggaatgtgtctcctgctgggggccacgggcgtcgggaagacgctgctggtgaaacggctgcaggaggtgagctcccgggatgggaaaggcgacctgggggagccgcccccgacacggcccacggtgggcaccaatcttactgacatcgtggcacagagaaagatcaccatccgggagcttggggggtgcatgggccccatctggtccagttactatggaaactgccgttctctcctgtttgtgatggacgcctctgaccccacccagctctctgcatcctgtgtgcagctcttaggtctcctttctgcagaacaacttgcagaagcatcggtgctgatactcttcaataaaatgcttccagacatcattgcttgtgccaagcagaacatcaccacggcagaaatcagcgcccgtgaaggcactggcttagcaggggtgctggcctggctccaggccacccacagagccaacgattgactgcacggcagaggcgcagctggcctgagctggggagaggtggcagagggcagtatggctttgctgccaatagtttcttctcacaggggcagaataacccaaagtaaccctacatgatggggctctgtgctgagatgcaatgatgtgtaaactgaggcatgtggagatggaagttgacatctggcctctgaaaaaagtgtccccaggggctaggcatggtggctcacacctgtaatcccagcactttgagaggccgaggcgggtgtatcacctgaggtcgggagttcgagactagcctgaccaacatgggaaccatgtctaaaaatccagaattagctgggtgtgctagcacatgcctgtaatcccagctacttgagaggctgagacaggagaaccccttgaacccaggaagcggaggttgcagtgagccaagatcacgcc

SEQ ID NO: 71636 - DNA, 683 bp, Homo sapiens
taaatgccatgcacaaattacttcatttaatttccataacatctacaaaataagttatataattaaagccattttacagatgaaaaatctaggcagaaggatgttaagtaactaaggtcacacagctggtgaatggaagagcagagtcttgaacccagaagccatagcttcaaggtccatgctcagaaccagtattccacactgtcttcactacgtcaaatgggaacagtgataataacatccacacaagggtgttgtgaagattaaatgagttaatgcacgtaaagggccaggcccccagttagaggtagatcctcatggtgattaacaatgcagcctgacaggctcccatcattcactggctgtgtgaacttgggcaagttactgacccttactaggcctgttttcttctctggaaaatgaagatgaaaacagtaactctaccctacatggttgtaagaaattaataagacaatacctgttaagtgcttagcacagggcctggcatatagtaaattctcaagagattttgaggtctgtttttaattattaataagttctcactaaagttagattccttctcagacaccttccactgatcaaagagtctcatcaaagcaagttcttccctccctggtcccctttggctttctgaaatcattaattaaaagaaaggccctagg

SEQ ID NO: 71637 - DNA, 433 bp, Homo sapiens
ttgtgccacagctttccaccctgggcgatggagacagactcatctcaacaacaacaacaacaacaacaacgaaaaggaatcaagtattgatacattctacaatgtgaatgaaccttgaaaacattatttgagtgaaagaagccagatataaaatgccacatattgtatgattccatgcacatgaaatgtctccaatgggcaaatccgtagagccagaaagtagattagtggttgccaggagctatgaggaggagaggactgctaatgcatacagagtttccttctggaatgatgaaagtgttctgaattagatagtagtgatagttgcccagctttgacaatagagtaaaaaccattgaatgctactgtttacagtggtggatttttatgtatattataactcaataaaaagatgatctaatccatggaaaat

SEQ ID NO: 71638 - DNA, 660 bp, Homo sapiens
ggtccttgaagccagacttaggtaccgtttctttcatcccttgctagttcctaatcgtagacacaaaccttccacatccatccaggcggatggcagtgcttcttgtagaaagcaatgtcactaaggcagtgtcactaagggaaacaggacaaggcaacagttgtgttcagagttttgactggcgtctgattggaattagaaggaagattattttgcccataacctaggtaccgtgaccccaagctccttttggcaagacccttgaacgtccacaaaacccgtaacgccttgcctggaagaaagggaaaaaggagagttgcagcccacctaagagagtcaaaggctgtggcctgcctggtggtgttttataggaactggctcagggaggctgcatgtcctttgttttctgaggccttgttcccacgtggcctcccacttgaggcccaggaatattgcagcaatgccgaagagtgggtggacaaatagccttattattaacctaagttggaaacatggctttttgagtgtcttcattcacagatgcagtcacaaaatattaatactctttttttgaacatgacaaaacaaagtattcatttaaacctcctttgtccacgtccatggtaaaagagcacctcaggcaggggagaaaaaaaaaaa

SEQ ID NO: 71639 - DNA, 437 bp, Homo sapiens
aatttagtgttatccatttgattcctgattcagaaatatcaataaaatcctatgttaaattaatctttaccaaaaacaggcaagttaactctgttgttttaattcaacagtccaacattatttaggtgttacagagtgtaaatatatttctttgggagttattttctttttaaaatctttttatagcttggcaatgtccaaagtcaaatatcacctaaactggttagattacttctacagctaataatattgcaggcactggcgccctctggtggttatgaagacaaattcttaatggctacttgacctacagcaaaagccatttctgtaccataaaaatttgttgtgcaatattagaattatcatatgtttcctacatctgacagcacctaaaatgtttgataatattaacatgtatctaagaggaaaaaagagtt

SEQ ID NO: 71640 - DNA, 3320 bp, Homo sapiens
tgcggggcggggcgtgggccaagcggcccgcaggaggcggcggcggccgttcagtcttgttgttccccgccgccgccgtcgctgacccagcccgccaggcgctcctgaccgtcgcttcctccggtcccaggtccccggccctcgcctcagccccggcccctggtccccagccctcgtcgcagccccggccgcccgccgccgccatgtccaaggaggagcgccccggtcgggaggagatcctggagtgccaggtgatgtgggagcctgacagtaagaagaacacgcagatggaccgcttccgggcggctgtgggcgccgcctgcggcctggcgctggagagttatgatgacttgtaccattggtccgttgagtcatattcagacttctgggcagagttctggaaattcagtggaattgtcttctcacgtgtgtatgatgaggttgtggacacatcgaaaggaatcgcagatgtccccgagtggttcaaaggcagtcggctcaactatgcagaaaacctcctgcggcacaaagagaatgacagagttgccctttacattgcaagggaaggcaaagaggaaattgtgaaggtgacttttgaagagctgaggcaagaagtggctttgtttgcagcagcaatgaggaaaatgggtgtgaagaaaggagatcgggttgttggttatttacccaacagtgagcacgctgtcgaggcgatgctggctgcggcaagcattggtgccatctggagctccacgtccccggacttcggtgtgaatggtgtgctggaccggttttctcaaattcagccaaagctcatcttctctgtggaggctgttgtctataatggcaaagagcacaaccacatggaaaagctgcagcaggtggttaaaggcctaccagacttgaagaaagtggtggtgattccttatgtgtcctccagagagaacatagacctttcaaagattccaaacagtgtgtttctggatgactttcttgccaccggcaccagtgagcaggccccgcagctggagttcgagcagctgcccttcagccacccactgttcatcatgttctcatcgggcaccacgggcgcacccaagtgcatggtgcattccgctgggggcaccctcatccagcatctgaaggagcacctgctgcacggcaacatgaccagcagtgacatcctcctgtgctacaccacggtcggctggatgatgtggaactggatggtgtcccttctggccacaggagcggccatggtcttgtacgatggctcccccctggtgcccacgcccaatgtgctctgggacctggttgacaggataggcatcactgtcctggtaactggggccaagtggctgtcagtgctggaagagaaggccatgaagccggtggaaacccacagtctccagatgctccacacgatcctgtccactggctccccactgaaagcccagagctacgagtatgtctacaggtgcatcaagagcagcatcctcctgggctccatctcaggaggcaccgacatcatctcctgcttcatgggccacaatttttctcttcctgtgtataaaggggagattcaggcccggaacctgggcatggccgtggaagcgtggaacgaggaaggaaaggcggtctggggagagagcggcgagctggtgtgtactaagccgatcccttgccagcccacacacttctggaacgatgagaacggcaacaagtacaggaaggcgtatttctccaaattcccaggtatctgggctcatggcgactactgcagaatcaaccccaagaccgggggcatcgtcatgcttggccggagtgacggcaccctcaaccccaacggggtgcggttcggcagctcggaaatctataacattgtggaatccttcgaggaggtggaggacagcctgtgtgtcccccagtataacaagtacagggaggagagggtgatcctcttcctgaagatggcctccgggcacgccttccagcctgacttggttaagaggatccgtgacgccatccgcatgggcttgtctgcgcgacacgtgcccagcctcatcctggaaaccaagggcatcccgtatacgctcaacggcaagaaagtggaagttgccgtcaaacagatcatcgctggaaaagccgtggagcaaggaggtgctttctcgaaccccgagaccctggatctgtaccgggacatccctgagctgcagggcttctgagtcagactggctggcgtgtcactcagccgcacccgtgtgcactgtaacttttgtgtgctcaagaaattatacagaaacctacagctgttgtaaaaggatgctcgcaccaagtgttctgtaggcttggggagggatcgtttctctgttttgttaaatctggtgggtacctggatcttccacacgagtgggattctggccttcagagaccaggagggagtgtctgggccgcaggtgtggcactgtggtgagagtgtgtgtctttgcacacacagtgcagcgggaacggtggggctggctggtgctgaagacagacacactcctgagccaaggtcttgtcttcaacctccccgtcccgttgtcccattttgctctgtgaaggtgcaaatccctttcttcccttcccatctcaggctctcctgttttccctcagggtccagtatgcctttgagctttagctgttagaaaggaacccccgtgacttgacacagctttcacagctggctgctaggaccggcgggctgggtgttcacgtgtgtctgtgtcatggatgcaatgcaggccctggaggactgtgcgtcacccgtcaaccagagcgtgcctccgggccagcttccctccaaggaatgagtggatttcatacaggatctctttattgcacagactgaatggctttacatgtttctaatgtgaattaggcatgtgaagcagtgggtgtccacccgtgtccctcatgggtgagccctccagctgtgagcccaggcagtgtggtcaccgagtgaggaccctcctcaccaggaaccgcatccctgtgctgcctccacctgagagttgctagggggttcttgtcgagatcatgtcatcagcacccctaagtcaagtcacgggtttccatagccaggcagttggtatgtacaattcagttcagcgtatgaacttgtatctctaatctgatgtccatttttatattttttgaaactgagcacaatgaaatcctttcttgaatcattttccttttggattataaaaatatgggggaaagtgctatgatgaattttatgcaataaatgtatacatgtgtgcacatgcacccatgctgtg

SEQ ID NO: 71641 - DNA, 2918 bp, Homo sapiens
gggctaggtacgaggccgggtggttaatacggccgagggttgtggacacatcgaaaggaatcgcagatgtccccgagtggttcaaaggcagtcggctcaactatgcagaaaacctcctgcggcacaaagagaatgacagagttgccctttacattgcaagggaaggcaaagaggaaattgtgaaggtgacttttgaagagctgaggcaagaagtggctttgtttgcagcagcaatgaggaaaatgggtgtgaagaaaggagatcgggttgttggttatttacccaacagtgagcacgctgtcgaggcgatgctggctgcggcaagcattggtgccatctggagctccacgtccccggacttcggtgtgaatggtgtgctggaccggttttctcaaattcagccaaagctcatcttctctgtggaggctgttgtctataatggcaaagagcacaaccacatggaaaagctgcagcaggtggttaaaggcctaccagacttgaagaaagtggtggtgattccttatgtgtcctccagagagaacatagacctttcaaagattccaaacagtgtgtttctggatgactttcttgccaccggcaccagtgagcaggccccgcagctggagttcgagcagctgcccttcagccacccactgttcatcatgttctcatcgggcaccacgggcgcacccaagtgcatggtgcattccgctgggggcaccctcatccagcatctgaaggagcacctgctgcacggcaacatgaccagcagtgacatcctcctgtgctacaccacggtcggctggatgatgtggaactggatggtgtcccttctggccacaggagcggccatggtcttgtacgatggctcccccctggtgcccacgcccaatgtgctctgggacctggttgacaggataggcatcactgtcctggtaactggggccaagtggctgtcagtgctggaagagaaggccatgaagccggtggaaacccacagtctccagatgctccacacgatcctgtccactggctccccactgaaagcccagagctacgagtatgtctacaggtgcatcaagagcagcatcctcctgggctccatctcaggaggcaccgacatcatctcctgcttcatgggccacaatttttctcttcctgtgtataaaggggagattcaggcccggaacctgggcatggccgtggaagcgtggaacgaggaaggaaaggcggtctggggagagagcggcgagctggtgtgtactaagccgatcccttgccagcccacacacttctggaacgatgagaacggcaacaagtacaggaaggcgtatttctccaaattcccaggtatctgggctcatggcgactactgcagaatcaaccccaagaccgggggcatcgtcatgcttggccggagtgacggcaccctcaaccccaacggggtgcggttcggcagctcggaaatctataacattgtggaatccttcgaggaggtggaggacagcctgtgtgtcccccagtataacaagtacagggaggagagggtgatcctcttcctgaagatggcctccgggcacgccttccagcctgacttggttaagaggatccgtgacgccatccgcatgggcttgtctgcgcgacacgtgcccagcctcatcctggaaaccaagggcatcccgtatacgctcaacggcaagaaagtggaagttgccgtcaaacagatcatcgctggaaaagccgtggagcaaggaggtgctttctcgaaccccgagaccctggatctgtaccgggacatccctgagctgcagggcttctgagtcagactggctggcgtgtcactcagccgcacccgtgtgcactgtaacttttgtgtgctcaagaaattatacagaaacctacagctgttgtaaaaggatgctcgcaccaagtgttctgtaggcttggggagggatcgtttctctgttttgttaaatctggtgggtacctggatcttccacacgagtgggattctggccttcagagaccaggagggagtgtctgggccgcaggtgtggcactgtggtgagagtgtgtgtctttgcacacacagtgcagcgggaacggtggggctggctggtgctgaagacagacacactcctgagccaaggtcttgtcttcaacctccccgtcccgttgtcccattttgctctgtgaaggtgcaaatccctttcttcccttcccatctcaggctctcctgttttccctcagggtccagtatgcctttgagctttagctgttagaaaggaacccccgtgacttgacacagctttcacagctggctgctaggaccggcgggctgggtgttcacgtgtgtctgtgtcatggatgcaatgcaggccctggaggactgtgcgtcacccgtcaaccagagcgtgcctccgggccagcttccctccaaggaatgagtggatttcatacaggatctctttattgcacagactgaatggctttacatgtttctaatgtgaattaggcatgtgaagcagtgggtgtccacccgtgtccctcatgggtgagccctccagctgtgagcccaggcagtgtggtcaccgagtgaggaccctcctcaccaggaaccgcatccctgtgctgcctccacctgagagttgctagggggttcttgtcgagatcatgtcatcagcacccctaagtcaagtcacgggtttccatagccaggcagttggtatgtacaattcagttcagcgtatgaacttgtatctctaatctgatgtccatttttatattttttgaaactgagcacaatgaaatcctttcttgaatcattttccttttggattataaaaatatgggggaaagtgctatgatgaattttatgcaataaatgtatacatgtgtgcacatgcacccatgctgtg

SEQ ID NO: 71642 - DNA, 3000 bp, Homo sapiens
acctgcagattggaggttacatttcaacacgagatgagggtggggacaaacatccacactcttatcagcaccttcctctcaggctggctgggaggattaaataagctgctgctctgcaaagcgtgcacagtcagctctcagtgatcctgcctgtcattgtgcggccgcggtgggctctgtcgcctgaagcacctgagtcagggtgggcagattcttcacaggcaggcccgggtgcctgtcccatggactgtgggaccctgccgaccttaataaattataaccaggtgccagagcgctggctttctttcatgcaacctcggattttgtgccccaggtgtatggatggaggccatgatgcatggaggctaggaggaaaaccagacagggtttaccagccccctggttggcctggctattttttctgaataatattcatcagcagttgatataaaatgagggcatccagcagaatcatgttagccacttcatttagcccgacaccccaggggctggactcccactgcagtccatcctttgattgtggatgccacagataaagcagaaacgggtacgtgcccatctgtggagaattgacggggccgggggagccaccctgtgggcttttcattcttagaagagctttaacaaagtgtgtttctggatgactttcttgccaccggcaccagtgagcaggccccgcagctggagttcgagcagctgcccttcagccacccactgttcatcatgttctcatcgggcaccacgggcgcacccaagtgcatggtgcattccgctgggggcaccctcatccagcatctgaaggagcacctgctgcacggcaacatgaccagcagtgacatcctcctgtgctacaccacggtcggctggatgatgtggaactggatggtgtcccttctggccacaggagcggccatggtcttgtacgatggctcccccctggtgcccacgcccaatgtgctctgggacctggttgacaggataggcatcactgtcctggtaactggggccaagtggctgtcagtgctggaagagaaggccatgaagccggtggaaacccacagtctccagatgctccacacgatcctgtccactggctccccactgaaagcccagagctacgagtatgtctacaggtgcatcaagagcagcatcctcctgggctccatctcaggaggcaccgacatcatctcctgcttcatgggccacaatttttctcttcctgtgtataaaggggagattcaggcccggaacctgggcatggccgtggaagcgtggaacgaggaaggaaaggcggtctggggagagagcggcgagctggtgtgtactaagccgatcccttgccagcccacacacttctggaacgatgagaacggcaacaagtacaggaaggcgtatttctccaaattcccaggtatctgggctcatggcgactactgcagaatcaaccccaagaccgggggcatcgtcatgcttggccggagtgacggcaccctcaaccccaacggggtgcggttcggcagctcggaaatctataacattgtggaatccttcgaggaggtggaggacagcctgtgtgtcccccagtataacaagtacagggaggagagggtgatcctcttcctgaagatggcctccgggcacgccttccagcctgacttggttaagaggatccgtgacgccatccgcatgggcttgtctgcgcgacacgtgcccagcctcatcctggaaaccaagggcatcccgtatacgctcaacggcaagaaagtggaagttgccgtcaaacagatcatcgctggaaaagccgtggagcaaggaggtgctttctcgaaccccgagaccctggatctgtaccgggacatccctgagctgcagggcttctgagtcagactggctggcgtgtcactcagccgcacccgtgtgcactgtaacttttgtgtgctcaagaaattatacagaaacctacagctgttgtaaaaggatgctcgcaccaagtgttctgtaggcttggggagggatcgtttctctgttttgttaaatctggtgggtacctggatcttccacacgagtgggattctggccttcagagaccaggagggagtgtctgggccgcaggtgtggcactgtggtgagagtgtgtgtctttgcacacacagtgcagcgggaacggtggggctggctggtgctgaagacagacacactcctgagccaaggtcttgtcttcaacctccccgtcccgttgtcccattttgctctgtgaaggtgcaaatccctttcttcccttcccatctcaggctctcctgttttccctcagggtccagtatgcctttgagctttagctgttagaaaggaacccccgtgacttgacacagctttcacagctggctgctaggaccggcgggctgggtgttcacgtgtgtctgtgtcatggatgcaatgcaggccctggaggactgtgcgtcacccgtcaaccagagcgtgcctccgggccagcttccctccaaggaatgagtggatttcatacaggatctctttattgcacagactgaatggctttacatgtttctaatgtgaattaggcatgtgaagcagtgggtgtccacccgtgtccctcatgggtgagccctccagctgtgagcccaggcagtgtggtcaccgagtgaggaccctcctcaccaggaaccgcatccctgtgctgcctccacctgagagttgctagggggttcttgtcgagatcatgtcatcagcacccctaagtcaagtcacgggtttccatagccaggcagttggtatgtacaattcagttcagcgtatgaacttgtatctctaatctgatgtccatttttatattttttgaaactgagcacaatgaaatcctttcttgaatcattttccttttggattataaaaatatgggggaaagtgctatgatgaattttatgcaataaatgtatacatgtgtgcacatgcacccatgctgtg

SEQ ID NO: 71643 - DNA, 3529 bp, Homo sapiens
tgcggggcggggcgtgggccaagcggcccgcaggaggcggcggcggccgttcagtcttgttgttccccgccgccgccgtcgctgacccagcccgccaggcgctcctgaccgtcgcttcctccggtcccaggtccccggccctcgcctcagccccggcccctggtccccagccctcgtcgcagccccggccgcccgccgccgccatgtccaaggaggagcgccccggtcgggaggagatcctggagtgccaggtgatgtgggagcctgacagtaagaagaacacgcagatggaccgcttccgggcggctgtgggcgccgcctgcggcctggcgctggagagttatgatgacttgtaccattggtccgttgagtcatattcagacttctgggcagagttctggaaattcagtggaattgtcttctcacgtgtgtatgatgaggttgtggacacatcgaaaggaatcgcagatgtccccgagtggttcaaaggcagtcggctcaactatgcagaaaacctcctgcggcacaaagagaatgacagagttgccctttacattgcaagggaaggcaaagaggaaattgtgaaggtgacttttgaagagctgaggcaagaagtggctttgtttgcagcagcaatgaggaaaatgggtgtgaagaaaggagatcgggttgttggttatttacccaacagtgagcacgctgtcgaggcgatgctggctgcggcaagcattggtgccatctggagctccacgtccccggacttcggtgtgaatggtgtgctggaccggttttctcaaattcagccaaagctcatcttctctgtggaggctgttgtctataatggcaaagagcacaaccacatggaaaagctgcagcaggtggttaaaggcctaccagacttgaagaaagtggtggtgattccttatgtgtcctccagagagaacatagacctttcaaagattccaaacagtgtgtttctggatgactttcttgccaccggcaccagtgagcaggccccgcagctggagttcgagcagctgcccttcagccacccactgttcatcatgttctcatcgggcaccacgggcgcacccaagtgcatggtgcattccgctgggggcaccctcatccagcatctgaaggagcacctgctgcacggcaacatgaccagcagtgacatcctcctgtgctacaccacggtcggctggatgatgtggaactggatggtgtcccttctggccacaggagcggccatggtcttgtacgatggctcccccctggtgcccacgcccaatgtgctctgggacctggttgacaggataggcatcactgtcctggtaactggggccaagtggctgtcagtgctggaagagaaggccatgaagccggtggaaacccacagtctccagatgctccacacgatcctgtccactggctccccactgaaagcccagagctacgagtatgtctacaggtgcatcaagagcagcatcctcctgggctccatctcaggaggcaccgacatcatctcctgcttcatgggccacaatttttctcttcctgtgtataaaggggagattcaggcccggaacctgggcatggccgtggaagcgtggaacgaggaaggaaaggcggtctggggagagagcggcgagctggtgtgtactaagccgatcccttgccagcccacacacttctggaacgatgagaacggcaacaagtacaggaaggcgtatttctccaaattcccaggtatctgggctcatggcgactactgcagaatcaaccccaagaccgggggcatcgtcatgcttggccggagtgacggcaccctcaaccccaacggggtgcggttcggcagctcggaaatctataacattgtggaatccttcgaggaggtggaggacagcctgtgtgtcccccagtataacaagtacagggaggagagggtgatcctcttcctgaagatggcctccgggcacgccttccagcctgacttggttaagaggatccgtgacgccatccgcatgggcttgtctgcgcgacacgtgcccagcctcatcctggaaaccaagggcatcccgtatacgctcaacggcaagaaagtggaagttgccgtcaaacagatcatcgctggaaaagccgtggagcaaggaggtgctttctcgaaccccgagaccctggatctgtaccgggacatccctgagctgcagggcttctgagtcagactggctggcgtgtcactcagccgcacccgtgtgcactgtaacttttgtgtgctcaagaaattatacagaaacctacagctgttgtaaaaggatgctcgcaccaagtgttctgtaggcttggggagggatcgtttctctgttttgttaaatctggtgggtacctggatcttccacacgagtgggattctggccttcagagaccaggagggagtgtctgggccgcaggtgtggcactgtggtgagagtgtgtgtctttgcacacacagtgcagcgggaacggtggggctggctggtgctgaagacagacacactcctgagccaaggtcttgtcttcaacctccccgtcccgttgtcccattttgctctgtgaaggtgcaaatccctttcttcccttcccatctcaggctctcctgttttccctcagggtccagtatgcctttgagctttagctgttagaaaggaacccccgtgacttgacacagctttcacagctggctgctaggaccggcgggctgggtgttcacgtgtgtctgtgtcatggatgcaatgcaggccctggaggactgtgcgtcacccgtcaaccagagcgtgcctccgggccagcttccctccaaggaatgagtggatttcatacaggatctctttattgcacagactgaatggctttacatgtttctaatgtgaattaggcatgtgaagcagtgggtgtccacccgtgtccctcatgggtgagccctccagctgtgagcccaggcagtgtggtcaccgagtgaggaccctcctcaccaggaaccgcatccctgtgctgcctccacctgagagttgctagggggttcttgtcgagatcatgtcatcagcacccctaagtcaagtcacgggtttccatagccaggcagttggtatgtacaattcagttcagcgtatgaacttgtatctctaatctgatgtccatttttatattttttgaaactgagcacaatgaaatcctttcttgaatcattttccttttggattataaaaatatgggggaaagtgctatgatgaattttatgcaataaatgtatacatgtgtgcacatgcacccatgctgtgaaaaaaaaaacacaacacaaaaaaacaaaagcaaataagaaacaaaaaggcacgagacgaccgaacggcgacgagacagagccacaaggcgggccacacgccaccgcagacggagagcggcgggggggaggggtcagagcggaacagagtgacagcgccggcgtggggccgaggggcagtgcagtacccagcagcgggtcggggaggag

SEQ ID NO: 71644 - DNA, 1776 bp, Homo sapiens
gcttacggctaggtacgaggctgcgtgtgggagattcaggcccggaacctgggcatggccgtggaagcgtggaacgaggaaggaaaggcggtctggggagagagcggcgagctggtgtgtactaagccgatcccttgccagcccacacacttctggaacgatgagaacggcaacaagtacaggaaggcgtatttctccaaattcccaggtatctgggctcatggcgactactgcagaatcaaccccaagaccgggggcatcgtcatgcttggccggagtgacggcaccctcaaccccaacggggtgcggttcggcagctcggaaatctataacattgtggaatccttcgaggaggtggaggacagcctgtgtgtcccccagtataacaagtacagggaggagagggtgatcctcttcctgaagatggcctccgggcacgccttccagcctgacttggttaagaggatccgtgacgccatccgcatgggcttgtctgcgcgacacgtgcccagcctcatcctggaaaccaagggcatcccgtatacgctcaacggcaagaaagtggaagttgccgtcaaacagatcatcgctggaaaagccgtggagcaaggaggtgctttctcgaaccccgagaccctggatctgtaccgggacatccctgagctgcagggcttctgagtcagactggctggcgtgtcactcagccgcacccgtgtgcactgtaacttttgtgtgctcaagaaattatacagaaacctacagctgttgtaaaaggatgctcgcaccaagtgttctgtaggcttggggagggatcgtttctctgttttgttaaatctggtgggtacctggatcttccacacgagtgggattctggccttcagagaccaggagggagtgtctgggccgcaggtgtggcactgtggtgagagtgtgtgtctttgcacacacagtgcagcgggaacggtggggctggctggtgctgaagacagacacactcctgagccaaggtcttgtcttcaacctccccgtcccgttgtcccattttgctctgtgaaggtgcaaatccctttcttcccttcccatctcaggctctcctgttttccctcagggtccagtatgcctttgagctttagctgttagaaaggaacccccgtgacttgacacagctttcacagctggctgctaggaccggcgggctgggtgttcacgtgtgtctgtgtcatggatgcaatgcaggccctggaggactgtgcgtcacccgtcaaccagagcgtgcctccgggccagcttccctccaaggaatgagtggatttcatacaggatctctttattgcacagactgaatggctttacatgtttctaatgtgaattaggcatgtgaagcagtgggtgtccacccgtgtccctcatgggtgagccctccagctgtgagcccaggcagtgtggtcaccgagtgaggaccctcctcaccaggaaccgcatccctgtgctgcctccacctgagagttgctagggggttcttgtcgagatcatgtcatcagcacccctaagtcaagtcacgggtttccatagccaggcagttggtatgtacaattcagttcagcgtatgaacttgtatctctaatctgatgtccatttttatattttttgaaactgagcacaatgaaatcctttcttgaatcattttccttttggattataaaaatatgggggaaagtgctatgatgaattttatgcaataaatgtatacatgtgtgcacatgcacccatgctgtg

SEQ ID NO: 71645 - DNA, 3165 bp, Homo sapiens
tgcggggcggggcgtgggccaagcggcccgcaggaggcggcggcggccgttcagtcttgttgttccccgccgccgccgtcgctgacccagcccgccaggcgctcctgaccgtcgcttcctccggtcccaggtccccggccctcgcctcagccccggcccctggtccccagccctcgtcgcagccccggccgcccgccgccgccatgtccaaggaggagcgccccggtcgggaggagatcctggagtgccaggtgatgtgggagcctgacagtaagaagaacacgcagatggaccgcttccgggcggctgtgggcgccgcctgcggcctggcgctggagagttatgatgacttgtaccattggtccgttgagtcatattcagacttctgggcagagttctggaaattcagtggaattgtcttctcacgtgtgtatgatgaggttgtggacacatcgaaaggaatcgcagatgtccccgagtggttcaaaggcagtcggctcaactatgcagaaaacctcctgcggcacaaagagaatgacagagttgccctttacattgcaagggaaggcaaagaggaaattgtgaaggtgacttttgaagagctgaggcaagaagtggctttgtttgcagcagcaatgaggaaaatgggtgtgaagaaaggagatcgggttgttggttatttacccaacagtgagcacgctgtcgaggcgatgctggctgcggcaagcattggtgccatctggagctccacgtccccggacttcggtgtgaatggtgtgctggaccggttttctcaaattcagccaaagctcatcttctctgtggaggctgttgtctataatggcaaagagcacaaccacatggaaaagctgcagcaggtggttaaaggcctaccagacttgaagaaagtggtggtgattccttatgtgtcctccagagagaacatagacctttcaaagattccaaacagtgtgtttctggatgactttcttgccaccggcaccagtgagcaggccccgcagctggagttcgagcagctgcccttcagccacccactgttcatcatgttctcatcgggcaccacgggcgcacccaagtgcatggtgcattccgctgggggcaccctcatccagcatctgaaggagcacctgctgcacggcaacatgaccagcagtgacatcctcctgtgctacaccacggtcggctggatgatgtggaactggatggtgtcccttctggccacaggagcggccatggtcttgtacgatggctcccccctggtgcccacgcccaatgtgctctgggacctggttgacaggataggcatcactgtcctggtaactggggccaagtggctgtcagtgctggaagagaaggccatgaagccggtggaaacccacagtctccagatgctccacacgatcctgtccactggctccccactgaaagcccagagctacgagtatgtctacaggtgcatcaagagcagcatcctcctgggctccatctcaggaggcaccgacatcatctcctgcttcatgggccacaatttttctcttcctgtgtataaaggggagattcaggcccggaacctgggcatggccgtggaagcgtggaacgaggaaggaaaggcggtctggggagagagcggcgagctggtgtgtactaagccgatcccttgccagcccacacacttctggaacgatgagaacggcaacaagtacaggaaggcgtatttctccaaattcccaggtatctgggctcatggcgactactgcagaatcaaccccaagaccgggggcatcgtcatgcttggccggagtgacggcaccctcaaccccaacggggtgcggttcggcagctcggaaatctataacattgtggaatccttcgaggaggtggaggacagcctgtgtgtcccccagtataacaagtacagggaggagagggtgatcctcttcctgaagatggcctccgggcacgccttccagcctgacttggttaagaggatccgtgacgccatccgcatgggcttgtctgcgcgacacgtgcccagcctcatcctggaaaccaagggcatcccgtatacgctcaacggcaagaaagtggaagttgccgtcaaacagatcatcgctggaaaagccgtggagcaaggaggtgctttctcgaaccccgagaccctggatctgtaccgggacatccctgagctgcagggcttctgagtcagactggctggcgtgtcactcagccgcacccgtgtgcactgtaacttttgtgtgctcaagaaattatacagaaacctacagctgttgtaaaaggatgctcgcaccaagtgttctgtaggcttggggagggatcgtttctctgttttgttaaatctggtgggtacctggatcttccacacgagtgggattctggccttcagagaccaggagggagtgtctgggccgcaggtgtggcactgtggtgagagtgtgtgtctttgcacacacagtgcagcgggaacggtggggctggctggtgctgaagacagacacactcctgagccaaggtcttgtcttcaacctccccgtcccgttgtcccattttgctctgtgaaggtgcaaatccctttcttcccttcccatctcaggctctcctgttttccctcagggtccagtatgcctttgagctttagctgttagaaaggaatgagtggatttcatacaggatctctttattgcacagactgaatggctttacatgtttctaatgtgaattaggcatgtgaagcagtgggtgtccacccgtgtccctcatgggtgagccctccagctgtgagcccaggcagtgtggtcaccgagtgaggaccctcctcaccaggaaccgcatccctgtgctgcctccacctgagagttgctagggggttcttgtcgagatcatgtcatcagcacccctaagtcaagtcacgggtttccatagccaggcagttggtatgtacaattcagttcagcgtatgaacttgtatctctaatctgatgtccatttttatattttttgaaactgagcacaatgaaatcctttcttgaatcattttccttttggattataaaaatatgggggaaagtgctatgatgaattttatgcaataaatgtatacatgtgtgcacatgcacccatgctgtg

SEQ ID NO: 71646 - DNA, 2737 bp, Homo sapiens
tgcggggcggggcgtgggccaagcggcccgcaggaggcggcggcggccgttcagtcttgttgttccccgccgccgccgtcgctgacccagcccgccaggcgctcctgaccgtcgcttcctccggtcccaggtccccggccctcgcctcagccccggcccctggtccccagccctcgtcgcagccccggccgcccgccgccgccatgtccaaggaggagcgccccggtcgggaggagatcctggagtgccaggtgatgtgggagcctgacagtaagaagaacacgcagatggaccgcttccgggcggctgtgggcgccgcctgcggcctggcgctggagagttatgatgacttgtaccattggtccgttgagtcatattcagacttctgggcagagttctggaaattcagtggaattgtcttctcacgtgtgtatgatgaggttgtggacacatcgaaaggaatcgcagatgtccccgagtggttcaaaggcagtcggctcaactatgcagaaaacctcctgcggcacaaagagaatgacagagttgccctttacattgcaagggaaggcaaagaggaaattgtgaaggtgacttttgaagagctgaggcaagaagtggctttgtttgcagcagcaatgaggaaaatgggtgtgaagaaaggagatcgggttgttggttatttacccaacagtgagcacgctgtcgaggcgatgctggctgcggcaagcattggtgccatctggagctccacgtccccggacttcggtgtgaatggtgtgctggaccggttttctcaaattcagccaaagctcatcttctctgtggaggctgttgtctataatggcaaagagcacaaccacatggaaaagctgcagcaggtggttaaaggcctaccagacttgaagaaagtggtggtgattccttatgtgtcctccagagagaacatagacctttcaaagattccaaacagtgtgtttctggatgactttcttgccaccggcaccagtgagcaggccccgcagctggagttcgagcagctgcccttcagccacccactgttcatcatgttctcatcgggcaccacgggcgcacccaagtgcatggtgcattccgctgggggcaccctcatccagcatctgaaggagcacctgctgcacggcaacatgaccagcagtgacatcctcctgtgctacaccacggtcggctggatgatgtggaactggatggtgtcccttctggccacaggagcggccatggtcttgtacgatggctcccccctggtgcccacgcccaatgtgctctgggacctggttgacaggatagggtatctgggctcatggcgactactgcagaatcaaccccaagaccgggggcatcgtcatgcttggccggagtgacggcaccctcaaccccaacggggtgcggttcggcagctcggaaatctataacattgtggaatccttcgaggaggtggaggacagcctgtgtgtcccccagtataacaagtacagggaggagagggtgatcctcttcctgaagatggcctccgggcacgccttccagcctgacttggttaagaggatccgtgacgccatccgcatgggcttgtctgcgcgacacgtgcccagcctcatcctggaaaccaagggcatcccgtatacgctcaacggcaagaaagtggaagttgccgtcaaacagatcatcgctggaaaagccgtggagcaaggaggtgctttctcgaaccccgagaccctggatctgtaccgggacatccctgagctgcagggcttctgagtcagactggctggcgtgtcactcagccgcacccgtgtgcactgtaacttttgtgtgctcaagaaattatacagaaacctacagctgttgtaaaaggatgctcgcaccaagtgttctgtaggcttggggagggatcgtttctctgttttgttaaatctggtgggtacctggatcttccacacgagtgggattctggccttcagagaccaggagggagtgtctgggccgcaggtgtggcactgtggtgagagtgtgtgtctttgcacacacagtgcagcgggaacggtggggctggctggtgctgaagacagacacactcctgagccaaggtcttgtcttcaacctccccgtcccgttgtcccattttgctctgtgaaggtgcaaatccctttcttcccttcccatctcaggctctcctgttttccctcagggtccagtatgcctttgagctttagctgttagaaaggaatgagtggatttcatacaggatctctttattgcacagactgaatggctttacatgtttctaatgtgaattaggcatgtgaagcagtgggtgtccacccgtgtccctcatgggtgagccctccagctgtgagcccaggcagtgtggtcaccgagtgaggaccctcctcaccaggaaccgcatccctgtgctgcctccacctgagagttgctagggggttcttgtcgagatcatgtcatcagcacccctaagtcaagtcacgggtttccatagccaggcagttggtatgtacaattcagttcagcgtatgaacttgtatctctaatctgatgtccatttttatattttttgaaactgagcacaatgaaatcctttcttgaatcattttccttttggattataaaaatatgggggaaagtgctatgatgaattttatgcaataaatgtatacatgtgtgcacatgcacccatgctgtg

SEQ ID NO: 71647 - DNA, 1613 bp, Homo sapiens
cggctaggtagcgaggctgggtgggcgtatttctccaaatcccaggtatctgggctcatggcgactactgcagaatcaaccccaagaccgggggcatcgtcatgcttggccggagtgacggcaccctcaaccccaacggggtgcggttcggcagctcggaaatctataacattgtggaatccttcgaggaggtggaggacagcctgtgtgtcccccagtataacaagtacagggaggagagggtgatcctcttcctgaagatggcctccgggcacgccttccagcctgacttggttaagaggatccgtgacgccatccgcatgggcttgtctgcgcgacacgtgcccagcctcatcctggaaaccaagggcatcccgtatacgctcaacggcaagaaagtggaagttgccgtcaaacagatcatcgctggaaaagccgtggagcaaggaggtgctttctcgaaccccgagaccctggatctgtaccgggacatccctgagctgcagggcttctgagtcagactggctggcgtgtcactcagccgcacccgtgtgcactgtaacttttgtgtgctcaagaaattatacagaaacctacagctgttgtaaaaggatgctcgcaccaagtgttctgtaggcttggggagggatcgtttctctgttttgttaaatctggtgggtacctggatcttccacacgagtgggattctggccttcagagaccaggagggagtgtctgggccgcaggtgtggcactgtggtgagagtgtgtgtctttgcacacacagtgcagcgggaacggtggggctggctggtgctgaagacagacacactcctgagccaaggtcttgtcttcaacctccccgtcccgttgtcccattttgctctgtgaaggtgcaaatccctttcttcccttcccatctcaggctctcctgttttccctcagggtccagtatgcctttgagctttagctgttagaaaggaacccccgtgacttgacacagctttcacagctggctgctaggaccggcgggctgggtgttcacgtgtgtctgtgtcatggatgcaatgcaggccctggaggactgtgcgtcacccgtcaaccagagcgtgcctccgggccagcttccctccaaggaatgagtggatttcatacaggatctctttattgcacagactgaatggctttacatgtttctaatgtgaattaggcatgtgaagcagtgggtgtccacccgtgtccctcatgggtgagccctccagctgtgagcccaggcagtgtggtcaccgagtgaggaccctcctcaccaggaaccgcatccctgtgctgcctccacctgagagttgctagggggttcttgtcgagatcatgtcatcagcacccctaagtcaagtcacgggtttccatagccaggcagttggtatgtacaattcagttcagcgtatgaacttgtatctctaatctgatgtccatttttatattttttgaaactgagcacaatgaaatcctttcttgaatcattttccttttggattataaaaatatgggggaaagtgctatgatgaattttatgcaataaatgtatacatgtgtgcacatgcacccatgctgtg

SEQ ID NO: 71648 - DNA, 907 bp, Homo sapiens
agtgcgacggagactctcaccacaagtgtctgggccgcaggtgtggcactgtggtgagagtgtgtgtctttgcacacacagtgcagcgggaacggtggggctggctggtgctgaagacagacacactcctgagccaaggtcttgtcttcaacctccccgtcccgttgtcccattttgctctgtgaaggtgcaaatccctttcttcccttcccatctcaggctctcctgttttccctcagggtccagtatgcctttgagctttagctgttagaaaggaacccccgtgacttgacacagctttcacagctggctgctaggaccggcgggctgggtgttcacgtgtgtctgtgtcatggatgcaatgcaggccctggaggactgtgcgtcacccgtcaaccagagcgtgcctccgggccagcttccctccaaggaatgagtggatttcatacaggatctctttattgcacagactgaatggctttacatgtttctaatgtgaattaggcatgtgaagcagtgggtgtccacccgtgtccctcatgggtgagccctccagctgtgagcccaggcagtgtggtcaccgagtgaggaccctcctcaccaggaaccgcatccctgtgctgcctccacctgagagttgctagggggttcttgtcgagatcatgtcatcagcacccctaagtcaagtcacgggtttccatagccaggcagttggtatgtacaattcagttcagcgtatgaacttgtatctctaatctgatgtccatttttatattttttgaaactgagcacaatgaaatcctttcttgaatcattttccttttggattataaaaatatgggggaaagtgctatgatgaattttatgcaataaatgtatacatgtgtgcacatgcacccatgctgtg

SEQ ID NO: 71649 - DNA, 841 bp, Homo sapiens
tgcggggcggggcgtgggccaagcggcccgcaggaggcggcggcggccgttcagtcttgttgttccccgccgccgccgtcgctgacccagcccgccaggcgctcctgaccgtcgcttcctccggtcccaggtccccggccctcgcctcagccccggcccctggtccccagccctcgtcgcagccccggccgcccgccgccgccatgtccaaggaggagcgccccggtcgggaggagatcctggagtgccaggtgatgtgggagcctgacagtaagaagaacacgcagatggaccgcttccgggcggctgtgggcgccgcctgcggcctggcgctggagagttatgatgacttgtaccattggtccgttgagtcatattcagacttctgggcagagttctggaaattcagtggaattgtcttctcacgtgtgtatgatgaggttgtggacacatcgaaaggaatcgcagatgtccccgagtggttcaaaggcagtcggctcaactatgcagaaaacctcctgcggcacaaagagaatgacagagttgccctttacattgcaagggaaggcaaagaggaaattgtgaaggtgacttttgaagagctgaggcaagaagtggctttgtttgcagcagcaatgaggaaaatgggtatgtacaattcagttcagcgtatgaacttgtatctctaatctgatgtccatttttatattttttgaaactgagcacaatgaaatcctttcttgaatcattttccttttggattataaaaatatgggggaaagtgctatgatgaattttatgcaataaatgtatacatgtgtgcacatgcacccatgctgtg

SEQ ID NO: 71650 - DNA, 459 bp, Homo sapiens
agccttcccatgtgatgggtctgtctaggcagtgcctgccaggtatgtatcacaggcaaagcttccattttctgcgatcctgagtcttgaatttcagcatgaccacaggaggtcatttacttagcggatcctctggcaggaaggctcggctaaaacgtcaatcaccagatgtggggggttcattctaatttccatatcacctctcccactgctccctgaagagaagccccacctgtctgggatgttgcagtgtttgtctgggagagtagatatttgtcctcttggcaccttctcctttgttgctcactaatttaacacaatttgtcttgggcttctaaattttgagtctccctttgccattgcttgcaggaggcaccgacatcatctcctgcttcatgggccacaatttttctcttcctgtgtataaaggggagattcaggcccggaacctgggcatgg

SEQ ID NO: 71651 - DNA, 679 bp, Homo sapiens
agcacccctctaccacatcccctgcctatctccccctcctggaagggtagacaagggctaaggaccttctgtccctcctgacttccctgctgcctcccatccaacactttcaatgggggccaagggagagaaggagagtctggggctggttttagccagagagaagcggatggaggcggaacgctggcagaggacgttggtgggctgcgtcccagcttcgtcagccccacctggcctgaccccaccacacaggggtcggcttccatgcatcttggttctggggacccattctcagggaggtgggtcttggaaggagagaagatggcagcccgcattacccagagggaccccagcccctctctctgcatgacagctgggtgggaagattctgggcttgcatttggacaggtgttttaatcagatttcaacatcccatagacacgttaccttgggtaagtcaccgggactgccacagatgcaaaatagtgggaagaatccttgcttcgagtccctattctgctacttcctagttgtgtggcctcagacaatgcacctgccttctctgagccttagttcccatatctctaaaatggagatgatgatactgcacttattctcacaggatgtttgagaatattaagtgagttgatatatattaaagcgtttcaaacagtatctg

SEQ ID NO: 71652 - DNA, 697 bp, Homo sapiens
ggcagggaaatgccgtgggaggcagcagcacagattcttctgtcttttatccacagcaaaaatacccagcagtgacaacatccagtgctgatgggcaggcaggaggaccaggtcattgttttaacacaggtggaagaagcatgacttgcaaatgttctgcagttaattgggcactatcactttgaaaccaaacctggttagaatgaaaagcaccagcatggaagtgtacaagtttattctagtgttgctgggttattgtggagaagatctggaagcaacataaatgtgcctcacttgggagaatttatggtgtggttatctgggcatctagaaccaggaggataaactgttggcaagtgagagtcactgggggaacggtctatagtagtatcctaattgtgtatctttagtttattgtgagcatgtatgatgtctgttaatattttcctccagtagtagagaaaacgtgctaaggaaaaaaaaaaatgaagatggagagagtagaaacagcaagtgagaaggctttctgaaacatgtaaatggagtgggaaggactcaatgggctctcccaccccaccaaaaatatccttcttttaccttatggtttttataatgatcaaagtgagatttgcctgtactcccaccatgagatggcccagcatattgatggaaatccttccagacaaaatggctctgg

SEQ ID NO: 71653 - DNA, 706 bp, Homo sapiens
ctactactactactaaattcgcggccgcgtcgacgcaagttgtaagatcaatacaaaaatcaatattatttctatatactgtcaatgaaacactggaaattgaaaatcttaaaacataatacagccaaatgtggtggctcatggctataatcctgtactttgggaggctgctgttggaggattgtttgaggctgggagttcaagctcagcctgggaaacatagtgagacccttgtctctaccaaaaagaaaaagaaaaagaaaaaaattataattctgtctctcaacaaaatcataattttttttttaatttggccaggtttggtggcgggcatctgtagtcccagctcctgagctgaggctgaggtaggaggatcgcttgagcccaggagtttgaggctgcagtgagctatgataatgccactgcactcttgcctgggggacaagactgagaccttctctctctctcaaaaaaacacacacaaaaaaacatatatatatatatatagccacttacaatatcatttaaaaatgaaatacttaggaatgaatttgaaaagcagttgacctgttctctgaaaattacaaagcattactgagagattaccagatagagatttaccatctcaatattgagctgagatataccaaactcaatattgttaatatgatgattcttccaaaataaactattcaatgcaatacca

SEQ ID NO: 71654 - DNA, 832 bp, Homo sapiens
cttccttttgagaaatgcaacaagctctccagtggtcatctcctgatctgttggccttactggccctcaaatttcctattcatgcattacatatttatttatttactttgagacagagtgagactctgccaaaaaaaaaaaaaagtaatttagcaatgttgcaagttgtaagatcaatacaaaaatcaatattatttctatatactgtcaatgaaacactggaaattgaaaatcttaaaacataatacagccaaatgtggtggctcatggctataatcctgtactttgggaggctgctgttggaggattgtttgaggctgggagttcaagctcagcctgggaaacatagtgagacccttgtctctaccaaaaagaaaaagaaaaagaaaaaaattataattctgtctctcaacaaaatcataattttttttttaatttggccaggtttggtggcgggcatctgtagtcccagctcctgagctgaggctgaggtaggaggatcgcttgagcccaggagtttgaggctgcagtgagctatgataatgccactgcactcttgcctgggggacaagactgagaccttctctctctctcaaaaaaacacacacaaaaaaacatatatatatatatatagccacttacaatatcatttaaaaatgaaatacttaggaatgaatttgaaaagcagttgacctgttctctgaaaattacaaagcattactgagagattaccagatagagatttaccatctcaatattgagctgagatataccaaactcaatattgttaatatgatgattcttccaaaataaactattcaatgcaatacca

SEQ ID NO: 71655 - DNA, 449 bp, Homo sapiens
gggtcttgccatgaaggacattcaagcagttctgaggagaggcccaagtgaagaggaaccagttgccagcaccaccctgtcagctatgttaggcccctgcctatataaacaatttgattaaaaacatatatttaaaaattcatcagtacatgtgagatatgatgatttatcattgaagatttaggatgatgggcagagaaaggcaatctgttttgtctattgtccaatcagtgcacgtgaagatttgttacagtatccagaaaagactaaaaaagaccaagcctgttaaacaactccatcaaagaaaaacaaggaagccatccagctttgttctggactcagcagctaagatggcatgagcttcatcgtaaagcatagttctatgtcatgtctactggatgaatccaatgtggctggtcccttaataaaataagttgtaacataaaaaa

SEQ ID NO: 71656 - DNA, 450 bp, Homo sapiens
tttgggagggaagggaagcagaatttggttggacactaagagagtgagattcaccagggacagctgggtggtgatggaggcctctcaggagagagatcccagctggagaggtgagccagggctgtccacagtgagactactgttatctctgtgccctaattgtattaacatgtaatatggagagggttggtgtcctagctttttttgtttgtgtacatgttctgccttaactgttggttttgtgttttcttttacaaaagttttgtcacctgtgcttttgacttttttgtgtgtgcagggctgttctgcctcatatgttttgtagtcaaacttgtactttatcattttgcccttacaaattatttagattttattcctcgagaagactaagcatgatacagggaataaataaatgagtactcagtagagattcaatatcatgctaacaac

SEQ ID NO: 71657 - DNA, 441 bp, Homo sapiens
aaggacttagacacttgtcagagctagtaaaataacatttcttattcattacaggcttaaagaactttctttctttctaaaccaacagcaggagactctctggccttggggtgggacccagtaggctctgaaaagccaggtcatttgtgtaactctgtggatctgagtgagcctaagaactgactcattcctggggacctctctgcgctgggattgaccaaaagtaaattatctccaagtctctttggaccaaaatgaaccccaaatttaattcagcactttgggaggccaaggtgggtggatcacttgagcccaggagttcaagaccagcctgggcaacatagtaagaccccatctctacaaaaaataaaaaaattagctgggcatggtggcatgcacctgtggacccagctactcaggaggctgagacagggggattgc

SEQ ID NO: 71658 - DNA, 620 bp, Homo sapiens
ctttcaggccggggcggaggttttgcttccgtggcttcctagcccaaggggtgaggctgttagctgcagtgagcccgttttctcttcactcggcctgtcaaagcggcgcaggggccgcgattagcttcctgccccgcgacagctgcacttctggcttgccggggcgaaccgaggggctcggagaccttcagccacgcgaggcccgccagtgagcagtcagaaatcacctcggctttggcccacgcctgctccccggtgacagtcgtccgccctatccgcgtctagctggcgacaaccgcaggggttcacttttggccgtcaggtgccacccggagcagaaattaggggaaccttgtgggattggatcacggtgaagggtcggggcaggaattggaaggccagcctttatagtgcagaaagggagaaaaagcagcataaacgaaaaaaaaaattcttgtggatagcaagtatttacttagaaaaccatcaacactttggtcaaaaggagttacccctcccttacaaacacacacccacacattcatcctagacgaaaaagttaaatgtttctcagccagggcagaatttatggatgtttacccacaacaggtcagcagatt

SEQ ID NO: 71659 - DNA, 465 bp, Homo sapiens
ctagaagttttatggtttgggattttatgtttaggtctgtgatccatctcaaattaatttttgtgaacagaatgaggtttggtttttttccagcatggatatacagttgttccagcaacatttacttaaaaagacttttctttacccattagattgacttggtagcttggttaaaaattgatcacgtgtgtgtgtatttctacattttctgttctgttccattaatctatttgtgtatccttacatcagtaccacactttggattattgaaactttctagtaagtctttaaattagtaaatccttcctttttgttatttttcaagatcgctttggttattgtcgattctttggattgtcataaaagttttacaattagctcatcttgtttttcaaacgtagatgtgctgggttagctgtgttcatgccactgcattccagcttgggtgacagcaagaccctgtca

SEQ ID NO: 71660 - DNA, 3102 bp, Homo sapiens
  misc_feature (1269)..(1269): n is a, c, g, or t
cactgtatgctgtgtggacatgcatttcatgtggctgtgtggtaagaattacagcttacatatggcttggacccacatccgaggaatctgatgttcacttataccagaacattatcttgctatttatgaaattatttaaacgttcaaaagattgtttttaacatggtttaatttcccaaaaactacagttttttttcttagcatgctattcaggtaaacagtcttataataaagcatgtcccattgtcaagaaacataaagtggtgtgaataccactgaaaatatatatatagtatcttctgtaaataatagtacctgtgtgaataaggaataggcttgcctcccagccaggcaatttcctgagggcacactaatgatatcccctgagttgctaagttgatgctgagacattttgctgggaattagtcatggcatgatctctttcagactccctgaataccatttagtcccgtaacagtgctcacaactcatgtgctaatgaatcacaaaggctttaactagctcccaggttgtagccttcgcaggatctagtttatttgccacatctctttatgaacatatagcgattcgcagatctctctattcacggagaggaaggtgttttgcttctgtagatctcaaggtactattttgtggctctcagcaggaagtagaattgttcctaaatgtgtgctgaatgaggacatgatgtccctcctggtgccaggacacatcctgcatggcattctgtgaagggcatacctgctgaggataatgccaggagcagcacatttagggtaattttgctaaaacttccagatgacatataaattccctctttttccccctgaaacttaccatttcagaggtaatggctttttctgtaatttgcctgagaagaaaaaagggataatttagaaataacactccaagcctatatattactagggctgcatcctctggaatttaatagaaaaattgaatatatagccctatgtaactacagacatcattacaactgttaagttctgttcaccatgcaagttctcggtggtgtatgtactctcaccttttggaaacaaaaccttgcattgaaggttttacacatggcttcagaatgttactctgaccatgtttgcctctactccagattatcatggcacctaacacagatgacatatggcagaatggaagtgatttctcctaatgaaaatgaagtgctcttttgagtatttcttgttttattgagattcctatctgcccttgtanttttataactgaatgtaaataggaattgcttaaatactggtttacactaatcccatagttaaaaatcttggctatggtacaggaaggatatctatatagaggatagttccagaaacaagccctggtgaaataggaaatataaaaacttctttatggaacaggaaaacccaagagactttctcgtcagattcctttccagtgcaaagtataacagagataggattatgagatgaaatcacagtagtgtgtttcctttaattttttctgtcttctttttttttttttttttttgagacggagtctcgctctgttgcccaggctggagtgcggtagcacagtcttggctcactgcaacctccacctcctgggttcaagcgattctcctgcctctgcctcctaagtagctgggattacaggcgtgcaccgccaagcccggctaatttttgtatttttagtagagacggggtttcaccatgttatgcaggctggtctcaaactcctgacctcagaatattcacctgcctcggcctcccaaagtgctgggattacagatgtgaatggccacgcctggcctgtttcctttaagttagcacttcacgtgctcttacagcgttaattgccattattggtttgcctgattttcctgcatctcctcatatgtaagtctgcagcccaaggagagaatagtagctgtatgtgcccacaaggggtgtccaagcttcttgattcttgttaatatcgactccccaacattgaaaaaggagtgaagaagggaatatcattttagggtactgctttaaaggaatgataaagtaaacaacgtagcagggaaaataccacttgcacaaatgtatttctttgtcaaagtgtgtacacgctttctgtttgtcctgatgtcctgctgtgaagcagggaccacattgccatttattcattgttccaggcaatgcatttgtccaaacccctctggctctctgatatctctcatttcttgatgttcctattctctgacctcaacaaggaggacactgtctgttgtgtctctttgagactagaactccatgtgtttaaccttcagatccattctctacatgaaccctattctttccaccctggtaagaaggtctggaagacaggtcctaacgaggggtcagagaaggcacagagaaatgaaccagccatgcaggggcagcactgaggaggaaaccccccactctaactgggaggagagtggaaacactcttagtatctcagagtagttaccaatctaagagcatccttcgagtttaagtcaaaactctaggcttaataccaaaaataatacatcatttggaaaaatagcttggagaaaaaaaatcaataaagagtcacataaaatcttaagaaaatggttctattctgtgatatattactaagaaatacagttcttaaacgtgtataactattgtcagacaatttataggtgtttcatctagtcctgggatgaaatacgatgactcatgcaaattcagggagcacactggctgactttaaattggaacattgtaaagtgaaagctgtgaaaggttgtgtgtcctatcaatgagatttattttctaaccaagagctgttcggatgattcagtataaatacgaaaatcacatccaaaaacggtataacccagcttccttaaggcaattttcttctctgaaacaagaatatactcatatgttctttactataatgtatatgatttttatcttgtactttaaaagatgataattatgcattgtatatacgattgtgtgccttgcaataaaatcaaaactgtacctgctgaaaatcacaacagtc

SEQ ID NO: 71661 - DNA, 420 bp, Homo sapiens
gcaacatgtcagatctttcagtgttccaggcaacaacctaaacgtgtatcagtgtctggtaacatgcaagccccagccagggtttgagcctgcagggggaacatgtagctgattaggtcagagtagtcaaggcacttcctcagtcaggacaaaggaaacactggggggatgaaatgggggacccaacactgagtcaggcaggggacacatgccctgtttagagcccacaggccagaccctgccaggccagagcaggggagagccctggccaaggcactccacatgggggtctgtgaccccacgggcaagcctgctacccgggcacgtttgtaccttggagggtcctctcagtcttgccgatgctgtcaacaccctgagcccagggaaatccatcccattaaaataaaggtctggcccaag

SEQ ID NO: 71662 - DNA, 718 bp, Homo sapiens
agctaattggaggcaggggtaacacacatatagacgtgcctggctcatggtaccaagttttagtggatttctttccagaaggcaagcaaaactcaaagtcagaaagggagcattcgaattcatatagatcctcataatcagtcaatttgcaataagaccatagtctgtggctagaggtgcaagaaagagaatctaggcctctggttgaaaggatctgcaggagccaggatagatgtcagggacgcagccaaggtgactgaagcttagggtgggcctgtattctgatgggaaatgaaagcaattagcaaagaaactgggggaaaactctcaaacattaacctgtgccagcatagagggagtaagggaaagactgtgacagagagacacacaagcctaggctcactgctgggaatttaagaaccctgacttgggaggagcaagactagcctcagacctaagcagccaaggctatgatgtgcagcctaccatggtcaagacaggtatgggctgcaggtgggaggccttggagactccagatcttacaggactggagaagagagttaactgacaactttcagaaaacccggaaatacctcccttctttaggggccaccagcatctccagaagatgtccaaaggacagcaattaaaacatgcacaaattcttatattagataacaaaaaagaatcacaggacaaaagaaaataatatagttta

SEQ ID NO: 71663 - DNA, 1403 bp, Homo sapiens
aagtgaagctctttccttggttacagataagacttggtttacactattggccagtatctgctaaacatatgaagacttaactattcagtgttgcctaggcattcgcctgcacaacattttgaggttagaacatagaatattttcagaaatactgttgtagtttgtgagtgttgttcattagttacacattagctatagagtggatgcatgaagccccatgacaccagtaaacttctcttaccagtaggtaaaccaaacaccattctgtcattagcagccctcttaaatgttgcctctccgtatcctgttgcatttttgtgtgcattgtgtttctactgatctctcttaggtttttacggaatcaaaggaaactaatttttccttaatagcaagaaagatgaagaggtaaagggcattgaagcagaaatgtatagtttggggtacgattagaaaactcgtaaggaaacagaagtcctaatttcaaactgactgctcttcgttaagtgctcttaaggagagtctagtaacagtaacactttctggccatttctagtttagattctcttcgttactgaaacttttgagaaatattacctgtggattaattttgcacaatgttctattctcataatgacttacaaattaaactaggtttttattgaactacctcacactaattttctatgctttcccaagtaagctgttgccctgttagatctttactgagtgaattataaatgtgtgttaaatactttctagccaatgttgacacaataccagtaagtatgtaaagtatataccttacatcagtaagagacacgtgtaaaatctttgactgtatgtcttgcaaaattgtgcccgttgacattattactgtttttgtaagtagaaacctgctcgtgatatcggtccatttacattttacaaaaggagtaaatcttagtaaaaattttacgaagaaataaattacttttgtaggcccaatatttggtatatttttgagaagctgttaatcttttagctgaataatgaagttagactgaattacgtgtctccctggactgtgacatctattttctcattacagtttatcctggtcagcagggtgtcacacctggaaacctgagtatgatagctgacatttgcttttctccctctgcgatgtcattcctcctccattcctctccttccctgtgttccgttccctctcctttcctctagacaaaacaaaatggggcactttttagggaatgctgagatcattattgtggtttttcatcattcatgccctagtcattaaacatgcaccactggaatgtaaacaatgttatctagtatgtcaattggttataatattttaaataaaaaagaaaaaagtggtatgaaaattatgaaaaaaaaag

SEQ ID NO: 71664 - DNA, 554 bp, Homo sapiens
tagttagtgtacttaaaggtttgtcaattttgttaatctgtttaaaatacatacttttatcttgattttctttattgttgtcattttccatttcctttgtttgtgctatgatttctaatttcctccctatttctttttttctacttgctttgagtttactttttgagatggaagcttaagttatttggttgaaacctttattttttctaatatagatttttaaagctataaattgccctccctgtactactttagctgtaccacataaattttgatatgctgtgttcttttttattcaattaaaactatcttaatttcccatttgatctgttgtttgatcatggattgtttagaagtatgttgtctaatttccgaatgtggagatgtctcaaatttgtttctgctgttgatttctaatttaattcctttgtggctgtaaaacacactttgtatgagttcagttattttaatttattaggatttattttatggattagcatatgatgtatcttgaacaatttttcatatgtgcttgagaagaacatgtattctga

SEQ ID NO: 71665 - DNA, 463 bp, Homo sapiens
ctgtacttaaccacatagtctatttcaaccatttactcctccacttagctcagtattcattatctacaaatgcctattatctagaaaagtggttctcaaacccataccgcccacagggaacatctggcaatttctggaaatatttttgcttgtcacaactcagggtaggggtgttactggtatctagtgggtagaggtcagggataaaatgcattcacaggacagcctctaacaaaaaattttctggacaaaatgtctatagtgccaaggttgagacaatctgttctaaaataatacttagctcatgttaagccttaaaagttgtttatcaaaatagaaaaatgaggccaggtacagtggctcactcttgtaatcccagtactttgggaggccgaagcagaaggattgcttgaggccagaagtttgagaccagcctgggaaacatagcgagatcccttctctc

SEQ ID NO: 71666 - DNA, 374 bp, Homo sapiens
ctgtacttaaccacatagtctatttcaaccatttactcctccacttagctcagtattcattatctacaaatgcctattatctagaaaagtggttctcaaacccataccgcccacagggaacatctggcaatttctggaaatatttttgcttgtcacaactcagggtaggggtgttactggtatctagtgggtagaggtcagggataaaatgcattcacaggacagcctctaacaaaaaattttctggacaaaatgtctatagtgccaaggttgagacaatctgttctaaaataatacttagctcatgttaagccttaaaagtgtttatcagccaggcatggtggctcacgcctgtaatcccagcactgtgggag

SEQ ID NO: 71667 - DNA, 441 bp, Homo sapiens
gtttgatctacatctgcaagagcctagccattcagtattaaaaagtgatggccctggttgacggtaccacacctgaagacctatgccctttccttcacactccctacttctgcatttcttccctcctgaacgtctatcaagtggaccatatgaaattgccagtattcaactgttttttatcttaaaaggtgacaattctatatcattcaacctaaattaatgtctcaagaacataacctttgtttctattattgtgaccttacttttaaccatcctagagctctttaacctgttcacactggatttcaaggatcttaagttgttctactacataatcactatcacacttcagaaacattttagtttacattaaatacacttaaccccctcatatttcatctcttcctttctcaaaaatagtaataaataacctcaagccat

SEQ ID NO: 71668 - DNA, 470 bp, Homo sapiens
gttttattagttttgcagacagtagacaggaacaaaaaggggcatagtcattcttgctgtgagttaaccctacacttctccaagcagtagaatgtaaactcaactaggcttttgagaactttccctcagtgacttaattaattccatgcccatttctggactttggaatatagcatgcatctatgtagcttgttttttactttatcaaatttaaaatgctcattatcgaacatttatatttttatattaaacttttgtaagtataacctgcttggtttcaaatatttcacatgcaacatgacattggttggaataatgttatgttgtatgtaaaagtgtaagttgtatgtaaaagattaatatcacaatcctttgaaatactttgcaccttgctattgaataaagttgatgacttttaattctgttgacataatctagaacccatagggaaactctatgataatgtttta

SEQ ID NO: 71669 - DNA, 404 bp, Homo sapiens
ttgcattagcacagggctgccgaaggtgaagcagtccatgtcctcggtagccacaggatagactttgccagccttcaccagggcagcacagctggcctctgcctcgatgggtgcatcaagaagcaggaagattgatggcttggtattatattacatttgagacagtgaagaaattttatacaatcagtggaaaagaaaccttatcagatctgatttccaatggaaggaagaattaaaacaagagaaatgaaagtaaattgtcttattcaggctcaactagggatgcattcccatacaagattttgctttgacacaagataccgcaaagattttcagacatggctcccgaattacaagatattttaaacagacatcccccctttggaacccagataaaagaaact

SEQ ID NO: 71670 - DNA, 503 bp, Homo sapiens
agaattttaggtctgatcgtgctgtattttgtctagttgcctaattttgcaggtgaattcacagaggcccaaaacaggagtttagacagtaacagcacctggctgaatgtagaaacatcttcaaatatggtgccagcagcgagcactagcttatgattcaggagagtgagaactgaatcacagagttgccagaatctaggtatatagtgctgagcagcttcagatgctgcaaatccattaggactactggatctcttcctaaatgttcattttaatatctcctccaccataaaacaagtaccttggtgtaaggtgagattatggagggatattccaacaagaaattggataatatgtctttggatgatgctgtttgccaaggcactgcgggcaggaaaggcaaacgtaagtacataaataaatattcatctcagtaaagatgaattgctgcctaccctggggtgcaaagtgtctgatgtaatcaacttgccaccatgtggtcc

SEQ ID NO: 71671 - DNA, 2037 bp, Homo sapiens
attgtgtatgattcgttgttgactgcagcatcactaggtgggacatcactgcgttttccttgaacttccgcgggttctcctaaagttacttggtgactttttatgattgctttctgctcgtctgaataaaggatgagcccagggcctgctgcccactgtctgctctgatgaccctctctcccctgcagatccgagtgatggtggacctgtgcaacagcaccaagggcatctgcctcacaggaccttctggaccaccaggacctccgggagccggcgggttgccaggacacaacggagtggatggacagcctggtcctcagggcccaaaaggagaaaaaggagcaaatggaaaaagaggaaaaatgggtatttttggcaactcttctaattaatttccctgttatttatctccatgattgcatttgggtcgactaaaactgtgtgcagcaggggtaaggtgtttcatctctgcacagtttaaggccggtttaactcttacctagaagccattgcgttccgggataccaagggtatacttcttggtcccaccttgacagatgtttatttcaaactggagaagccgtctcctgggaactgactcgcacccttctgctgcagatgggaggtggaaggagcaggagcccacagccctgggaggggcattctgtgggccgtgtgacagctggtgctggtgcatgctctttcgaggctcagctcctgccttgccctctattgcctcctcctgcccagcgaatctgtgtttggttgaaaatcaatgaactgatgttggcccctggtaaggcatttcttggctagaggaatagctcaaactgcttgagtggaaaggcagcatcctggcctccctgtggccggcactcaggtcaaagggtctcctcttcaggggctacaggataactatgaagatatggctggcatctcggaggagcttcctttgccctgttatgagcaggccatcaccactggagaaaaggcccagaagcaccaaggcatgagatgtgcccagggagcagtaagaatcaggggctggtgcagggcctggcaggaggctggggcacaaaggggaagattctgaagggctctgagcaccagtcctggggagccggggtcagggcagatccacctgaagaaagctggcacatgctgtggtgggagctcaaagacagagggtaagaaactactcaggaggctcctacgaaggcctggctctcagccacccgtcaaagccactgctgagggcagagggaggttgttttcagccggagactccactgcaccatcttattttcaacctcttggctctgctacccaaactcacttggactggccctggacgagaagaaatggtagaaaattcttccagacagcaattactcctttggtcacctccactcttattctcattagcaattgaagtaagggccagtggagagggaaaaattgtcgagcacctctgacacttggcagtgcctacctgcttgtgttccagagggcagcttcagagaaaacgggcacacaccgtccaagccagctcaatcctcagaaggccagtaattaccattggaattacacagcagcaatggatcgttcatataggataataattataattatacatgagcatcgctgtagaataatgatgcctattggcttatcctgggaagactccaaaaatgtgattcagtcctgaggcctcggcaatgggcatgatgagggcaggctcaggggcaggagggcaccctgctagagctgggtgtggggcacgtaggaaaggggtggttttcaaaaaggcttgagacagatccctggccttgaggacgtgcttcgcatgcagcctgcaacccagggagtgcagaaaagaaaaagtgcatttgtttatggagcacatatttgtgtggcaggtaccattctagatgctggagattcagaaataagcccccctcctccaccttcacgaggcttacatcctagctgggagagacggataataaataagataaataaatagaatatatggtc

SEQ ID NO: 71672 - DNA, 522 bp, Homo sapiens
gctcgacttttttttttttgagacaagccactgcatcgcggcctgtattacacgtatctttctaaactactgcaagtgatttcagataaaaatatttcactgtggccgggcatggtgactcatgcctgtaatattaatctgtacagtctcttcacaaatatgctagtaattaccaggtattcccattcaacctcatatgcatgacattagagcttcgtgtcactagagactaaaacaaagactactgagaagtcagtaagaaagcagaaccacaatgaaataagaagaaaatagtgcttgccgtaataacaaaaccagcaaactttggacctaaagccagaaatgcaacctagactgtgaggttcaattaaagaacacagacaaagttctgagaggcatgttaggcatggggcaagaatgacaggtcagtattcagatatccaaacagagtggggagttactaaaatatgcactcacttcaagtgtgcgaggcacaagagatgagagaaggtgcacactgaa

SEQ ID NO: 71673 - DNA, 459 bp, Homo sapiens
ctttatttctcaccgcacaacaggtagcgtgaactttatgttcaagccaattccccctgctccccaagtcccatggggatgatgtggccctgatgcacactgggcgtgcagtgagtttgggtcatgcccaaagacacctgagcttcggaagcccaagccttttaaaatggtctgtaagcaaatgtgctctttaccttggagggagacattatctttagtattatttatcgtagtagacagtattaccttactagacagtaaacaaatctgctgtctgctccagagagacactatctctatcttccaaatatccttgaatagttttttctgaactgatgctgtcagggcctctgctcacaaaatatgcaaaagtttgtgagtcccatggagaattatttcccactagtggagaaacaatttaagactgagacgtttcagaacgctagaacattggaatcc

SEQ ID NO: 71674 - DNA, 307 bp, Homo sapiens
gtgttgtttttctcccttttccttgtttttacgtttttggaatgtgaatataaactttatggaggggcctggtctctgttcacaccgggtgctaataacccacagctgaaagcagaggctcagaggaaacccgggaggtgcagcgcgcagaaggctacaggaaccggaggggcgggcacgcggctggaggagggggccgggacgatatttaatatttaatttgctgggttttttttttttttaatgtggaaacttttagacacaaactggcccctgtgtttaagtcattaaaacatctttaagcatt

SEQ ID NO: 71675 - DNA, 269 bp, Homo sapiens
ttgccccatccaaccagtctcagctccaccatttgacacacacaattttataaggctcaaaacaataaaattaccttcagagaaatttcaacacagtgtgtattggcaatgatgatatgtttgatgatgatgtacaagctacaaaattatttagcagatatctaaattatttaatcagtgttgtatactgtatttgagttttaatatgtaaacttctttgattagaaagagttgaatttcaaacatcccatctaatatttcatatttcc

SEQ ID NO: 71676 - DNA, 653 bp, Homo sapiens
agcggcctgttgggaaaggtctgagggtgtcagtgggaactgcctgctttgctgaggaagcaaaggcttgtgtgggaaggaagatcacagctggtccgcagcctcaaagagcaggaagcaggacagaaggagcccctcggtgtaccctgcagcccccagccagggagaagcagcaggagacagagctacttcctctaacccagtggtggttcctaactcccaagacatcctggaccattggttctgagcagcaatcattgcaatttgctcttttctgcagccgtgaaactaccaggataaagtaatcagagtgatcccatgatgtgctggggcaaactaaacatttctcgtcaaaataatggtcagtttcctactgaatgctacatgataagtgcagtatgtttgattatgacatcagtgagtttgctacttagaggatatttatgggtgatacattgaaatttacctttgaccatctgttttggcagaaggtgtctctccaatatccaaaacttggataatccacattaaaactaattttattgtggctaatttttgttaaatgttattaaaaataataatcacattgtatttattaaatatttgttaaattttatagaatttattaaattttgttgatcaccactaaaaga

SEQ ID NO: 71677 - DNA, 362 bp, Homo sapiens
tggccaggctggtcttgaactcctgacctcatgatacacccgccttggcctcccaaagtgctgggaatacaggcgtgagccactgcacccagccttgtgtgatcttttaaagtacagttcccatagatttacattaagaataaaaaagtcatgacatcttgcttttatatggcagtttactcaagctttttaaagaaagagcattcatcttgcttttacgtggttttagaatgttgaaaaccttttgttaaatctgagtaatttactgcattttccattaattcagcttagttagactgctggatccagtgcttgtttgctgtcacatatacctaatatgcttttaacatatgccaaattct

SEQ ID NO: 71678 - DNA, 200 bp, Homo sapiens
atccagcggttgtcagctatccaggctcatgtggtgcctgtgatggtgttacactgttggaagagcaaacactgtctttattgaggtttggctccaagcactgttttggtgttgtagctgagtacctttgggcagtgttttgcacctctgagagtggaatgactcctgtggagttgatcctagtctgggtgcaaacaatt

SEQ ID NO: 71679 - DNA, 353 bp, Homo sapiens
gatagagtctcgttctgtcgcccaggctggagtgctgtggtatgatcttggctcactgcaacctcgcctcctgggttcaagcaattctcctgccttagcctcctaagtagctgggattacaggcgcatgccatcacacccggctaatttttttatttttagtggagacagggtttcaccatgtcggtcaggctggtcttgaactcctgacctcaaatgatctccctgccttggcctcccaaagtgctgggattacaggcatgagccaccgcacccagccttgatgccaaatttaatgcccaaaaggaggttgtgagctttgggcctgacagatgctgctttaaataaatatgt

SEQ ID NO: 71680 - DNA, 1355 bp, Homo sapiens
agtaacacaaagcatcatacctgggactgggaaggttaatgtttaaacattttaaatgtggcattggtttgttgaagacagtcaagcagtaggtgctgcaggctttgttgaggctagaaagctgttggtctttattaggtgatggcaaaacaatggatcacattttcatgtgctgtgtcttgggaggcaaatgatgagaatgtaggattggggaaaatggtaaggaaaatccaaaatgttcatgttttctaaccccttcatgccaatcttaaaagaaggacaaacaggctagattaagcaagtctacagttacaattggaaggaaacacagccgtactaaggaagtactctgtctgtggcctgcagtctagtttgactaggtcctgtatttgagctttgaaagagtaaagaatacaagtgctcgtatacccctgaagtagttaccagcagtgactgcaaggaggtaatcttatgggatgaaactataactctgtattaaccatcatatatagcatatatgtgtatatgtatgtgtgtgtgtgtatatgtgtatataaatatatgtgtgtgtatatacacacatgtacacacaccctacaacccagtgatttcaaaaaattaaacatttgtttagctcatgaatctgtgggttgggtgaacatttctattggtcttggctgggctcacctgtacccagtcagctgcagggtctagctcttcttatcttggctgggatctcacacatgtctaggatcagctgctttactagtctaggattgtcttggctgagacaggtggactactcagttctcctccactgccttatccttcagctggccagcccagaaatgttgccatgtttacagcataagagcaagcaagaaagaataatatgcaaccacttttccaagcctaaggtgaaagggcgggcagaacctgtggtgttaggaggcaactcataccagcccatgggtctactgtttaattttcagaaatttggcaagctgattgttaacacagctgttgtttaatttatgtacttgtaattaaataatttacattaaaacaaagataataggtactcaaaactcatgactttctagttattttattatattttactattgtctgtcctcttaaggtgtttgtttctagtgtatctggtggaaacactacttcatgtttcagttgtgtcaaaccagtagcttgaaatcagccactgttggagtgtttataccacagaaattgatagaagctacaaatgaagtgttgcttgttgatttgttttgttaattgtctggcttaagaaagtggtagagaaaacattaatgcagattaaatttaaaagcgtgttg

SEQ ID NO: 71681 - DNA, 1085 bp, Homo sapiens
agtaacacaaagcatcatacctgggactgggaaggttaatgtttaaacattttaaatgtggcattggtttgttgaagacagtcaagcagtaggtgctgcaggctttgttgaggctagaaagctgttggtctttattaggtgatggcaaaacaatggatcacattttcatgtgctgtgtcttgggaggcaaatgatgagaatgtaggattggggaaaatggtaaggaaaatccaaaatgttcatgttttctaaccccttcatgccaatcttaaaagaaggacaaacaggctagattaagcaagtctacagttacaattggaaggaaacacagccgtactaaggaagtactctgtctgtggcctgcagtctagtttgactaggtcctgtatttgagctttgaaagagtaaagaatacaagtgctcgtatacccctgaagtagttaccagcagtgactgcaaggaggtaatcttatgggatgaaactataactctgtattaaccatcatatatagcatatatgtgtatatgtatgtgtgtgtgtgtatatgtgtatataaatatatgtgtgtgtatatacacacatgtacacacaccctacaacccagtgatttcaaaaaattaaacatttgtttagctcatgaatctgtgggttgggtgaacatttctattggtcttggctgggctcacctgtacccagtcagctgcagggtctagctcttcttatcttggctgggatctcacacatgtctaggatcagctgctttactagtctaggattgtcttggctgagacaggtggactactcagttctcctccactgccttatccttcagctggccagcccagaaatgttgccatgtttacagcataagagcaagcaagaaagaataatatgcaaccacttttccaagcctaaggtgaaagggcgggcagaacctgtggtgttaggaggcaactcataccagcccatgggtctactgtttaattttcagaaatttggcaagctgattgttaacacagctgttgtttaatttatgtacttgtaattaaataatttacattaaaacaaagataataggtactca

SEQ ID NO: 71682 - DNA, 269 bp, Homo sapiens
atttttagtagagacagggtttcaccatgttggccaggctggtctcaaactcctggcctcaagtgagccacctgctttggcctcccaaagtgttgagattacaggtgagatattctatattcatggattgaaagactcaatattgttaagatgtcagttctttctaaagtgattttttagatgcaacacaattccaatcaaaatcccaggattttttggtagctatcaattgatagatatcaacagccagctgattctcaaatttacgt

SEQ ID NO: 71683 - DNA, 1244 bp, Homo sapiens
  misc_feature (993)..(994): n is a, c, g, or t
  misc_feature (1005)..(1005): n is a, c, g, or t
  misc_feature (1020)..(1020): n is a, c, g, or t
  misc_feature (1027)..(1027): n is a, c, g, or t
acacctggctagcatatgggaaaatgcaactgaaggaattgttgtgaaaaaagggacagcgagtttgaaataaaagttgttagagtggtactgaggagaaaaaagaatccgagaccatgtactgcgcatacacaatcccgggcatgggcggcaactctttgatgtactactataatgggaaagcggtctatgctccatcagcaagcactgccgactacaatagggactcgccaggctatccttcctccaaaccagcaaccagcactttccctagctccttcttcatgcaagatggccatcacagcagtgacccttggagctcctccagtgggatgaatcagcctggctatgcaggaatgttgggcaactcttctcatattccacagtccagcagctactgtagcctgcatccacatgaacgtttgagctatccatcacactcctcagcagacatcaattccagtcttcctccgatgtccactttccatcgtagtggtacaaaccattacagcacctcttcctgtacgcctcctgccaacgggacagacagtataatggcaaatagaggaagcggggcagccggcagctcccagactggagatgctctggggaaagcacttgcttcgatctattctccagatcacactaacaacagcttttcatcaaacccttcaactcctgttggctctcctccatctctctcagcaggcacagctgtttggtctagaaatggaggacaggcctcatcgtctcctaattatgaaggacccttacactctttgcaaagccgaattgaagatcgtttagaaagactggatgatgctattcatgttctccggaaccatgcagtgggcccatccacagctatgcctggtggtcatggggacatgcatggaatcattggaccttctcataatggagccatgggtggtctgggctcagggtatggaaccggccttctttcagccaacagacattcactcatggtggggnnccatcgtgaanatggcgtggcctganaggcagncattctcttctgccaagcagggtccggtccacagccttcctgtcccgtctgggattcccctgactgaaccaccccagggccttagaggtgccccgcttcggggcgcgtgctccccgggggccgagatcaccgggaggtggtgacctggacaactcgcgggcgaattttccccggtctttgcactcgcacagggggggcccgcaggggggggcccaag

SEQ ID NO: 71684 - DNA, 1256 bp, Homo sapiens
  misc_feature (1005)..(1006): n is a, c, g, or t
  misc_feature (1017)..(1017): n is a, c, g, or t
  misc_feature (1032)..(1032): n is a, c, g, or t
  misc_feature (1039)..(1039): n is a, c, g, or t
cagcatgaagttccctctctccctcccattatgaattctgggctgtggtcctgcttgctccttgtgtgtcagattgaagttctgatgctgtcagccatgtctgaccaatcagcaaacaacaccacaggatgaaatttaaacaatgcagatgctcagatacagggctatgttgcctggaccacgaagggaaagcagaggtctatgctccatcagcaagcactgccgactacaatagggactcgccaggctatccttcctccaaaccagcaaccagcactttccctagctccttcttcatgcaagatggccatcacagcagtgacccttggagctcctccagtgggatgaatcagcctggctatgcaggaatgttgggcaactcttctcatattccacagtccagcagctactgtagcctgcatccacatgaacgtttgagctatccatcacactcctcagcagacatcaattccagtcttcctccgatgtccactttccatcgtagtggtacaaaccattacagcacctcttcctgtacgcctcctgccaacgggacagacagtataatggcaaatagaggaagcggggcagccggcagctcccagactggagatgctctggggaaagcacttgcttcgatctattctccagatcacactaacaacagcttttcatcaaacccttcaactcctgttggctctcctccatctctctcagcaggcacagctgtttggtctagaaatggaggacaggcctcatcgtctcctaattatgaaggacccttacactctttgcaaagccgaattgaagatcgtttagaaagactggatgatgctattcatgttctccggaaccatgcagtgggcccatccacagctatgcctggtggtcatggggacatgcatggaatcattggaccttctcataatggagccatgggtggtctgggctcagggtatggaaccggccttctttcagccaacagacattcactcatggtggggnnccatcgtgaanatggcgtggcctganaggcagncattctcttctgccaagcagggtccggtccacagccttcctgtcccgtctgggattcccctgactgaaccaccccagggccttagaggtgccccgcttcggggcgcgtgctccccgggggccgagatcaccgggaggtggtgacctggacaactcgcgggcgaattttccccggtctttgcactcgcacagggggggcccgcaggggggggcccaag

SEQ ID NO: 71685 - DNA, 1096 bp, Homo sapiens
  misc_feature (845)..(846): n is a, c, g, or t
  misc_feature (857)..(857): n is a, c, g, or t
  misc_feature (872)..(872): n is a, c, g, or t
  misc_feature (879)..(879): n is a, c, g, or t
gaaagttcgaaaagttcctccaggtttgccatcttcagtctatgctccatcagcaagcactgccgactacaatagggactcgccaggctatccttcctccaaaccagcaaccagcactttccctagctccttcttcatgcaagatggccatcacagcagtgacccttggagctcctccagtgggatgaatcagcctggctatgcaggaatgttgggcaactcttctcatattccacagtccagcagctactgtagcctgcatccacatgaacgtttgagctatccatcacactcctcagcagacatcaattccagtcttcctccgatgtccactttccatcgtagtggtacaaaccattacagcacctcttcctgtacgcctcctgccaacgggacagacagtataatggcaaatagaggaagcggggcagccggcagctcccagactggagatgctctggggaaagcacttgcttcgatctattctccagatcacactaacaacagcttttcatcaaacccttcaactcctgttggctctcctccatctctctcagcaggcacagctgtttggtctagaaatggaggacaggcctcatcgtctcctaattatgaaggacccttacactctttgcaaagccgaattgaagatcgtttagaaagactggatgatgctattcatgttctccggaaccatgcagtgggcccatccacagctatgcctggtggtcatggggacatgcatggaatcattggaccttctcataatggagccatgggtggtctgggctcagggtatggaaccggccttctttcagccaacagacattcactcatggtggggnnccatcgtgaanatggcgtggcctganaggcagncattctcttctgccaagcagggtccggtccacagccttcctgtcccgtctgggattcccctgactgaaccaccccagggccttagaggtgccccgcttcggggcgcgtgctccccgggggccgagatcaccgggaggtggtgacctggacaactcgcgggcgaattttccccggtctttgcactcgcacagggggggcccgcaggggggggcccaag

SEQ ID NO: 71686 - DNA, 1165 bp, Homo sapiens
  misc_feature (914)..(915): n is a, c, g, or t
  misc_feature (926)..(926): n is a, c, g, or t
  misc_feature (941)..(941): n is a, c, g, or t
  misc_feature (948)..(948): n is a, c, g, or t
acacctggctagcatatgggaaaatgcaactgaaggaattgttgtgaaaaaagggacagcgagtttgaaataaaagttgttagagtggtactgaggagaaaaaagaatccgagaccatgtactgcgcatacacaatcccgggcatgggcggcaactctttgatgtactactataatgggaaagcggtctatgctccatcagcaagcactgccgactacaatagggactcgccaggctatccttcctccaaaccagcaaccagcactttccctagctccttcttcatgcaagatggccatcacagcagtgacccttggagctcctccagtgggatgaatcagcctggctatgcaggaatgttgggcaactcttctcatattccacagtccagcagctactgtagcctgcatccacatgaacgtttgagctatccatcacactcctcagcagacatcaattccagtcttcctccgatgtccactttccatcgtagtggtacaaaccattacagcacctcttcctgtacgcctcctgccaacgggacagacagtataatggcaaatagaggaagcggggcagccggcagctcccagactggagatgctctggggaaagcacttgcttcgcaggcacagctgtttggtctagaaatggaggacaggcctcatcgtctcctaattatgaaggacccttacactctttgcaaagccgaattgaagatcgtttagaaagactggatgatgctattcatgttctccggaaccatgcagtgggcccatccacagctatgcctggtggtcatggggacatgcatggaatcattggaccttctcataatggagccatgggtggtctgggctcagggtatggaaccggccttctttcagccaacagacattcactcatggtggggnnccatcgtgaanatggcgtggcctganaggcagncattctcttctgccaagcagggtccggtccacagccttcctgtcccgtctgggattcccctgactgaaccaccccagggccttagaggtgccccgcttcggggcgcgtgctccccgggggccgagatcaccgggaggtggtgacctggacaactcgcgggcgaattttccccggtctttgcactcgcacagggggggcccgcaggggggggcccaag

SEQ ID NO: 71687 - DNA, 388 bp, Homo sapiens
ctcaatctgctgatctcgtgatccacccgcctcagcctcccaaagtgctgggattacaggcgtgagccaccgtgcccagcccatcttaaccatttttaagcatatagttcaatagtgttaaatatattcatcaattgagaccagaaggtcaaggctgcagtgaaccatgattgcgccactgcactccagcctgggcgacagagtgaaactctgcctcaaaaaaataaataaatatattcacacaattgtgcagaggtagattcttatacctccaactgctgcatttggtatgttgtaatatcacacaccgtgaatctctggaaaactccactgtacactcatgagagaatgagagtgaaaaaggcaaatgatgtttccttattattag

SEQ ID NO: 71688 - DNA, 380 bp, Homo sapiens
ggaagaagcagcgaccaagaaggagcgcaaaggagtgacaggcaaggagcccacagggaccacaccaatgcaacaggaagaactacggggatgggacaggacaggacagggccggggggagggggcgacagggatggagctggtccagccaagtcataaccagcccctccctggggcgctcgctgcgcgcagggcgccgcgctgggcactttggagcgttctctcccggagtcccccccaccggccatccgatgccccatttcagagactggaacggggaggccggccccgcatcgccagttccgcggtgtcacccgcacccaggacagcgacgactcaatgcccgaccctcccggacgcaggaggtcgctggcggccgc

SEQ ID NO: 71689 - DNA, 309 bp, Homo sapiens
atcatgccatcgcactccagactggatgacaaagtgagactctatatcaaaaaaaaaaaaaatagtgctctagtaagtctttaaaaggacacacaatcatctttttacattttttcaatttttgtgtaattcttcaaaacactagtttctatggtcgcgcatacattggaaaggtaacagtgaaaagataattaaaacctgggttcaaattctcacctcacaattcgacctctctgagttcttgcaaaggtaacatgaaaaggtttagaaagggctagaaagcaattgattcccaataaatattggttc

SEQ ID NO: 71690 - DNA, 335 bp, Homo sapiens
ttggcaatttgattggcaaaactttaactgttgataatatccagctttgataaaggtatagagaaaaggaaccttctctatgctgtaattggaatgtaaattcgtatagccctataaaggacaattggcattatttatagataactaaaatgcttatgagttttgactcaggaactctactcctgggaatctctcctgtagaaatgtgtatattcccaaaggtactcaaaataagtttgctatagtgttatttataatagcaaaaatttgagaaaagcataaatgcctgacagtggggaaccagatacattatgacatctacataataaaatact

SEQ ID NO: 71691 - DNA, 1874 bp, Homo sapiens
aaaaattgaaggaatggggtttacaggctggaagtccgcacacagactgggcaggaccgcgaggcttgccaacggtgctggagggtgtcccagcttcaagttcagtcccctgcttggtgcccatgagggacgtcccaagctcatcccttcctccagcgctgctttctctggtgcagagttgctagaaacattccccgtcggaggggaaaggatttggaggcggtgggctgtcggcccgggctagtcccaaggagggcgtggcgttcgtgtgactttcctttacccacccccgggaatgtgtccctcttctgatccattgtgcccgtggacattttaacaaaggctatgactgttttgtaggcagtggcgggtgacagtgggagggggtgcgtgcgaggtcggtcgcggtgcggccctgggggatgggagagcggggggagggggaggcggcgtggggggaagtgaaaggaagagaaacagtcttcctgcttcaggtttttccttcttcctggtccgctgaatttgatcactggtaggaacagccccaagagggatatgactggaaagtagtgtgtgcgcgtttggactctggctccagccactggtttttgtgattgtgctgtgcaagtattttctacgagtccctttaggagaaaagcgaaactaatgggatttgagaggaaataattgaatgaaaggatgaagaggttgagtgacaaaacttagagcttaattatttgtctgttgatggtcatactataaagccagactttgaaggatgcgaaggtgttcaagccagggtaagtgaaaagttggttaggctactgttgattgtttcaatcaagagtggattattgggcatgtgtgtggatgtgctgtcaagatcttgggccgactcactttagaacctttgaaaataatattaaggatacaaaacattagggcaaatattgtaatattggataaagctccatatgctttcattttcaaacttagggacttttatgaaagatagtatatgtgttcccaagcatagatgttgatatttttactcatttgttttaagttaatacaacaaaataaactgaacttcctcctctccacccctttccctcgattgtaaatcccgttttataaacgtttactttctgatctgaagtatacttaaaaacacaattaccccgcccaacccccacccctgcaccaaccccaggcatgaggtgaacaggatttcttctggttttattgttatgttattctttctttttctattttcccaaatttggggcaggtggagggcggggagtgttagggatgccttttctcttttctagtgcctgatgaactcctattcatctttctagacttagcctgattcacttcttgaaaaattttgccatcttctccagagtgaattaatcacacccttttctgttaaatttatataacttgccttatttctccattactactagaacctcagtcttttgtgttacccttgtacctagagctgcctggcatgtgataagcacctaataaactaacttacagatatatattaataaatgctgttagaaagatggtaattcataggccgggtgcagtggcttactcctgtaatcccagcactttgggagtctgaggcaggtggatcacaaggccaggagatccagaccatcctggctaacatggtgaaaccccgtctctactaaaaatacaaaaaaattagccgggcgtggtggtgggcgcctgtagtcccagctactagggagactgaggcaggagaatggcatgaacccgggaggcggagcttgccttgagctgagatcgcgccactgcactccagcctgggctacagagcgagactccgtctc

SEQ ID NO: 71692 - DNA, 821 bp, Homo sapiens
gagccgcgggctgctttgtgacgcgtcgccatggagacaaggatcgggttccagggagttctgcccctgccaaggggtgctggccacgcaggaggcttaacctggccggcgcgggaatggggtgcagagagcaaagaaatgtggctttgatcttatggatgccttacttttacattatttgtacagttcttgcagtgagctttccggaccactgtcttgtatgtttcctaagaaaagcaaaaagggaagagattgaagagaaagtagattttcaactacaaactttcatccatttgctttcagcttaagcaaatgtgcgcaaagttgtcatggatttttgcagtcaataaaaaccaagcaagaagactgaatcccaagtcatctggggcagataagaaaagaaacaatttgctgaaactccctctgcttataacaaaactgactgaaatcagccggaatcaatatggccaaatgcagtttgcgcacagcaagcttgctgatgtcacagcctgaatttctactgcatgtttcatacgaactccctccaaatttgcacatgagacccaccaggaagcatgaagagagagccatgcatgcctgaagacttcccagatgttccctttgcttccaccaatcacctgctaaccccaggatccaaccctaaaccttttgtaataaaattactgccctaaagccagtacaagacagatttgaactggacttttgtttcctcagaagttaacttgcaatgtgaagctttccttttctcaaaaacttggtgtcatagtgttggcttctagtgcagtgagccccttttgctg

SEQ ID NO: 71693 - DNA, 528 bp, Homo sapiens
aggaaatgcacgcgtggaaacaggagtgggcagggaggatgtgacactgtcctcctcaccaggccacgttcctggcaccaaccatagtgtttgggcagataagaaaagaaacaatttgctgaaactccctctgcttataacaaaactgactgaaatcagccggaatcaatatggccaaatgcagtttgcgcacagcaagcttgctgatgtcacagcctgaatttctactgcatgtttcatacgaactccctccaaatttgcacatgagacccaccaggaagcatgaagagagagccatgcatgcctgaagacttcccagatgttccctttgcttccaccaatcacctgctaaccccaggatccaaccctaaaccttttgtaataaaattactgccctaaagccagtacaagacagatttgaactggacttttgtttcctcagaagttaacttgcaatgtgaagctttccttttctcaaaaacttggtgtcatagtgttggcttctagtgcagtgagccccttttgctg

SEQ ID NO: 71694 - DNA, 4343 bp, Homo sapiens
  misc_feature (1475)..(1475): n is a, c, g, or t
ggccctgcctacagcccgaggccccgcccccggcgcccctcccagccgtttgaagcggctcgggctgcggctggctcagagtggcgcggggggcgtggggcggtgctgaggagctgaagccgtggccagctcgacgccggacagtccagcgagcagcacggcgggaaccggcagccggagcagtcccggagcagaagcagcagcagcagcagcagccctcgccgttcgcggagcgcagccgagccggccatggcgttgtcgatgccgctgaatgggctgaaggaggaggacaaagagcccctcatcgagctcttcgtcaaggctggcagtgatggtgaaagcataggaaactgccccttttcccagaggctcttcatgattctttggctcaaaggagttgtatttagtgtgacgactgttgacctgaaaaggaagccagcagacctgcagaacttggctcccgggacccacccaccatttataactttcaacagtgaagtcaaaacggatgtaaataagattgaggaatttcttgaagaagtcttatgccctcccaagtacttaaagctttcaccaaaacacccagaatcaaatactgctggaatggacatctttgccaaattctctgcatatatcaagaattcaaggccagaggctaatgaagcactggagaggggtctcctgaaaaccctgcagaaactggatgaatatctgaattctcctctccctgatgaaattgatgaaaatagtatggaggacataaagttttctacacgtaaatttctggatggcaatgaaatgacattagctgattgcaacctgctgcccaaactgcatattgtcaaggtggtggccaaaaaatatcgcaactttgatattccaaaagaaatgactggcatctggagatacctaactaatgcatacagtagggacgagttcaccaatacctgtcccagtgataaggaggttgaaatagcatatagtgatgtagccaaaagactcaccaagtaaaatcgcgtttgtaaaagagatgtcttcatgtcttcccctaagaatacgcttttcctaacaggctactccttcctgtagagcagaaattgtattttgcacgaacatgcagttattgaagattaggatcaaggatagacaaggtatagtagttatcttaaaatatacactcctaagcagtattattttaaaatcctttaccctggctacctcccctacccgggttcccctctctttaatttggagacactccaccacaaacttttcactttagaggtagcttgccatctctcaggagccctcaccattgtgtccattcactgtgtatagatggcagaacttttgaggtgcaatgtttaattgttaaaaatagtagccacgactttatcaggcagccccaaactggtgcataatgcatggtacaagaaatatttatgtattttttggaattttgtaatatttagtangagtatatgaaaggattgctactgtatcagaaatattgtttcaatttagtctatcctggatatgtactaacgaatattaccaccagagaagagagctttctacaaaagtcactacagattttgctatattgctttgtagatagatttttacttttgcctaaaagcatttatccttcataccaattgtaacatctgacaccatgtagaagctaaaagtttagagggagtgagcgttttctcaagaccttcctcaagcattttatctttagaagagaaactgatgggcacctgatactctgtctaaatacgtttgttatatgtgttttgccctgtgccattcatttggaactttattgcattctttattttaaaaagcttgtttttacgtaatcatagagcttgctatttgtacatctgttgagcaacactacataactgatttttagttgacttagctatagcagtacaatgattagtaatgtaaaaattaacacagaaattaacctaaggaatgaagggtgggtttgtcaaaatatcaagtaaatttttgtttctaaagtacatttaatgtagatgacctaaagaatgcgttatccatcctatataaaagaaagataaaacacaggtcaccaattttctcatttcaccccatttaccttgtatagaggattgttcattcctttgggactaagttatagttatggtgagtgtgtatttactgtagttttgcctgatctcactcattgcacttcctggagttaaattttccaacagccatgttgaggaatagcactctgcatgtttttgttttgtttttcggggttttttttaattgaagccctaaaccaggaattatttgtgttctaacaggaggatgaacttgctgaaaataaaactttgctatgtatttactcttttttaaaagacaaaagcaaaaccagactttctacgtactactccaaagactgtgattgtgactataatacatttttggtaatttttttatacctaatttgtataggaagtgctatttctcataggctgtttcttgaaattttaagtttattgctttaaaatggcagtgtttctcccactttgatatgctaacatttagtaagcactggctttatgaaagcggctttttataagtatactgcattttttgagcctatcattaattagcttagtatgaaagataagaaaatctccatgttgtatccatttggctcaggaagattctttgccttacctttcttagaactctttattgcttatcaaaagtttgagtacccgcttggtttttttttggtaattaaatattgtatgatttatctggttcaaggaagatgcactattcagttatctattgagaaattattttgcagtggttttagtgggtgaaaatgtcccatctgcaccagtacacaggcaggcattatcattcttcacctactttttaaatagtggcaacttgggattctttctggtgattctgaaccttgcctcatagcttaaagtataaaaaaagattcaagagcagtgaggtttgttctttccagtgaatggtggactgagtggtgcgaggtggagggctaacaagaggaaagaactacattcttcagaatacagtgatgaaaattcattttgaaactcaaatattttcattttggatattctcctgtttttattaaaccagtgattacacctggccatccctctaaatgttctaggaaggcatgtctattgtgattttgatgaagacagaattatttttctctgtagaaacacagataccactttatcagggaagttagtcaaatgaaatggaaattggtaaatggacaaaagctagctagtaaaaaggacgacccagcaacatgctttaaccccattgtatgtttgtggaaagagcatagtttaacatcttgagaaatttgggacataaagttttcatggtagacagttcatgcagtatatgaattgacataatggaaataatctgattttatttttacaactaacatccattccccttcatttaaacaccttttgtgttttacttcagtgaggagattggagtctgaatggatctgttttccaagagattctgagaaatttttgtattcagcagttggaaagctctctattctagttgataaaacttcccttttttgatgtagatgcagatattctatacagttctgttgtcttttactaggactgtaaacttttgtgataaaattcaaataagattttatttctttgtaattttggctttcacaatttatctttaaatccttgagcaatctgtatacaattaagagatttctgacatttattcttacactaaatggatcaactctaggatttaggcatgttaacttctgttgtgttttgaatctctccagagttgcatgtagatagcatttatttctgtgcccttaaacccatttagaaaataactacaaagtaaaaatgtagaggaaatagaaatgtattttttcatgaacattttgatacaaatttcatcatttaatgattcaccaatttcttgcattaatttgaatttaagcatttaattcaaagagaggggagcatccattattggtacatgtgggcttttaaaaactccatcctttataaatagtcaaggtttgggccacacaaagtatatttttatcatggaaaaatttcaactcctcaagccgtaatgttgaacagaattggagtattttctttataatttcttgaacaggcaaatgaaagcttattatagaatgcatgtattttcttttatctttggaacatcagcaccagtatattgctggcagctattgtattaaaaaataaagtatattttcactatcg

SEQ ID NO: 71695 - DNA, 2801 bp, Homo sapiens
  misc_feature (1475)..(1475): n is a, c, g, or t
ggccctgcctacagcccgaggccccgcccccggcgcccctcccagccgtttgaagcggctcgggctgcggctggctcagagtggcgcggggggcgtggggcggtgctgaggagctgaagccgtggccagctcgacgccggacagtccagcgagcagcacggcgggaaccggcagccggagcagtcccggagcagaagcagcagcagcagcagcagccctcgccgttcgcggagcgcagccgagccggccatggcgttgtcgatgccgctgaatgggctgaaggaggaggacaaagagcccctcatcgagctcttcgtcaaggctggcagtgatggtgaaagcataggaaactgccccttttcccagaggctcttcatgattctttggctcaaaggagttgtatttagtgtgacgactgttgacctgaaaaggaagccagcagacctgcagaacttggctcccgggacccacccaccatttataactttcaacagtgaagtcaaaacggatgtaaataagattgaggaatttcttgaagaagtcttatgccctcccaagtacttaaagctttcaccaaaacacccagaatcaaatactgctggaatggacatctttgccaaattctctgcatatatcaagaattcaaggccagaggctaatgaagcactggagaggggtctcctgaaaaccctgcagaaactggatgaatatctgaattctcctctccctgatgaaattgatgaaaatagtatggaggacataaagttttctacacgtaaatttctggatggcaatgaaatgacattagctgattgcaacctgctgcccaaactgcatattgtcaaggtggtggccaaaaaatatcgcaactttgatattccaaaagaaatgactggcatctggagatacctaactaatgcatacagtagggacgagttcaccaatacctgtcccagtgataaggaggttgaaatagcatatagtgatgtagccaaaagactcaccaagtaaaatcgcgtttgtaaaagagatgtcttcatgtcttcccctaagaatacgcttttcctaacaggctactccttcctgtagagcagaaattgtattttgcacgaacatgcagttattgaagattaggatcaaggatagacaaggtatagtagttatcttaaaatatacactcctaagcagtattattttaaaatcctttaccctggctacctcccctacccgggttcccctctctttaatttggagacactccaccacaaacttttcactttagaggtagcttgccatctctcaggagccctcaccattgtgtccattcactgtgtatagatggcagaacttttgaggtgcaatgtttaattgttaaaaatagtagccacgactttatcaggcagccccaaactggtgcataatgcatggtacaagaaatatttatgtattttttggaattttgtaatatttagtangagtatatgaaaggattgctactgtatcagaaatattgtttcaatttagtctatcctggatatgtactaacgaatattaccaccagagaagagagctttctacaaaagtcactacagattttgctatattgctttgtagatagatttttacttttgcctaaaagcatttatccttcataccaattgtaacatctgacaccatgtagaagctaaaagtttagagggagtgagcgttttctcaagaccttcctcaagcattttatctttagaagagaaactgatgggcacctgatactctgtctaaatacgtttgttatatgtgttttgccctgtgccattcatttggaactttattgcattctttattttaaaaagcttgtttttacgtaatcatagagcttgctatttgtacatctgttgagcaacactacataactgatttttagttgacttagctatagcagtacaatgattagtaatgtaaaaattaacacagaaattaacctaaggaatgaagggtgggtttgtcaaaatatcaagtaaatttttgtttctaaagtacatttaatgtagatgacctaaagaatgcgttatccatcctatataaaagaaagataaaacacaggtcaccaattttctcatttcaccccatttaccttgtatagaggattgttcattcctttgggactaagttatagttatggtgagtgtgtatttactgtagttttgcctgatctcactcattgcacttcctggagttaaattttccaacagccatgttgaggaatagcactctgcatgtttttgttttgtttttcggggttttttttaattgaagccctaaaccaggaattatttgtgttctaacaggaggatgaacttgctgaaaataaaactttgctatgtatttactcttttttaaaagacaaaagcaaaaccagactttctacgtactactccaaagactgtgattgtgactataatacatttttggtaatttttttatacctaatttgtataggaagtgctatttctcataggctgtttcttgaaattttaagtttattgctttaaaatggcagtgtttctcccactttgatatgctaacatttagtaagcactggctttatgaaagcggctttttataagtatactgcattttttgagcctatcattaattagcttagtattttctttataatttcttgaacaggcaaatgaaagcttattatagaatgcatgtattttcttttatctttggaacatcagcaccagtatattgctggcagctattgtattaaaaaataaagtatattttcactatcg

SEQ ID NO: 71696 - DNA, 1023 bp, Homo sapiens
ggccctgcctacagcccgaggccccgcccccggcgcccctcccagccgtttgaagcggctcgggctgcggctggctcagagtggcgcggggggcgtggggcggtgctgaggagctgaagccgtggccagctcgacgccggacagtccagcgagcagcacggcgggaaccggcagccggagcagtcccggagcagaagcagcagcagcagcagcagccctcgccgttcgcggagcgcagccgagccggccatggcgttgtcgatgccgctgaatgggctgaaggaggaggacaaagagcccctcatcgagctcttcgtcaaggctggcagtgatggtgaaagcataggaaactgccccttttcccagaggctcttcatgattctttggctcaaaggagttgtatttagtgtgacgactgttgacctgaaaaggaagccagcagacctgcagaacttggctcccgggacccacccaccatttataactttcaacagtgaagtcaaaacggatgtaaataagattgaggaatttcttgaagaagtcttatgccctcccaagtacttaaagctttcaccaaaacacccagaatcaaatactgctggaatggacatctttgccaaattctctgcatatatcaagaattcaaggccagaggctaatgaagcactggagaggggtctcctgaaaaccctgcagaaactggatgaatatctgaattctcctctccctgatgaaattgatgaaaatagtatggaggacataaagttttctacacgtaaatttctggatggcaatgaaatgacattagctgattgcaacctgctgcccaaactgcatattgtcaaggtggtggccaaaaaatatcgcaactttgatattccaaaagaaatgactggcatctggagatacctaactaatgcatacagtagggacgagttcaccaatacctgtcccagtgataaggaggttgaaatagcatatagtgatgtagccaaaagactcaccaagtaaaatcgcgtttgt

SEQ ID NO: 71697 - DNA, 2839 bp, Homo sapiens
  misc_feature (1513)..(1513): n is a, c, g, or t
ggccctgcctacagcccgaggccccgcccccggcgcccctcccagccgtttgaagcggctcgggctgcggctggctcagagtggcgcggggggcgtggggcggtgctgaggagctgaagccgtggccagctcgacgccggacagtccagcgagcagcacggcgggaaccggcagccggagcagtcccggagcagaagcagcagcagcagcagcagccctcgccgttcgcggagcgcagccgagccggccatggcgttgtcgatgccgctgaatgggctgaaggaggaggacaaagagcccctcatcgagctcttcgtcaaggtaaatctcaaatttggattatcaggctaattggaaaggctggcagtgatggtgaaagcataggaaactgccccttttcccagaggctcttcatgattctttggctcaaaggagttgtatttagtgtgacgactgttgacctgaaaaggaagccagcagacctgcagaacttggctcccgggacccacccaccatttataactttcaacagtgaagtcaaaacggatgtaaataagattgaggaatttcttgaagaagtcttatgccctcccaagtacttaaagctttcaccaaaacacccagaatcaaatactgctggaatggacatctttgccaaattctctgcatatatcaagaattcaaggccagaggctaatgaagcactggagaggggtctcctgaaaaccctgcagaaactggatgaatatctgaattctcctctccctgatgaaattgatgaaaatagtatggaggacataaagttttctacacgtaaatttctggatggcaatgaaatgacattagctgattgcaacctgctgcccaaactgcatattgtcaaggtggtggccaaaaaatatcgcaactttgatattccaaaagaaatgactggcatctggagatacctaactaatgcatacagtagggacgagttcaccaatacctgtcccagtgataaggaggttgaaatagcatatagtgatgtagccaaaagactcaccaagtaaaatcgcgtttgtaaaagagatgtcttcatgtcttcccctaagaatacgcttttcctaacaggctactccttcctgtagagcagaaattgtattttgcacgaacatgcagttattgaagattaggatcaaggatagacaaggtatagtagttatcttaaaatatacactcctaagcagtattattttaaaatcctttaccctggctacctcccctacccgggttcccctctctttaatttggagacactccaccacaaacttttcactttagaggtagcttgccatctctcaggagccctcaccattgtgtccattcactgtgtatagatggcagaacttttgaggtgcaatgtttaattgttaaaaatagtagccacgactttatcaggcagccccaaactggtgcataatgcatggtacaagaaatatttatgtattttttggaattttgtaatatttagtangagtatatgaaaggattgctactgtatcagaaatattgtttcaatttagtctatcctggatatgtactaacgaatattaccaccagagaagagagctttctacaaaagtcactacagattttgctatattgctttgtagatagatttttacttttgcctaaaagcatttatccttcataccaattgtaacatctgacaccatgtagaagctaaaagtttagagggagtgagcgttttctcaagaccttcctcaagcattttatctttagaagagaaactgatgggcacctgatactctgtctaaatacgtttgttatatgtgttttgccctgtgccattcatttggaactttattgcattctttattttaaaaagcttgtttttacgtaatcatagagcttgctatttgtacatctgttgagcaacactacataactgatttttagttgacttagctatagcagtacaatgattagtaatgtaaaaattaacacagaaattaacctaaggaatgaagggtgggtttgtcaaaatatcaagtaaatttttgtttctaaagtacatttaatgtagatgacctaaagaatgcgttatccatcctatataaaagaaagataaaacacaggtcaccaattttctcatttcaccccatttaccttgtatagaggattgttcattcctttgggactaagttatagttatggtgagtgtgtatttactgtagttttgcctgatctcactcattgcacttcctggagttaaattttccaacagccatgttgaggaatagcactctgcatgtttttgttttgtttttcggggttttttttaattgaagccctaaaccaggaattatttgtgttctaacaggaggatgaacttgctgaaaataaaactttgctatgtatttactcttttttaaaagacaaaagcaaaaccagactttctacgtactactccaaagactgtgattgtgactataatacatttttggtaatttttttatacctaatttgtataggaagtgctatttctcataggctgtttcttgaaattttaagtttattgctttaaaatggcagtgtttctcccactttgatatgctaacatttagtaagcactggctttatgaaagcggctttttataagtatactgcattttttgagcctatcattaattagcttagtattttctttataatttcttgaacaggcaaatgaaagcttattatagaatgcatgtattttcttttatctttggaacatcagcaccagtatattgctggcagctattgtattaaaaaataaagtatattttcactatcg

SEQ ID NO: 71698 - DNA, 2748 bp, Homo sapiens
  misc_feature (1422)..(1422): n is a, c, g, or t
ggccctgcctacagcccgaggccccgcccccggcgcccctcccagccgtttgaagcggctcgggctgcggctggctcagagtggcgcggggggcgtggggcggtgctgaggagctgaagccgtggccagctcgacgccggacagtccagcgagcagcacggcgggaaccggcagccggagcagtcccggagcagaagcagcagcagcagcagcagccctcgccgttcgcggagcgcagccgagccggccatggcgttgtcgatgccgctgaatgggctgaaggaggaggacaaagagcccctcatcgagctcttcgtcaaggatgattctttggctcaaaggagttgtatttagtgtgacgactgttgacctgaaaaggaagccagcagacctgcagaacttggctcccgggacccacccaccatttataactttcaacagtgaagtcaaaacggatgtaaataagattgaggaatttcttgaagaagtcttatgccctcccaagtacttaaagctttcaccaaaacacccagaatcaaatactgctggaatggacatctttgccaaattctctgcatatatcaagaattcaaggccagaggctaatgaagcactggagaggggtctcctgaaaaccctgcagaaactggatgaatatctgaattctcctctccctgatgaaattgatgaaaatagtatggaggacataaagttttctacacgtaaatttctggatggcaatgaaatgacattagctgattgcaacctgctgcccaaactgcatattgtcaaggtggtggccaaaaaatatcgcaactttgatattccaaaagaaatgactggcatctggagatacctaactaatgcatacagtagggacgagttcaccaatacctgtcccagtgataaggaggttgaaatagcatatagtgatgtagccaaaagactcaccaagtaaaatcgcgtttgtaaaagagatgtcttcatgtcttcccctaagaatacgcttttcctaacaggctactccttcctgtagagcagaaattgtattttgcacgaacatgcagttattgaagattaggatcaaggatagacaaggtatagtagttatcttaaaatatacactcctaagcagtattattttaaaatcctttaccctggctacctcccctacccgggttcccctctctttaatttggagacactccaccacaaacttttcactttagaggtagcttgccatctctcaggagccctcaccattgtgtccattcactgtgtatagatggcagaacttttgaggtgcaatgtttaattgttaaaaatagtagccacgactttatcaggcagccccaaactggtgcataatgcatggtacaagaaatatttatgtattttttggaattttgtaatatttagtangagtatatgaaaggattgctactgtatcagaaatattgtttcaatttagtctatcctggatatgtactaacgaatattaccaccagagaagagagctttctacaaaagtcactacagattttgctatattgctttgtagatagatttttacttttgcctaaaagcatttatccttcataccaattgtaacatctgacaccatgtagaagctaaaagtttagagggagtgagcgttttctcaagaccttcctcaagcattttatctttagaagagaaactgatgggcacctgatactctgtctaaatacgtttgttatatgtgttttgccctgtgccattcatttggaactttattgcattctttattttaaaaagcttgtttttacgtaatcatagagcttgctatttgtacatctgttgagcaacactacataactgatttttagttgacttagctatagcagtacaatgattagtaatgtaaaaattaacacagaaattaacctaaggaatgaagggtgggtttgtcaaaatatcaagtaaatttttgtttctaaagtacatttaatgtagatgacctaaagaatgcgttatccatcctatataaaagaaagataaaacacaggtcaccaattttctcatttcaccccatttaccttgtatagaggattgttcattcctttgggactaagttatagttatggtgagtgtgtatttactgtagttttgcctgatctcactcattgcacttcctggagttaaattttccaacagccatgttgaggaatagcactctgcatgtttttgttttgtttttcggggttttttttaattgaagccctaaaccaggaattatttgtgttctaacaggaggatgaacttgctgaaaataaaactttgctatgtatttactcttttttaaaagacaaaagcaaaaccagactttctacgtactactccaaagactgtgattgtgactataatacatttttggtaatttttttatacctaatttgtataggaagtgctatttctcataggctgtttcttgaaattttaagtttattgctttaaaatggcagtgtttctcccactttgatatgctaacatttagtaagcactggctttatgaaagcggctttttataagtatactgcattttttgagcctatcattaattagcttagtattttctttataatttcttgaacaggcaaatgaaagcttattatagaatgcatgtattttcttttatctttggaacatcagcaccagtatattgctggcagctattgtattaaaaaataaagtatattttcactatcg

SEQ ID NO: 71699 - DNA, 516 bp, Homo sapiens
tttttttagggcattcgaaagttgttaccttaagccaaaaaactattgaatttactctgcctactgtgaccaatacaattggaaaacctacctataaagtgttacatgctgctgcccgaaaatctgtaccacacccatacttttgagaatgaaggaaattctgagcaagataagcaacatgacaaattcagaaatgcaggaaaggaaattgcaagtatagaagccttttgaaaataatactgactcgtgtggatggtgcttattgaaaaacagctggaaatacagtggatcaacagggtaggcccagatcacagaaggcctgaccaggcagtgaatgtgtctttaccatatggaacaattttgaacttctaagatcaagcctttttgttgctgagggtaagaaaggagctctgtgatgaggttccagcttacttctattcgccagtgtccctgtaatgctttctggtgtgatgtaaaatcaattaaacaaaacttgtgctctgcaaaaaaagaaaa

SEQ ID NO: 71700 - DNA, 362 bp, Homo sapiens
gttaactgtattgtccataagacagaattcaagaaattcaggtctgcctgactccagagcccagtattcctaaccgttataccaaactgtaaaatgaaatttaaaaaaatgtcaacccagtataaatgcaagtaaatttactttcactgttttgaatcagcatgtaatttattcactaagcaagtccaattgaatcagtgaattaagaactattcctttaattcttaagatattgttatagtaatggattcaaattgcctgagttcgaatcccagtaccagtcaagtactgtaagcaagtcacttagcatcagtaagccttagtttccttgcctataaagtgaggataaaagtgtctgctat

SEQ ID NO: 71701 - DNA, 364 bp, Homo sapiens
ggaattattttttaacaaacatgcagtggagcacatagaagccagcggtatttgagaaatggggcccaggattaattggttggtatggaaattaaccaagttggcctactatagtcccagaagccttgtccattaatcatacgaatgagtgctgaactctggtgccccccgctactcctcattctctggtgtcatctgttgctgtcctgatgttcattattgcctctggttggagctgtaaagtttcttgacatagggtactatgtcacattctttttcagtaaaatcttacaacttaagacaggtataaatatgctggcaagtacattcttttgtttgaaggctatctctagacttatttttg

SEQ ID NO: 71702 - DNA, 299 bp, Homo sapiens
ctcgcccaacgcggagccctgccgcgcctcggccactgggcagctctgcctgtccgcctgctcgaggcttctgggttgaggggtcgccgacccttgagacggagtcccgggaccatccggacctctggcccaaggatcgtagagtcctgcccgcccggcacttagagcggcagtcgctccagcgctcctggccccgcgcctcgctcaggccgccccccaggcgacccggcccagcccggggcgcaggtgggagaggtgagaggaggctccggagtcctcgcctggtcctgggcggccgc

SEQ ID NO: 71703 - DNA, 395 bp, Homo sapiens
acattcttttgagcttctgattagcctctccaaaggaggcaatcaggcatccctttatctcagtgagcaaaggggtgactttgaatagaatgggacgcaggtttgccctaagcagttcccgatttgacttttctctttagcttagtgattttgggggcccatattttcctttcacaaatgtaaatggattaaatgtccactattaaatacatattggaagaatggattaaaaaaataatccaactaaatgctgactataagaaactcaccttacctataaagacacatatagactgagagtaatggggcgtaaaaagatattccatgcaaatggaaaccaaagttgagcaaaagtagccacacttatatcagataaaacactttaaatcaaaaat

SEQ ID NO: 71704 - DNA, 201 bp, Homo sapiens
ggcacccataatcatgtctcaaactttgctgaatgctctgaatctactgtttctacaatggcttgacttttacttttgtttctactgatgtttaccttaaaattttataaagacatggttacatttatcattggaattaatttaaatagtttccacttccttttgtgaatgtgaacattttgaagactttctcaatcctcc

SEQ ID NO: 71705 - DNA, 358 bp, Homo sapiens
ggtctttaagtttggtgatagttctgtgaccagaaatatgtcagaggaacttagaaaactcagtgtgttccaatatgacatttgctttctgtagctagcttctttccttctttgtttacatacctggatggctgaatgatctagtcgccttgcttcttgtctactaacttctctctccttggtagtagttaaaaacacacactttcaaaggagttcagtggtttctaaaattatttttatggtatagtaaataggctctcaaatttacatagagttttattgtttataaaatattttatatatattttctttttaggatttctgtaaagtagagagggcagacattattttatcctgt

SEQ ID NO: 71706 - DNA, 340 bp, Homo sapiens
tacagttaacaataatatattactatagttgacaataatatctgctatatagataatatataatagtaatatattaataatactatagttaacaatatactatagttaacaataatatagtttcaaatagctagaaggagaatattgaatgtttccaacacaaataaatgataaatctttgagatgatgtatatgctaattaccctaatttgatcactatccattatatatatggaaacatcaccatgtatcccataaacaggtataattattatgtgtcaattaaaaaataaaataagtagacaaagaagcattagaatgcaaacaataaaaataaaat

SEQ ID NO: 71707 - DNA, 409 bp, Homo sapiens
gtccatttcttctaagctgccaaatttatgtgtgtagagtctttcacagtatccactccttcttttgatgtcttcagagtcactagtgatatcccctttttcattcctgatattggtaatttgtgtctactcttttttactttgtcagtctttttagaggtgtgtcagtgttattgatttttttcaaagaaacagctctttgtttttgttaatttttctctgttgtttttctgttttcagtttcactgatttttattgatttctgcttttttattgtttcctttcttctacttgccttttatgtgttcttaaggtgagaatttaggttactgattttaaatgtttcttcttttctaatatatgcatttagtactatagattaccctctcagttctactttacttgtgtc

SEQ ID NO: 71708 - DNA, 382 bp, Homo sapiens
aaattgatatcataagcaatttagaacactgtggcttatttaacaccttaataatcagtactgttttgtaacttaaaatgaaggattctaaacattgaatacacctagtagccaatattaaataacttgcaaataaaaaatatttttaagaaatgcttggaaatttggagctatatctatttggagggaacttgtaaaaattgatcatttaagaaaatatcaggcctggatttttaaaacatcatttttacactcactcatggagttggtttagagaaactcaacatccttatttgtttgcagtagctatttagaaaataaagtttaaccacatatgattttctagaattaataccacaggcacattttatgagcatgaaca

SEQ ID NO: 71709 - DNA, 326 bp, Homo sapiens
caagtggacaaaatattcaaagtagttagtccaaggggaaaagaaccaaccaaacaggagcatctctgaattaacaacttggtccctaaagcatctgctgtcttccctttggcttttcttggttaatttagggtggcattaacttgattaggattgctttaggccgtgctgatgggaatagtcagttggctcttccttcttggagagagggagtgcgacaataaaatttgcaatacttccggtaaacaaacttctgttgcatgtcaactagagaaactcagtctttagttgactctaggaacacttcaggccatcatatattactg

SEQ ID NO: 71710 - DNA, 296 bp, Homo sapiens
aaactgccatccaggaagtgagcaggggtgacagagtgcccatgacactgggactctaccgaagcccccagctcagccagaatgcccgtccacatgagcctgagcagaaggacacacttctctgagcctccatttcctcacgggcaataattctcgcctctcagggctatgtgagcaagaaatggggttgcacgggcaaaacacctcccacgggcttgcccaagtgttgcataggacacacttgcactaagagatagagtatgggacatagttctaccaaaaaagtgtttgttgtt

SEQ ID NO: 71711 - DNA, 536 bp, Homo sapiens
cttcgacgtaggcgctgtgggcgaaggaaaaggcctggcctgctgcctcttctcttgcagcaaaatccgctgctgtgaaggagctggtaggcggacgctctgtagatagagaatccctgatctgcctgggcatcatcttgctctttatgacctgcttggctgccactgtgtagggcctgcttaaagtcctttgcactctcagcattgccctcaagttcaaggacaagcttctcattatggcaggcataaaactctttataattcgtcctccactctcccagctcagggctccagctgttgtctcacacttccttgaagttccctctgctgagtcgcccttgtgcctgaccaacttacttactaaaataaaaatcccaatttctttccagtcatgtgtgcccaagggcgagttatttaacttttctgagctttcctcagtaaaacgaagctacatatcttgcaaggatgtgatattaaagttatgatattgtaaaacaggtgccacggtgcttggcctagggtgagccttcaaccta

SEQ ID NO: 71712 - DNA, 311 bp, Homo sapiens
ccattgtactccagtctgtcacagactgagatattatctcttaaaaaaaaaatggctgggcttactttgggaggccgaggcaggtggatcacttgagcccaggagttcaagatcagcctgaccagcacagtgaaactccatctctactaaaaatagaaaaaattagatgggcgtggtggcacacacttgtaatcccaactattcgggaggctgaggcacgagaatcgtttgaatctgggaggtggttgttgcagtgagccgagatcgtaccactgcactctagtctgggcgacagagcaagaatctgtctc

SEQ ID NO: 71713 - DNA, 241 bp, Homo sapiens
tgattgaaaaaaaagtcaaaagaatatataattaaagaatatacaattgcatatataagtttgaagtttaagagagactagactagagataaaaatttggaagttgatatgtagatggtttttaaagcccatcatgatcatgatggtgaaataatgaaacaatatcatgaatgtgaaataataggaaattcagatttcagtgtccataaataaagttttcttgggacgttgctacacttta

SEQ ID NO: 71714 - DNA, 494 bp, Homo sapiens
agtattaggctctgaacgaaagtggaaacaacagaccctgggccattttcttgagagctatctggatgtaaaatttgtgggtactgcttaccaactggataagggttgtgaaaatcaggaagttaactgggtggatgttggtttcatttactaaaactggaatataagaggaaaggataaagaaggagtagtccagaaactggtggagggttagaaacaaactcaatgttagccagtctgagtcacaggtatctgtggaggaccttaaagagaggtaaggtaaggaaaaagcaaatgtaacagcacagttttctcatcaaagattttatttattttgcaagtaaatcagataggagaagctaaaaaacagatttcaatgaattaagaattaaaaacatgaagtaacataataacatggtatatgacaaagtatgaaaatcaacataacttgatattttataagaactataaaatatcaggaaaaaaactttcag

SEQ ID NO: 71715 - DNA, 1337 bp, Homo sapiens
gataaatcagatggcatcaaaattcagaatttctttcaaaattagaaagacacttaacagaatgaagacaggatacagaagatgtatcttataaggggcttggagtatataaaaaattctcagaactcagtaataagaaaacaataactcagtttttaaaatggtccaaagatttgtatagacacttcactaaaaaatacatgtacatggctattaagcatatgcaaatatgctaagcatcattagtcaaaaccataatgagacaccacttcacacctgctaggatggctataatcagaaagaacaggtaagtgttggtgagcattgtagaaaaattggaaccttcatttgttacgctaggaatgtaagatagtgtgactgattttggtaattcctcaaaaagataagctgagtaaccatatgacccagaaatttcatatacccaagagaattcaaaaaatatattcacacaaaaacctgtatatgagttagcagtattatttataatagccaaatagaaacaacccagtgtccatcaactgatgagtagataaatgtgatctatttgtaaaatagaatattacccagcagttcaaaggaattaagtactgatgcatggtacaacttggataaatctcataaacattaggataagtgaaataagccagtcacaaaagaacatattttctatgatcctatttgtgtgaaatgtccagaataggcaaatctatatatagagaaattagtggttgtctggaactggggagagcagatggagtaggaagtatccactaatagttacagggtttccttttgggatgatgataatgttctaaaagattatggtgatggttgcgtaactgtaaatatacttaaaacaattgaagtctttaaattggtgaactttatgacatatatctgaataaaattgttaattaaaactactgtgagatatcattacatacctattagtgtggctaaaatggtaatagaatgactgaccgtaccaagtgtttgtaaggaggtagagcagttggaattttcatatactgctggtgggagtgtaaagtggtacaccacttcttctggggagcagaaagcaaccttccgggtacaggtgagccaaggttgatgggcagttatgcagagggagttgggatatcactgtgtgtacctgtgcaagtcctggagtgtgttgggtcctcatcagcagggctgtatgaaggtgttcattaaaacaaaactactgatagtgtggcaggagctagaaaacacccctttcttcttagatatccctccagcaccctctactggcaaagtttaactgcccctagcca

SEQ ID NO: 71716 - DNA, 394 bp, Homo sapiens
gataaatcagatggcatcaaaattcagaatttctttcaaaattagaaagacacttaacagaatgaagacaggatacagaagatgtatcttataaggggcttggagtatataaaaaattctcagaactcagtaataagaaaacaataactcagtttttaaaatggtccaaagatttgtatagacacttcactaaaaaatacatgtacatggctattaagcatatgcaaatatgctaagcatcattagtcaaaaccataatgagacaccacttcacacctgctaggatggctataatcagaaagaacaggtaagtgttggtgagcattgtagaaaaatcagtcacactatcttacattcctagcgtaacaaatgaaggttccaatttttcgtcgac

SEQ ID NO: 71717 - DNA, 685 bp, Homo sapiens
tttatacatattaaatttatgaaaattataaaatacaacacttacaaggttatagggagaagtatacagtgacagtgtaaattagtacatttgctggaacattgtctgataatctgtaataataatcataaaatcgtcatattcttttatctaaaaattccaattctgacagtttcttaaaaacaaaacaaaacagaggcaggagaattgcctgaagccaggagtttgagaccagcctgggcaacatagcaagacctctactctacaaaaaattttaaaattagctgggcatagtggcacacacctgtagtcctagcttacttaggcagctgaggcaggtcacttgagcccagagttcaaggttacagtgagctatgatcaggccactgcactccagcatgggtgagagagtgagaccctgtctctaaaaacaaacaaaacaaatttttaagccaaaacagacaaggtgtattggaagtgtttgtagagcattggtacaagggggtaaaagaaaaagccccaaacaagcaggctaagggccacagtatataatttaatgcaatttaagagttattaaaatgataaattgggaaaagcagacctaaaactgttgtctaacaatttacaggcatattaaaatattacccttaatgtggtgagaaagccggaaaatttttatcattgt

SEQ ID NO: 71718 - DNA, 408 bp, Homo sapiens
tttttttttggtaacaaaaataaaaagaaaatgtatatactaatttttcctttcttcttaaacaaaaaaaaagtatactgtataaactttttttgcactttatttttttttatttaacaatatattcttgaaagtcatttcatatgcattccttggattcattattctcattgtcttttgcatagtaccaggaagtgtgtgtaccgtagtttattcagtcagcctcctatatttaagcatttagatgagttccaatattttgcaaagacaaataatgctgcagtgaataaccttatacatgtgtactttcatattgttggaggaatgtcttcagggtaaattcctagatgtaggattgctggatggagggataaatgcatatgttatttgacttgatattgccaaatt

SEQ ID NO: 71719 - DNA, 555 bp, Homo sapiens
ggcaaaaagaatttcacagatgacaaaccttactgatgggaagcagaatcctcacgctgggaagcgtcagcctccaccactgcccagcgagtagacagcaggactcctgtgcgctgagctgagcactgtggtttttgttattttgttttagatctcctctggcaaacacgacatataatatttttataatggatggaaagacatggtggcacaattctgaagaaaaaaatttcacaaaacttgcaaaaaaacagaaacagttgaagagcagctcctgtgtctaagccaggtcgtggggccgtcaaaccaggacttgaaaccacaatgcgaggacattctccatctgcgcaccacagggaggcaattccatttctgcccgggaggtgtattctacaaaaacgtctgcttcccatcccaatttgaatggaccaagaaaaactgctttaccataggacacttgtggcaatatggcaccgatggctggcgtcggtgaacccgacagactatggatttatcatttaataaagcattgattcattttttcagtcaaacatt

SEQ ID NO: 71720 - DNA, 1482 bp, Homo sapiens
atcagaagactggcttctccatgatggtttatggactaaggcaaagatgagcagagccatggccctcttctttgttctctgctggatccaagagtcgggggtctccctatgtttcccaggctggcctcgaactcctgacctcaagtgatcctcccacctcagcctccccgagtgctgggattaaagacgtgagccacggcacctggcctgaattttcctcaaattcaaaaaatcctgatgaaggtttggctaaaatctttgatgaaattgtgctccaagtgttttccaaggttccgtatgacccatcatttgatgaaacaagaacagcagtcagatccattacaaagagagacacacaaaaaaactatgtgaaaatgagcttagcccctggtgttgtgttggaacttcagatgcttgcagacacttcatgaatgctctgtgacactcagaataggctattcccaacagaagagcttgaacaatgctgcatttgcatcaggttcaaatgagcgagaggaacatttggctaaaatatttgatgaaattctactgcaggtgtttccaaagtttccgtatgacccatcatttaacgaagcaacagcagtcagatccattacaaagacagacatgagaaaaggaaccagcattgcttggaattctcctaaaccagaatatttccttggcagtgtggacaaaattcctgataaagatcacctttcagaggagaagaattttaaagaatcctgtctgttcgacagggatttaagagagcagttaactactatagataaagaaacacttcaaggagcagctaaaccagatgctcactttaggactatgccctgcgggcagcttctgcacttcctgcagaggaacaccatcatcgccgccgtctcaggggtggccatcctcatggccatcgtgctgttgctgcttgggttggcctcatacatcaggaagaaacagccatcggacatgtattcctgaccacagaaggaagagcagctccccacagcccttcagtcctgcctgacactgcactgaatgctcagcttgcccctagagcaatggggtggagatctcctctggcaaacacgacatataatatttttataatggatggaaagacatggtggcacaattctgaagaaaaaaatttcacaaaacttgcaaaaaaacagaaacagttgaagagcagctcctgtgtctaagccaggtcgtggggccgtcaaaccaggacttgaaaccacaatgcgaggacattctccatctgcgcaccacagggaggcaattccatttctgcccgggaggtgtattctacaaaaacgtctgcttcccatcccaatttgaatggaccaagaaaaactgctttaccataggacacttgtggcaatatggcaccgatggctggcgtcggtgaacccgacagactatggatttatcatttaataaagcattgattcattttttcagtcaaacatt

SEQ ID NO: 71721 - DNA, 1231 bp, Homo sapiens
atcagaagactggcttctccatgatggtttatggactaaggcaaagatgagcagagccatggccctcttctttgttctctgctggatccaagtagagatgggatttcatcatgttggccaggctggtcatgaactcctgacctcaatggatcctcctgcctcagcttcctgagtagctgggaccacaggtgcacaccaccacgcccagatgaaattgtgctccaagtgttttccaaggttccgtatgacccatcatttgatgaaacaagaacagcagtcagatccattacaaagagagacacacaaaaaagctattcccaacagaagagcttgaacaatgctgcatttgcatcaggttcaaatgagcgagaggaacatttggctaaaatatttgatgaaattctactgcaggtgtttccaaagtttccgtatgacccatcatttaacgaagcaacagcagtcagatccattacaaagacagacatgagaaaaggaaccagcattgcttggaattctcctaaaccagaatatttccttggcagtgtggacaaaattcctgataaagatcacctttcagaggagaagaattttaaagaatcctgtctgttcgacagggatttaagagagcagttaactactatagataaagaaacacttcaaggagcagctaaaccagatgctcactttaggactatgccctgcgggcagcttctgcacttcctgcagaggaacaccatcatcgccgccgtctcaggggtggccatcctcatggccatcgtgctgttgctgcttgggttggcctcatacatcaggaagaaacagccatcatctcctctggcaaacacgacatataatatttttataatggatggaaagacatggtggcacaattctgaagaaaaaaatttcacaaaacttgcaaaaaaacagaaacagttgaagagcagctcctgtgtctaagccaggtcgtggggccgtcaaaccaggacttgaaaccacaatgcgaggacattctccatctgcgcaccacagggaggcaattccatttctgcccgggaggtgtattctacaaaaacgtctgcttcccatcccaatttgaatggaccaagaaaaactgctttaccataggacacttgtggcaatatggcaccgatggctggcgtcggtgaacccgacagactatggatttatcatttaataaagcattgattcattttttcagtcaaacatt

SEQ ID NO: 71722 - DNA, 364 bp, Homo sapiens
gaaaagccaacaggatgcctcttaaagacatctggtgattagaaacccagagactattttatattctgtacttgcctgagatataccaccaactaagcagtctgttgaggatacaggactggatatgggagatggggagtcaacattggttaaatgacttgttccatgccaggcataatcaacattcctcattacttcttcaacatcctcttgaaagctgtgctcattttacaaatgagaaaacagatttagagaaatataatgacttgtatgaggtcacatagcttatgagtggcacagagtggaaggctacctgaattcaaagtcatgttttcactatgccatgaagctcattaaagccatg

SEQ ID NO: 71723 - DNA, 353 bp, Homo sapiens
taataaatacttttcataatactgaatttaacagccacagaatactttgttgtagtttgaaacatatttttttagctaatcctttatgagtggttacttaggttttctttttttgcatttttttctctataaatagatgtggcagacattcttcaggttaaatctttgcacgtaaccatgcttttttccttaggatacattcctggaactagaattggaggccaaaaggcttgccaaactttaagatacctgcttcctattaccaggttatgttggaaatttgtacttctttgctatatatttaaaaatattggctgggtatgatggctcatgtaatgtcagcactttgaaag

SEQ ID NO: 71724 - DNA, 1656 bp, Homo sapiens
gtgttgctgtcctcttgggttccacttcggattttgaacccctgtattttcttttcaaaacccccttttccaatggaaatgctctgttgttaaaaaggaagaaactgtctttctgaaactgacatcacgatgctcccagattttatgctggttctcatcgtccttggcatcccttcctcagccaccacaggtttcaactcaatcgccgaaaatgaagatgccctcctcagacatttgttccaaggttatcagaaatgggtccgccctgtattacattctaatgacaccataaaagtatattttggattgaaaatatcccagcttgtagatgtggatgaaaagaatcagctgatgacaaccaatgtgtggctcaaacaggaatggacagaccacaagttacgctggaatcctgatgattatggtgggatccattccattaaagttccatcagaatctctgtggcttcctgacatagttctctttgaaaatgctgacggccgcttcgaaggctccctgatgaccaaggtcatcgtgaaatcaaacggaactgttgtctggacccctcccgccagctacaaaagctcctgcaccatggacgtcacgtttttcccgttcgaccgacagaactgctccatgaagtttggatcctggacttatgatggcaccatggttgacctcattttgatcaatgaaaatgtcgacagaaaagacttcttcgataacggagaatgggaaatactgaacgcaaaggggatgaaggggaacagaagggacggcgtgtactcctatccctttatcacgtattccttcgtcctgagacgcctgcctttattctataccctctttctcatcatcccctgcctggggctgtctttcctaacagttcttgtgttctatttaccttcggatgaaggagaaaaactttcattatccacatcggtcttggtttctctgacagttttccttttagtgattgaagaaatcatcccatcgtcttccaaagtcattcctctcattggagagtacctgctgttcatcatgatttttgtgaccctgtccatcattgttaccgtgtttgtcattaacgttcaccacagatcttcttccacgtaccaccccatggccccctgggttaagaggctctttctgcagaaacttccaaaattactttgcatgaaagatcatgtggatcgctactcatccccagagaaagaggagagtcaaccagtagtgaaaggcaaagtcctcgaaaaaaagaaacagaaacagcttagtgatggagaaaaagttctagttgcttttttggaaaaagctgctgattccattagatacatttcgagacatgtgaagaaagaacattttatcagccaggtagtacaagactggaaatttgtagctcaagttcttgaccgaatcttcctgtggctctttctgatagtgtcagtaacaggctcggttctgatttttacccctgctttgaagatgtggctacatagttaccattaggaatttaaaagacataagactaaattacaccttagacctgacatctggctatcacacagacagaatccaaatgcatgtgcttgttctacgaaaaaaactgacatctggctatcacacagacagaatccaaatgcatgtgcttgttctacg

SEQ ID NO: 71725 - DNA, 1955 bp, Homo sapiens
gtgttgctgtcctcttgggttccacttcggattttgaacccctgtattttcttttcaaaacccccttttccaatggaaatgctctgttgttaaaaaggaagaaactgtctttctgaaactgacatcacgatgctcccagattttatgctggttctcatcgtccttggcatcccttcctcagccaccacaggtttcaactcaatcgccgaaaatgaagatgccctcctcagacatttgttccaaggttatcagaaatgggtccgccctgtattacattctaatgacaccataaaagtatattttggattgaaaatatcccagcttgtagatgtggatgaaaagaatcagctgatgacaaccaatgtgtggctcaaacaggaatggacagaccacaagttacgctggaatcctgatgattatggtgggatccattccattaaagttccatcagaatctctgtggcttcctgacatagttctctttgaaaatgctgacggccgcttcgaaggctccctgatgaccaaggtcatcgtgaaatcaaacggaactgttgtctggacccctcccgccagctacaaaagctcctgcaccatggacgtcacgtttttcccgttcgaccgacagaactgctccatgaagtttggatcctggacttatgatggcaccatggttgacctcattttgatcaatgaaaatgtcgacagaaaagacttcttcgataacggagaatgggaaatactgaacgcaaaggggatgaaggggaacagaagggacggcgtgtactcctatccctttatcacgtattccttcgtcctgagacgcctgcctttattctataccctctttctcatcatcccctgcctggggctgtctttcctaacagttcttgtgttctatttaccttcggatgaaggagaaaaactttcattatccacatcggtcttggtttctctgacagttttccttttagtgattgaagaaatcatcccatcgtcttccaaagtcattcctctcattggagagtacctgctgttcatcatgatttttgtgaccctgtccatcattgttaccgtgtttgtcattaacgttcaccacagatcttcttccacgtaccaccccatggccccctgggttaagaggctctttctgcagaaacttccaaaattactttgcatgaaagatcatgtggatcgctactcatccccagagaaagaggagagtcaaccagtagtgaaaggcaaagtcctcgaaaaaaagaaacagaaacagcttagtgatggagaaaaagttctagttgcttttttggaaaaagctgctgattccattagatacatttcgagacatgtgaagaaagaacattttatcagccaggtagtacaagactggaaatttgtagctcaagttcttgaccgaatcttcctgtggctctttctgatagtgtcagtaacaggctcggttctgatttttacccctgctttgaagatgtggctacatagttaccattaggaatttaaaagacataagactaaattacaccttagacctgacatctggctatcacacagacagaatccaaatgcatgtgcttgttctacgaaccccgaatgcgttgtctttgtggaaatggaacatctcctcatgggagaaactctggtaaatgtgctcatttgtggttgccatgagagtgagctgcttttaaagaaagtggagcctcctcagacccctgccttggctttcccagacattcagggagggatcataggtccaggcttgagctcacatgtggccagagtgcacaaaaagctgttgctacttggtggaggaacacctcctagaagcagcaggcctcggtggtgggggaggggggattcacctggaattaaggaagtctcggtgtcgagctatctgtgtgggcagagcctggatctcccaccctgcactggcctccttggtgg

SEQ ID NO: 71726 - DNA, 484 bp, Homo sapiens
gaggaacagagctgcctgctgactggaaccgcttcctcccagactaaggtttcccagaggaagagagagaatttggacaaatgaatgaggaacaacgctctcctgagggttttctttaaggggcaaggatcaatgcctctagatcctttgaaagcagagttaagaggcagtacaggaaggcacagcaggaaggttcatggttagactacagagaaggaagcagccactgctggggacctgccctgtgctggtcactgacaagctgtctcattaaaccttcccggaccctcaacccctcctagtatcttatcctcattttacagatgagaagactgcggcccaaataggtccaatgccagtgggatcagcttcgatgggatgcgcacagactgacctcttctccccagccccttcaacttcccagagctgcagggggcctgggagttcttggtaacagcacattaaacctctgtttgtgggaact

SEQ ID NO: 71727 - DNA, 1108 bp, Homo sapiens
  misc_feature (1)..(1): n is a, c, g, or t
  misc_feature (3)..(3): n is a, c, g, or t
  misc_feature (11)..(11): n is a, c, g, or t
ncngcccgtcnacgccaccacgggagcgagggaggtgggtctgcagggcctgagactgttctacagccactgttcacagggctgaagaacaggtgtgggcagaaccaggttgtgagaaggaagccgggcgcagagtagcggccgtacaggagggggaggggcagaagagactggccagcagcggaagcgcgcggcaggtggagccgcgcgggaagaagcacgcatgcgtcgcgggggggttggcccttggggtgctgggcggagcttgggaggggcgaggacgctgaagtaggggcggaacctgtgcggtgcagccctgccctctccctccgcccaaaggtcgcccagcgacggcctgcttgacctggtttctcaaaaagggtgaccccccccctccgccccacgctggtcgcgggtcctggcgagaagcctttcggaaagcaccggggcctgtgtgttcccgcttcctcggacgcgagctctgtgtagccgtggtggaggaaggttttgtttcgttcatcgctgctgtttctcgctgcctctcttgacgaggcaagggcccttgcagggtgcgcccgcgctgccctctgacaggtgctgttggtacctgcggccgggcccgccgtcgccggcgcgtgaacggcctgcccgaggctgccgggaggagggctgcctggccggcgcggcccttcccgtcgtgccccgggctcctcggaagcagcctcccgctccttcagacgtcggactcctgagtttcgaacctgccccgcggtttccccctcacgctgaatccaggggagccgctactcgtttttgaagttcctatgcagccctctcccgacatgttcgagaatcttgccggactggggatggatttgcagcctccgtgtttgcccccacggttcgaaaaccggaatctaggcccggtctcctggcctgtgttctgtcgtgggatttctccagagcacggactgacttaacatttccattactgggaatgtaatggttgctgcgtcaggactctggagatgatttttttatttggaacgatataatttttggaatttccttaaagggaaaaatacatattgcttaattataaaaaatg

SEQ ID NO: 71728 - DNA, 2438 bp, Homo sapiens
  misc_feature (1)..(1): n is a, c, g, or t
  misc_feature (861)..(861): n is a, c, g, or t
  misc_feature (1247)..(1247): n is a, c, g, or t
  misc_feature (1263)..(1263): n is a, c, g, or t
  misc_feature (1902)..(1902): n is a, c, g, or t
  misc_feature (2042)..(2042): n is a, c, g, or t
natccatcttgaattaatctttgtataaggtgtaaggaagggatccagttttggctttctacatatggctagccagctttccaccaccatttattaaatagggaatcctttccccattgcttgtttttgtcaggtttgtcaaagatcagatagttgtagatatgtggcattatttctgagggctctgttctgttccattgatctatatctctgttttggtaccagtaccatgatgttttggttactgtagccttgtagtatagtttgaagtcaggtagcgtgatgcctccagttttgttcttttggcttagggatgacttggcaatgagggctctcttttggttccatatgaactttaaagtagttttttccaattctgtgaagaaagtcattggtagcttgatggggatggcattgaatctgtaaattaccttgggcagtatggccattttcacgagattgattcttcctacccatgagcatggaatgttcttccatttctttgtatcctcttttatttcgttgagcagtggtttgtaattctccttgaagaggtccttcacatcccttgtaagttggattcctaggtattttattctctttgaagcaattgtgaatgggagttcactcatgatttggctctctgtttgtctgttattagtgtataagaatgcttgtgatttttgcacattgattttgtatcctgagactctgctgaagttgcttatcaggttaaggagattttgggctagacgatggggttttctagatatacaatcatgtcatctgcaaacagggacaatttgacttcctcttttcctaattgaataccctttatttccttctcctgcttgattgccntggccagaacttccaacactatgttgaataggagtggtgatttttgcaatctactcatctgacaaagggctaatatccagaatctacaatgaactcaaacaaatttacaagaaaaaaacaacccaatcaacgggctaaggatatgaaaagacccttctcaaaagaagacattgatgcagccaacaaacacatgaaaaaatgctcatcatcactggccatcagagaaatgcaaatcaaaaccacaatgagataccatttcacaccagttagaatggcgatcattaaaaagtcagggaacaacaggtgctggagaggatgtggagaaataggaacacttttacactgttggtgggactgtaaactcattcaaccattgtggaagtcantgtggcgattcctcanggatctagaactagaaataccatttgacccagccatcccattactgggtatatacccaaaggattataaatcatgctgctataaagacacatgcacacatatgtttattgcagcactattcacaatagcaaagacttggaaccaacccaaatgtccaacaatgatagactggattaagaaaatgtggcacatatacaccatggaatactatggagccataaaaaggatgagttcatgtcctttgtaggaacatgggtgaagctggaaaccatcattctcagcaaactatcgcaaggacaaaaaccaaacaccacatgttctcactcataggtgggaaatgaacaatgagaacacatggacaaaggaaggggaacatcacccaccagggcctgttgtggggtgcggggagaggggagggatagcattaggagatatacctaatgtaaatgatgagttaatgggtgcagcacaccaacatggcacatgtatacatacgtaacaaacctgcacattgtgcacatgtaccctaaaacttaaattaaaaaaaaaaagttcaaaaaaaaacaaacaaactcctgagtacagtttttgtgctgagctctcaaagagattacagaatgaacaaatcaagattcttcnataagactgaagtgctggttaccaactttcctggttaacattcagcaaaagcattttctctctaagtctggaactaggatcaggatattttcttttgtaaaattcacttgttactttcagaccaaagttgtgttttacanaaatcatgcgatcttggcactcctgattgcttggttgaaaaaatatttctgaataaaaaatattttaaatttgccattttaaaataattgtcttctttgtacccaaatgttgttttctactatttgtgattctggaaatatttgatccaggtccatcacggtggcacatatgcaactgtttgtcagtggcttctgccctcgggtctacaagaaacatccccccatgttgaacagtttttccaaaacggtttccttaaaactaacttagaagtcattcttacaaaacacatatgacacatatgaaatgtgaccacttctcactacctctgtcaatactgcctgaagtcaagccaccaacatctcataacctcctgatttccctgtctttcttcctcg

SEQ ID NO: 71729 - DNA, 343 bp, Homo sapiens
acaaatattagccaggcgtggtgctgcatgacagtaatccaagatactcaggaggctgaggcaggagaattgcttgaacccaggaggtggaagttgcagtgggccaagattgtgtcactgcactccagcctgggcgacagacactctgtctcaaaaaaaaaaaaaagaaaccatggcactatcaaactccaccagccaatgcgagaagcaggctaagaacacgcatactaggtaagtggacagtgcacatggataagtcaacaatccttcagttgcttcaatgacaaaaacataccacatacttatttcactcatctttccagggcagaaggaagaaataagt

SEQ ID NO: 71730 - DNA, 318 bp, Homo sapiens
ctatttcctgctttggtagatattcccacctgaaatatatggaaattcaactgaaagaattgtttaaggccctttttcttaggtctcatgaatcatatttcaagcaatatatgcatattactacataccattctaccgaataactcaaagatatcccaccttgtttttaggagatattgtcaaaaacactgacaaataccaaagatttcctagtcatgcttacgaatggataaaattgtttggagaactaaacaattctactatgtataattcaatgttgggattttgttaaaaaataaaattccttcaaatcttacc

SEQ ID NO: 71731 - DNA, 2488 bp, Homo sapiens
  misc_feature (2138)..(2138): n is a, c, g, or t
gggggctgttgtggtaactggcatccatcggagtagaagtgctaaatgctgtgcattgcatggaacaattccacccaacggagaattaaccctcttaaaatgccaggtgtgttcctgctaataagcactgataaaagcacaaagaaaacctaactatttgccattgtacaatggcatcagagcagccacactgcagatttcttggttgatgcccaagagtttagtgggaggaaatcactaaattatttttatctgcattttgaaggggtcaggctatgctgggaattgtttttcattaggccagagtcccacagttggatcgagctatagctctgctcaggtcatttgttggtctacatcgggacctagaagccacagagttggtgagtgcagcctgtccttgggcgctatcagatcaccccagtccccagaggggatgctggtggctggcatagtgatggagaactggccacaaaggaatatctttccagaggtttgttgtttttgtttttgtttttgttttttttggtggtggtggtggtggtgttttttgctgtaacaggcaaaggagcagaacactcagaattaaatggtctgttgtctcataaaaaccaactatgtaatcccagcactttgggaggccaaggcaggcggatcacttgaagtcaggagtccaagaccagcctggccaacatggtgaaaccccatctctactaaaaatacaaaaaaattagctgggcatggtgatgcacgcctgtaatcccagctactccagaggctgaggcaggagaatcacttgaacccggaggcagaggttgcagtgggctgagatagtgccactgcactccagcctgggcgacagggcgatactccatctcaaaaaaaaaaagacaaaaacaaaaacaaaaaacaaaaacaactatgatgctcttaaagttaaaaaataagcacagtggctaagagaaataattcagtttagctagctctcagaccactgcagactgctgcccactgatccctgcatttctctcttgctttactgtggattggctaattatttcctgatttattcatttattatctaacacacttggagtgcctgctatgtaccagtactaagaaaaagttcctgacttgggctctttatatgcgaagaagggtggcaaatctatctgttactacggagccacgtgccaggtgctaaggtggaggtgtgctcagtgggtccagagagcagagagaaagggcttcaggtgagacctggcagaggttcaggatagcagggaatctcctaagtgtcccaaatgcgctaatgtttgagctagatcctgaaagaaaacaaggagttaaccaaggtgaagaacaaacgagtggaccaggattccagagaaagaacactgtgcaccaagccacagaggcgtgaaacaaaaggctctcagttgtctagtgtggcaagtggcaggggtgcatggggggagggtgtcggagtggtgccctggagacagggagagctgcgacagattcctggggacggatccttctgcagctcaaagataggagaggcccttagacatccctcaaggccatatgtcaatcaaaataattaaaagtaaaagaaccggaaggcaggcttatatattccaacatccatctagtttttcccccaaaaaaagcttttgataaaataagatgaagtgccaaaaagatgcatgtgttcaatagcgcagcagaaagtgaatagagtaaaagtaataaaaaatactcggccgggcatggtggctcacacctgtagtcccagcactttgggaggccaaggcaggtggttcacctgaggttgggagttcaagactagcctggccaacatggtgaaaccccattactactaaaaatacaataattaggcaggcgtggaggcacgcacctgtaaatcccagctacttgggagactgaggcaggagaattgtttgaacccaggaggaggaggttgcagtgagccaagatcataccattgcactccagcctgggtgacaaggcaagactccgtctcaaaataaataaataaataaataaataaaataaaaaataatctctacaaaactgagttattgctaattctgggtagcacagcacaggagagngtgcttgggtttggagtctgacagaactgagtgcaagtcttggctttactaacttggctaatgccactgtaccagcactttgggaggccaaggggggcagatcacctgaggttaggagtttgagaccagcctggccaacatagtgaaacgccatctctactaaaaatacaaaaattagccgggtgtgatggcacatgcctgtagtcccagctacttgggaggctgaggcacaagaatcacttgaacccaggaggcgggaggttgcagtgagtagaggttgcaacaagctcagatcgtaccactgcactccagcctgggcaacagagcaagactctgtctaaaaaaaaaaa

SEQ ID NO: 71732 - DNA, 443 bp, Homo sapiens
tctgctgcactgcgctggggacggcggagggctctgggcgtgggccccgcggctcgggggcgggtcccggctggaggtagatgtgaagctctggctgcccgggggaggcggccgggcggttgagacagtcgcttgggaaacctacccgctgctcaggagcgagaacagagctccggagccgcacgcagcacaagtctggggatcctctagagtaaactgcaggctgcaagtaaggcacccccacgcccacgcgctcccacttccgctccgggacccccgggacccctcttcaggaactcgggcagagtcgtcagccagctccagggaggtttgggcccgtcaggcttgagtcgagacctgcatcattcctgaagacaaaagcagcttccctttcctccacacttgaaaaggtcacccgcaacctgtccctccgggggacgccc

SEQ ID NO: 71733 - DNA, 414 bp, Homo sapiens
aagaagagctcattgtcatctccaaaaacaaggaccacaattaaatgttttggtttttttattaacaacatgttgacataatatgtggcactgaaaataaacctttttataatgattttttttgaaaattattattattatttttaaaataaagatgaggtcttgctacgttgcccaggcttgtctcaaactcccaagcaccttcagcagtcctcttgccttggcctcccaaagtgctaggattataggcatgagtaaccacacccagccaacctttaataatgtcttaaaaatactatatttgttaagtggtaggttactttcatttaaagatgtataaataagaaagtataggtttagaaactattaaaattggaatttcttcacctgttattattttagatccaattccta

SEQ ID NO: 71734 - DNA, 578 bp, Homo sapiens
gtcaacattatttttaaagctgactcagggaaataaaacctcattgttagtgctgatatatacggtatgttatcctgttgaaaacttaacccctcttgtcctgctcccaactgaactaaataagaggtaagcactttgacagctgctgaccttttgtgcatgttttgccctatggccagtgcctggtttgcaatgggattggcccatgatgtgaagtaaagggcagcacatattcaacactcttcagagaagactctgccaagaatgagaagtgatcagcaaaaatctttgcattttagaggatcaaaaggcccgtgaaacttttctggacacataccatggagcccataacctgtatcgttgttgaacagtgagagcaatgacaagaggagaagtggtgcagaggccccagctcagaggggagatgtggaaagcatcagccatggatgctcacagagaaaagcctgagtctgggatgccagaagcaagggctgcacaccctgtcttctgcacaaaccaaccacaacagtgatttgggcttcaataaaataatcactacgaaatgaaaatcgagccaa

SEQ ID NO: 71735 - DNA, 194 bp, Homo sapiens
ggaggttgcagtgagccgagatcacgccgttgcactccagcctgggcgacagagcaaggttccatcttgggggaaaaaaaaaaaaaacacccagaataatgtctgaccaaatccctgggcacgtcatggtccagctaggttgacaagtaaaagtaagcataacactaagttagtaatacagctcagccacattg

SEQ ID NO: 71736 - DNA, 2049 bp, Homo sapiens
  misc_feature (150)..(150): n is a, c, g, or t
aattcagagccaccgcgggcaggcgggcagtgcatccagaagcgtttatattctgagcgccagttcagctttcaaaaagagtgctgcccagaaaaagccttccaccctcctgtctggctttagaaggaccctgagccccaggcgccagcnacaggactctgctgcagaggggggttgtgtacagatagtagggctttaccgcctagcttcgaaatggataacgtcctcccggtggactcagacctctccccaaacatctccactaacacctcggaacccaatcagttcgtgcaaccagcctggcaaattgtcctttgggcagctgcctacacggtcattgtggtgacctctgtggtgggcaacgtggtagtgatgtggatcatcttagcccacaaaagaatgaggacagtgacgaactattttctggtgaacctggccttcgcggaggcctccatggctgcattcaatacagtggtgaacttcacctatgctgtccacaacgaatggtactacggcctgttctactgcaagttccacaacttcttccccatcgccgctgtcttcgccagtatctactccatgacggctgtggcctttgataggtacatggccatcatacatcccctccagccccggctgtcagccacagccaccaaagtggtcatctgtgtcatctgggtcctggctctcctgctggccttcccccagggctactactcaaccacagagaccatgcccagcagagtcgtgtgcatgatcgaatggccagagcatccgaacaagatttatgagaaagtgtaccacatctgtgtgactgtgctgatctacttcctccccctgctggtgattggctatgcatacaccgtagtgggaatcacactatgggccagtgagatccccggggactcctctgaccgctaccacgagcaagtctctgccaagcgcaaggtggtcaaaatgatgattgtcgtggtgtgcaccttcgccatctgctggctgcccttccacatcttcttcctcctgccctacatcaacccagatctctacctgaagaagtttatccagcaggtctacctggccatcatgtggctggccatgagctccaccatgtacaaccccatcatctactgctgcctcaatgacaggttccgtctgggcttcaagcatgccttccggtgctgccccttcatcagcgccggcgactatgaggggctggaaatgaaatccacccggtatctccagacccagggcagtgtgtacaaagtcagccgcctggagaccaccatctccacagtggtgggggcccacgaggaggagccagaggacggccccaaggccacaccctcgtccctggacctgacctccaactgctcttcacgaagtgactccaagaccatgacagagagcttcagcttctcctccaatgtgctctcctaggccacagggcctttggcaggtgcagcccccactgcctttgacctgcctcccttcatgcatggaaattcccttcatctggaaccatcagaaacaccctcacactgggacttgcaaaaagggtcagtatgggttagggaaaacattccatccttgagtcaaaaaatctcaattcttccctatctttgccaccctcatgctgtgtgactcaaaccaaatcactgaactttgctgagcctgtaaaataaaaggtcggaccagcttttcccaaaagcccattcattccattctggaagtgactttggctgcatgcgagtgctcatttcaggatgaattctgcagcacagctgcggacccggaagactcattttcctggagccccgtgttacttcaataaagttatctcagattagcctcctgcagctggaggctcctatcaccccagcctacgcttgacagggtgaacaaaagaaggcaccacataacatctaaatgaaaaatttagccctgtcttctaagcatctgtgaaaagaaacatatgtattcccctttttggcatctcagtatttcagtacatttatacatcatgagattgagaacctcgggcttccacat

SEQ ID NO: 71737 - DNA, 1359 bp, Homo sapiens
  misc_feature (150)..(150): n is a, c, g, or t
aattcagagccaccgcgggcaggcgggcagtgcatccagaagcgtttatattctgagcgccagttcagctttcaaaaagagtgctgcccagaaaaagccttccaccctcctgtctggctttagaaggaccctgagccccaggcgccagcnacaggactctgctgcagaggggggttgtgtacagatagtagggctttaccgcctagcttcgaaatggataacgtcctcccggtggactcagacctctccccaaacatctccactaacacctcggaacccaatcagttcgtgcaaccagcctggcaaattgtcctttgggcagctgcctacacggtcattgtggtgacctctgtggtgggcaacgtggtagtgatgtggatcatcttagcccacaaaagaatgaggacagtgacgaactattttctggtgaacctggccttcgcggaggcctccatggctgcattcaatacagtggtgaacttcacctatgctgtccacaacgaatggtactacggcctgttctactgcaagttccacaacttcttccccatcgccgctgtcttcgccagtatctactccatgacggctgtggcctttgataggtacatggccatcatacatcccctccagccccggctgtcagccacagccaccaaagtggtcatctgtgtcatctgggtcctggctctcctgctggccttcccccagggctactactcaaccacagagaccatgcccagcagagtcgtgtgcatgatcgaatggccagagcatccgaacaagatttatgagaaagtgtaccacatctgtgtgactgtgctgatctacttcctccccctgctggtgattggctatgcatacaccgtagtgggaatcacactatgggccagtgagatccccggggactcctctgaccgctaccacgagcaagtctctgccaagcgcaaggtggtcaaaatgatgattgtcgtggtgtgcaccttcgccatctgctggctgcccttccacatcttcttcctcctgccctacatcaacccagatctctacctgaagaagtttatccagcaggtctacctggccatcatgtggctggccatgagctccaccatgtacaaccccatcatctactgctgcctcaatgacaggtgaggatcccaaccccatgagctctccaggggccacaagaccatctacatacacagtggccaagcggcatcctaaatgagtaaacccagctgtgagacaagagggacaagtggggactgcagctaacttatcatcacacaactcagcctggctgattatcaccatccaggaatgggagcccggagtagactgattttctttttttcttttcca

SEQ ID NO: 71738 - DNA, 940 bp, Homo sapiens
  misc_feature (150)..(150): n is a, c, g, or t
aattcagagccaccgcgggcaggcgggcagtgcatccagaagcgtttatattctgagcgccagttcagctttcaaaaagagtgctgcccagaaaaagccttccaccctcctgtctggctttagaaggaccctgagccccaggcgccagcnacaggactctgctgcagaggggggttgtgtacagatagtagggctttaccgcctagcttcgaaatggataacgtcctcccggtggactcagacctctccccaaacatctccactaacacctcggaacccaatcagttcgtgcaaccagcctggcaaattgtcctttgggcagctgcctacacggtcattgtggtgacctctgtggtgggcaacgtggtagtgatgtggatcatcttagcccacaaaagaatgaggacagtgacgaactattttctggtgaacctggccttcgcggaggcctccatggctgcattcaatacagtggtgaacttcacctatgctgtccacaacgaatggtactacggcctgttctactgcaagttccacaacttcttccccatcgccgctgtcttcgccagtatctactccatgacggctgtggcctttgataggtacatggccatcatacatcccctccagccccggctgtcagccacagccaccaaagtggtcatctgtgtcatctgggtcctggctctcctgctggccttcccccagggctactactcaaccacagagaccatgcccagcagagtcgtgtgcatgatcgaatggccagagcatccgaacaagatttatgagaaagtatgaaactacaagcctgagcaaggtcccagcgggagaaagaacacagctttacaagccatacagaacctgtgaacatgttcaagccagaaggtttcctcaaaagggaaaaaaaaaatctccgaattaaagctcgttatataaa

SEQ ID NO: 71739 - DNA, 3718 bp, Homo sapiens
acgtcaccaccagcctagctcggacggcaagcggcgggagattttcaaaatgggagcccagaggcaccgcccaggcctcggaaggtgtcagggagaactttccgtggtttcagcgtcgtcgcctggagcggcggtttagagagccgagcctgatgggcgccaaggccggctggctgcttggagcgctgcctcgaagggactgcgtgaaggaagctaatccggagaacccaggccagagcctggaaatatggcgacctgcatcggggagaagatcgaggattttaaagttggaaatctgcttggtaaaggatcatttgctggtgtctacagagctgagtccattcacactggtttggaagttgcaatcaaaatgatagataagaaagccatgtacaaagcaggaatggtacagagagtccaaaatgaggtgaaaatacattgccaattgaaacatccttctatcttggagctttataactattttgaagatagcaattatgtgtatctggtattagaaatgtgccataatggagaaatgaacaggtatctaaagaatagagtgaaacccttctcagaaaatgaagctcgacacttcatgcaccagatcatcacagggatgttgtatcttcattctcatggtatactacaccgggacctcacactttctaacctcctactgactcgtaatatgaacatcaagattgctgattttgggctggcaactcaactgaaaatgccacatgaaaagcactatacattatgtggaactcctaactacatttcaccagaaattgccactcgaagtgcacatggccttgaatctgatgtttggtccctgggctgtatgttttatacattacttatcgggagaccacccttcgacactgacacagtcaagaacacattaaataaagtagtattggcagattatgaaatgccaacttttttgtcaatagaggccaaggaccttattcaccagttacttcgtagaaatccagcagatcgtttaagtctgtcttcagtattggaccatccttttatgtcccgaaattcttcaacaaaaagtaaagatttaggaactgtggaagactcaattgatagtgggcatgccacaatttctactgcaattacagcttcttccagtaccagtataagtggtagtttatttgacaaaagaagacttttgattggtcagccactcccaaataaaatgactgtatttccaaagaataaaagttcaactgatttttcttcttcaggagatggaaacagtttttatactcagtggggaaatcaagaaaccagtaatagtggaaggggaagagtaattcaagatgcagaagaaaggccacattctcgataccttcgtagagcttattcctctgatagatctggcacttctaatagtcagtctcaagcaaaaacatatacaatggaacgatgtcactcagcagaaatgctttcagtgtccaaaagatcaggaggaggtgaaaatgaagagaggtactcacccacagacaacaatgccaacatttttaacttctttaaagaaaagacatccagtagttctggatcttttgaaagacctgataacaatcaagcactctccaatcatctttgtccaggaaaaactccttttccatttgcagacccgacacctcagactgaaaccgtacaacagtggtttgggaatctgcaaataaatgctcatttaagaaaaactactgaatatgacagcatcagcccaaaccgggacttccagggccatccagatttgcagaaggacacatcaaaaaatgcctggactgatacaaaagtcaaaaagaactctgatgcttctgataatgcacattctgtaaaacagcaaaataccatgaaatatatgactgcacttcacagtaaacctgagataatccaacaagaatgtgtttttggctcagatcctctttctgaacagagcaagactaggggtatggagccaccatggggttatcagaatcgtacattaagaagcattacatctccgttggttgctcacaggttaaaaccaatcagacagaaaaccaaaaaggctgtggtgagcatacttgattcagaggaggtgtgtgtggagcttgtaaaggagtatgcatctcaagaatatgtgaaagaagttcttcagatatctagtgatggaaatacgatcactatttattatccaaatggtggtagaggttttcctcttgctgatagaccaccctcacctactgacaacatcagtaggtacagctttgacaatttaccagaaaaatactggcgaaaatatcaatatgcttccaggtttgtacagcttgtaagatctaaatctcccaaaatcacttattttacaagatatgctaaatgcattttgatggagaattctcctggtgctgattttgaggtttggttttatgatggggtaaaaatacacaaaacagaagatttcattcaggtgattgaaaagacagggaagtcttacactttaaaaagtgaaagtgaagttaatagcttgaaagaggagataaaaatgtatatggaccatgctaatgagggtcatcgtatttgtttagcactggaatccataatttcagaagaggaaaggaaaactaggagtgctccctttttcccaataatcataggaagaaaacctggtagtactagttcacctaaggccttatcacctcctccttctgtggattcaaattacccaacgagagatagagcatctttcaacagaatggtcatgcatagtgctgcttctccaacacaggcaccaatccttaatccctctatggttacaaatgaaggacttggtcttacaactacagcttctggaacagacatctcttctaatagtctaaaagattgtcttcctaaatcagcacaacttttgaaatctgtttttgtgaaaaatgttggttgggctacacagttaactagtggagctgtgtgggttcagtttaatgatgggtcccagttggttgtgcaggcaggagtgtcttctatcagttatacctcaccaaatggtcaaacaactaggtatggagaaaatgaaaaattaccagactacatcaaacagaaattacagtgtctgtcttccatccttttgatgttttctaatccgactcctaattttcattgattaaaactcctttcagacatataagtttaataaataacttttttgttgactttcaagtaaagtgattttttttaatttaacataaagtcttcagaaagcctttctatgaaagaattttaacctataatgtaaaggatgtattctgagagaacaaagcagaatgaaacttgagtcacttactaaatatagtggatataaaatagaacacctgactttgctcttagaccataacccccgaacttactatgttcatatatttgtattgaacaatcttttaaaagcaaaaatgtaaatgatgtgtagtttatttgtgcttttattgttttccctgcgtctcagacatgttgagaatcatggacaaaacctgctggaattttggaatttttgaagatgtaaataatgtgtatttatgttataagtaacatatgtaaacatgtatatttgttttatatttatttttgtaacaccagtgtctgatgaaacatttttgcaaatgcattttataaaaaaataaatatagtgataagttaaaaaaaaaattcggccttcgtggcctca

SEQ ID NO: 71740 - DNA, 3843 bp, Homo sapiens
acgtcaccaccagcctagctcggacggcaagcggcgggagattttcaaaatgggagcccagaggcaccgcccaggcctcggaaggtgtcagggagaactttccgtggtttcagcgtcgtcgcctggagcggcggtttagagagccgagcctgatgggcgccaaggccggctggctgcttggagcgctgcctcgaagggactgcgtgaaggaagctaatccggagaacccaggccagagcctggaaatatggcgacctgcatcggggagaagatcgaggattttaaagttggaaatctgcttggtaaaggatcatttgctggtgtctacagagctgagtccattcacactggtttggaagttgcaatcaaaatgatagataagaaagccatgtacaaagcaggaatggtacagagagtccaaaatgaggtgaaaatacattgccaattgaaacatccttctatcttggagctttataactattttgaagatagcaattatgtgtatctggtattagaaatgtgccataatggagaaatgaacaggtatctaaagaatagagtgaaacccttctcagaaaatgaagctcgacacttcatgcaccagatcatcacagggatgttgtatcttcattctcatggtatactacaccgggacctcacactttctaacctcctactgactcgtaatatgaacatcaagattgctgattttgggctggcaactcaactgaaaatgccacatgaaaagcactatacattatgtggaactcctaactacatttcaccagaaattgccactcgaagtgcacatggccttgaatctgatgtttggtccctgggctgtatgttttatacattacttatcgggagaccacccttcgacactgacacagtcaagaacacattaaataaagtagtattggcagattatgaaatgccaacttttttgtcaatagaggccaaggaccttattcaccagttacttcgtagaaatccagcagatcgtttaagtctgtcttcagtattggaccatccttttatgtcccgaaattcttcaacaaaaagtaaagatttaggaactgtggaagactcaattgatagtgggcatgccacaatttctactgcaattacagcttcttccagtaccagtataagtggtagtttatttgacaaaagaagacttttgattggtcagccactcccaaataaaatgactgtatttccaaagaataaaagttcaactgatttttcttcttcaggagatggaaacagtttttatactcagtggggaaatcaagaaaccagtaatagtggaaggggaagagtaattcaagatgcagaagaaaggccacattctcgataccttcgtagagcttattcctctgatagatctggcacttctaatagtcagtctcaagcaaaaacatatacaatggaacgatgtcactcagcagaaatgctttcagtgtccaaaagatcaggaggaggtgaaaatgaagagaggtactcacccacagacaacaatgccaacatttttaacttctttaaagaaaagacatccagtagttctggatcttttgaaagacctgataacaatcaagcactctccaatcatctttgtccaggaaaaactccttttccatttgcagacccgacacctcagactgaaaccgtacaacagtggtttgggaatctgcaaataaatgctcatttaagaaaaactactgaatatgacagcatcagcccaaaccgggacttccagggccatccagatttgcagaaggacacatcaaaaaatgcctggactgatacaaaagtcaaaaagaactctgatgcttctgataatgcacattctgtaaaacagcaaaataccatgaaatatatgactgcacttcacagtaaacctgagataatccaacaagaatgtgtttttggctcagatcctctttctgaacagagcaagactaggggtatggagccaccatggggttatcagaatcgtacattaagaagcattacatctccgttggttgctcacaggttaaaaccaatcagacagaaaaccaaaaaggctgtggtgagcatacttgattcagaggaggtgtgtgtggagcttgtaaaggagtatgcatctcaagaatatgtgaaagaagttcttcagatatctagtgatggaaatacgatcactatttattatccaaatggtggtagaggttttcctcttgctgatagaccaccctcacctactgacaacatcagtaggtacagctttgacaatttaccagaaaaatactggcgaaaatatcaatatgcttccaggtttgtacagcttgtaagatctaaatctcccaaaatcacttattttacaagatatgctaaatgcattttgatggagaattctcctggtgctgattttgaggtttggttttatgatggggtaaaaatacacaaaacagaagatttcattcaggtgattgaaaagacagggaagtcttacactttaaaaagtgaaagtgaagttaatagcttgaaagaggagataaaaatgtatatggaccatgctaatgagggtcatcgtatttgtttagcactggaatccataatttcagaagaggaaaggaaaactaggagtgctccctttttcccaataatcataggaagaaaacctggtagtactagttcacctaaggccttatcacctcctccttctgtggattcaaattacccaacgagagatagagcatctttcaacagaatggtcatgcatagtgctgcttctccaacacaggcaccaatccttaatccctctatggttacaaatgaaggacttggtcttacaactacagcttctggaacagacatctcttctaatagtctaaaagattgtcttcctaaatcagcacaacttttgaaatctgtttttgtgaaaaatgttggttgggctacacagttaactagtggagctgtgtgggttcagtttaatgatgggtcccagttggttgtgcaggcaggagtgtcttctatcagttatacctcaccaaatggtcaaacaactaggtatggagaaaatgaaaaattaccagactacatcaaacagaaattacagtgtctgtcttccatccttttgatgttttctaatccgactcctaattttcattgattaaaactcctttcagacatataagtttaataaataacttttttgttgactttcaagtaaagtgattttttttaatttaacataaagtcttcagaaagcctttctatgaaagaattttaacctataatgtaaaggatgtattctgagagaacaaagcagaatgaaacttgagtcacttactaaatatagtggatataaaatagaacacctgactttgctcttagaccataacccccgaacttactatgttcatatatttgtattgaacaatcttttaaaagcaaaaatgtaaatgatgtgtagtttatttgtgcttttattgttttccctgcgtctcagacatgttgagaatcatggacaaaacctgctggaattttggaatttttgaagatgtaaataatgtgtatttatgttataagtaacatatgtaaacatgtatatttgttttatatttatttttgtaacaccagtgtctgatgaaacatttttgcaaatgcattttataaaaaaataaatatagtgataagttacattatcttttgattcatttaattaaatacttatttttaaataacttaccagtaaactcactttttaaattttgttgcctgttgaggagccaattaaattttaaatattaattttgcaaatgttaaatacattgtttctctattatctgaaaa

SEQ ID NO: 71741 - DNA, 3622 bp, Homo sapiens
acgtcaccaccagcctagctcggacggcaagcggcgggagattttcaaaatgggagcccagaggcaccgcccaggcctcggaaggtgtcagggagaactttccgtggtttcagcgtcgtcgcctggagcggcggtttagagagccgagcctgatgggcgccaaggccggctggctgcttggagcgctgcctcgaagggactgcgtgaaggaagctaatccggagaacccaggccagagcctggaaatatggcgacctgcatcggggagaagatcgaggattttaaagttggaaatctgcttggtaaaggatcatttgctggtgtctacagagctgagtccattcacactggtttggaagttgcaatcaaaatgctttataactattttgaagatagcaattatgtgtatctggtattagaaatgtgccataatggagaaatgaacaggtatctaaagaatagagtgaaacccttctcagaaaatgaagctcgacacttcatgcaccagatcatcacagggatgttgtatcttcattctcatggtatactacaccgggacctcacactttctaacctcctactgactcgtaatatgaacatcaagattgctgattttgggctggcaactcaactgaaaatgccacatgaaaagcactatacattatgtggaactcctaactacatttcaccagaaattgccactcgaagtgcacatggccttgaatctgatgtttggtccctgggctgtatgttttatacattacttatcgggagaccacccttcgacactgacacagtcaagaacacattaaataaagtagtattggcagattatgaaatgccaacttttttgtcaatagaggccaaggaccttattcaccagttacttcgtagaaatccagcagatcgtttaagtctgtcttcagtattggaccatccttttatgtcccgaaattcttcaacaaaaagtaaagatttaggaactgtggaagactcaattgatagtgggcatgccacaatttctactgcaattacagcttcttccagtaccagtataagtggtagtttatttgacaaaagaagacttttgattggtcagccactcccaaataaaatgactgtatttccaaagaataaaagttcaactgatttttcttcttcaggagatggaaacagtttttatactcagtggggaaatcaagaaaccagtaatagtggaaggggaagagtaattcaagatgcagaagaaaggccacattctcgataccttcgtagagcttattcctctgatagatctggcacttctaatagtcagtctcaagcaaaaacatatacaatggaacgatgtcactcagcagaaatgctttcagtgtccaaaagatcaggaggaggtgaaaatgaagagaggtactcacccacagacaacaatgccaacatttttaacttctttaaagaaaagacatccagtagttctggatcttttgaaagacctgataacaatcaagcactctccaatcatctttgtccaggaaaaactccttttccatttgcagacccgacacctcagactgaaaccgtacaacagtggtttgggaatctgcaaataaatgctcatttaagaaaaactactgaatatgacagcatcagcccaaaccgggacttccagggccatccagatttgcagaaggacacatcaaaaaatgcctggactgatacaaaagtcaaaaagaactctgatgcttctgataatgcacattctgtaaaacagcaaaataccatgaaatatatgactgcacttcacagtaaacctgagataatccaacaagaatgtgtttttggctcagatcctctttctgaacagagcaagactaggggtatggagccaccatggggttatcagaatcgtacattaagaagcattacatctccgttggttgctcacaggttaaaaccaatcagacagaaaaccaaaaaggctgtggtgagcatacttgattcagaggaggtgtgtgtggagcttgtaaaggagtatgcatctcaagaatatgtgaaagaagttcttcagatatctagtgatggaaatacgatcactatttattatccaaatggtggtagaggttttcctcttgctgatagaccaccctcacctactgacaacatcagtaggtacagctttgacaatttaccagaaaaatactggcgaaaatatcaatatgcttccaggtttgtacagcttgtaagatctaaatctcccaaaatcacttattttacaagatatgctaaatgcattttgatggagaattctcctggtgctgattttgaggtttggttttatgatggggtaaaaatacacaaaacagaagatttcattcaggtgattgaaaagacagggaagtcttacactttaaaaagtgaaagtgaagttaatagcttgaaagaggagataaaaatgtatatggaccatgctaatgagggtcatcgtatttgtttagcactggaatccataatttcagaagaggaaaggaaaactaggagtgctccctttttcccaataatcataggaagaaaacctggtagtactagttcacctaaggccttatcacctcctccttctgtggattcaaattacccaacgagagatagagcatctttcaacagaatggtcatgcatagtgctgcttctccaacacaggcaccaatccttaatccctctatggttacaaatgaaggacttggtcttacaactacagcttctggaacagacatctcttctaatagtctaaaagattgtcttcctaaatcagcacaacttttgaaatctgtttttgtgaaaaatgttggttgggctacacagttaactagtggagctgtgtgggttcagtttaatgatgggtcccagttggttgtgcaggcaggagtgtcttctatcagttatacctcaccaaatggtcaaacaactaggtatggagaaaatgaaaaattaccagactacatcaaacagaaattacagtgtctgtcttccatccttttgatgttttctaatccgactcctaattttcattgattaaaactcctttcagacatataagtttaataaataacttttttgttgactttcaagtaaagtgattttttttaatttaacataaagtcttcagaaagcctttctatgaaagaattttaacctataatgtaaaggatgtattctgagagaacaaagcagaatgaaacttgagtcacttactaaatatagtggatataaaatagaacacctgactttgctcttagaccataacccccgaacttactatgttcatatatttgtattgaacaatcttttaaaagcaaaaatgtaaatgatgtgtagtttatttgtgcttttattgttttccctgcgtctcagacatgttgagaatcatggacaaaacctgctggaattttggaatttttgaagatgtaaataatgtgtatttatgttataagtaacatatgtaaacatgtatatttgttttatatttatttttgtaacaccagtgtctgatgaaacatttttgcaaatgcattttataaaaaaataaatatagtgataagttaaaaaaaaaattcggccttcgtggcctca

SEQ ID NO: 71742 - DNA, 2627 bp, Homo sapiens
acgtcaccaccagcctagctcggacggcaagcggcgggagattttcaaaatgggagcccagaggcaccgcccaggcctcggaaggtgtcagggagaactttccgtggtttcagcgtcgtcgcctggagcggcggtttagagagccgagcctgatgggcgccaaggccggctggctgcttggagcgctgcctcgaagggactgcgtgaaggaagctaatccggagaacccaggccagagcctggaaatatggcgacctgcatcggggagaagatcgaggattttaaagttggaaatctgcttggtaaaggatcatttgctggtgtctacagagctgagtccattcacactggtttggaagttgcaatcaaaatgatagataagaaagccatgtacaaagcaggaatggtacagagagtccaaaatgaggtgaaaatacattgccaattgaaacatccttctatcttggagctttataactattttgaagatagcaattatgtgtatctggtattagaaatgtgccataatggagaaatgaacaggtatctaaagaatagagtgaaacccttctcagaaaatgaagctcgacacttcatgcaccagatcatcacagggatgttgtatcttcattctcatggtatactacaccgggacctcacactttctaacctcctactgactcgtaatatgaacatcaagattgctgattttgggctggcaactcaactgaaaatgccacatgaaaagcactatacattatgtggaactcctaactacatttcaccagaaattgccactcgaagtgcacatggccttgaatctgatgtttggtccctgggctgtatgttttatacattacttatcgggagaccacccttcgacactgacacagtcaagaacacattaaataaagtagtattggcagattatgaaatgccaacttttttgtcaatagaggccaaggaccttattcaccagttacttcgtagaaatccagcagatcgtttaagtctgtcttcagtattggaccatccttttatgtcccgaaattcttcaacaaaaagtaaagatttaggaactgtggaagactcaattgatagtgggcatgccacaatttctactgcaattacagcttcttccagtaccagtataagtggtagtttatttgacaaaagaagacttttgattggtcagccactcccaaataaaatgactgtatttccaaagaataaaagttcaactgatttttcttcttcaggagatggaaacagtttttatactcagtggggaaatcaagaaaccagtaatagtggaaggggaagagtaattcaagatgcagaagaaaggccacattctcgataccttcgtagagcttattcctctgatagatctggcacttctaatagtcagtctcaagcaaaaacatatacaatggaacgatgtcactcagcagaaatgctttcagtgtccaaaagatcaggaggaggtgaaaatgaagagaggtactcacccacagacaacaatgccaacatttttaacttctttaaagaaaagacatccagtagttctggatcttttgaaagacctgataacaatcaagcactctccaatcatctttgtccaggaaaaactccttttccatttgcagacccgacacctcagactgaaaccgtacaacagtggtttgggaatctgcaaataaatgctcatttaagaaaaactactgaatatgacagcatcagcccaaaccgggacttccagggccatccagatttgcagaaggacacatcaaaaaatgcctggactgatacaaaagtcaaaaagaactctgatgcttctgataatgcacattctgtaaaacagcaaaataccatgaaatatatgactgcacttcacagtaaacctgagataatccaacaagaatgtgtttttggctcagatcctctttctgaacagagcaagactaggggtatggagccaccatggggttatcagaatcgtacattaagaagcattacatctccgttggttgctcacaggttaaaaccaatcagacagaaaaccaaaaaggctgtggtgagcatacttgattcagaggaggtgtgtgtggagcttgtaaaggagtatgcatctcaagaatatgtgaaagaagttcttcagatatctagtgatggaaatacgatcactatttattatccaaatggtggtagaggttttcctcttgctgatagaccaccctcacctactgacaacatcagtaggtacagctttgacaatttaccagaaaaatactggcgaaaatatcaatatgcttccaggtttgtacagcttgtaagatctaaatctcccaaaatcacttattttacaagatatgctaaatgcattttgatggagaattctcctggtgctgattttgaggtttggttttatgatggtaagtaccatttggaaatggtaatttgttcctttagtttgtaatttagtagttacgtatatgtgggtttttaaaattcaacacagtcagttttaaagatgtgtatgtatataactatacatataaattgcacagcggagtatacatgtcaaatcatattaatcaaaatttatctagccttcctttaaacaa

SEQ ID NO: 71743 - DNA, 213 bp, Homo sapiens
gaaacttgttttaaaacagattcaaggtaagcttaaaataatagaatagagaccacttcagataaatacatttcacccagtaaatttaaccagagcagagttttaattccttttaaatgaaaatgttttaagatatatgaaggaaaagaatagatacatttaataagaagagacatcactcagtcagccaagaattgtcaatgaagacttaaa

SEQ ID NO: 71744 - DNA, 468 bp, Homo sapiens
gccctgcagccggtgtaccatggtgatgttgccagagtgcaaatggtgttttggaagggctgtcgggagtgattcccggcactgcatgctgactaaaaaggccgtccatggcttctcttcctgacatccacctaactgctgtggcctcatcaggtttgcctctgaattactaagactgtgctttctgggagttgaaactattgatcacattaagaatttaagattcttgctggagcaacattctcctttgtgtggaaagtcctgaatttttatcttagactttaggaatcactggcaacttataaaatgatagaaactaagggttcaaaagaacccttagcttcttttgaaatgaccacatttttcagaaggggaaactgaggcatggggcggcttggactcgcttcaggccacacagcaattcagtggaaaagaatggagcagaacctggtctgtacttctacgtag

SEQ ID NO: 71745 - DNA, 438 bp, Homo sapiens
gtccacctattattttctgttcactgccaccaattcatagagtgcatcaattttctttcatttttgtttctcaactcctacggcaaagtttagcactataaaatatgtgacatgacttgaggatgaagcagcagctccctgctgaaacttcagagcaagaagcagtttttttttttttagaaagtcaatgagctaccagctgtttgcctaaaaaagatatggcagcattagccacgcagatattctgcagttgttccctggccataatgataaaaaaatttttaagactcaactgcatatgtcttccaggaagtggccacagataccaagctgttactaacaatgaccagtaaggagacatgttaactttgtaatggataagctgtgtcaagatgccatattcaggcattgtcaaggtcactttttattttgtgattc

SEQ ID NO: 71746 - DNA, 743 bp, Homo sapiens
aggaaagtaggtttgaaataggaatgatgagacctttaaagaatgaataccaaaaaattaatttcagataattataaaaataagaactacaagagtgaaatataaggtagagagataaaaaaaattaatgaacaaagaaatttacataaagaatatggttattagaaacagccccaatgggggatggtgttaaaccatggagaagctactcccatgatccaatcaccccccatcaggccccatttccagcttgaggattacaatttgacatgagatttgggtggggacacagatccaaaccgtatcacttacatttcttacctctaaactatttctgtgccaaggttctatatctcattgaatgacagacaccacaagttgcccaagccagaaagctgggtgaagtacttaacttcttccctcaccacaattgcctacatatagtcagtcaattaccagattctattaaatctatctctgatgtaggtcctgattctgtctacttgtctccatcttcattgccactgtcctgttccaggtacctctggctgtttgcaacagacttcaaactggccattctgtgtcctgacttgtttctctaatccattctctatacaaccaccaaagcaatttttataaaacacaaactgatcatgttatttccctgaattaaaacatttcagtggtttgtacattatacctccgcctaaaagctcaaatttcttaacatggccatacacctt

SEQ ID NO: 71747 - DNA, 702 bp, Homo sapiens
gatgttccaagattctttcatcatacccttctgttttcagaatgtcttttgttatctttctagggtaagtctgctggtgacatactctcttcattttccttcatatgtcttgatttccctttcattccagaagggtgttttctctagatacaggtttctgagttgacagtccttttctttcagcacttgaaaaatgtgaaatttccttctgattagaaacctgctatcatttgaactgttttccacatctacatgaagtgtaatttctctcgtgctgatttcaagacttgtcttgtttttataagttttactttgagatatcctggtctggatgtctacaggtttatcctgttgaacattcacttggctttttaaaactgtagcttaatgtcttttgccaaattcgcaaaattttcagccattatttccttaagtactttttcaatcctgccctctctcttcctctccttctgtgactctaacgacacaagtgttaaatctttttatagactcatggttccctgaggctctgcacattttttttttcagtctgtttactgttgttcagactgggtaactacttctgcctgctagttcactgatctttcctcagtctggtctatttgctattaagcctactcactgggctactgtattgtttattatatttttcagttctaaaattactatttggtctttctt

SEQ ID NO: 71748 - DNA, 303 bp, Homo sapiens
atagcagtgtgagaatagactaatatactgctcctagatgtgtacctaatagacatgaaaacttgtgtccatcaaaatacgtattaaagaatgctcatgcaatagtcctggtttaccctagggggataatgtgcccaggccatgcttgaaaccatggatggtactctatatatataccattttttcatatatatatatatctccatacctatgataaagcttaatttacaaattaacacagtaagagattaataaaatagaacaattataaaaacatactgcaataaaatttatgtgaatctg

SEQ ID NO: 71749 - DNA, 340 bp, Homo sapiens
tgtatttttagtagagaaggggtttcgccaagttggccaggctggtctcgaactcctgatctcaggagatcggcctgcctcggcctcccaaaatgctgggattataggcgtgacactgtctctggtttaagagaaccatgggctgagatattgaggaattctccaggccacgaatcttggggcatgcagcctcttccgtaccccacagcatctgggggagctggtgtgctgatggggtcagctctcccagctgcctggaaattctcagacactccctaagaggacatctccacccctcccactctgacgtcactgctttctaacattgctcatttgtttg

SEQ ID NO: 71750 - DNA, 273 bp, Homo sapiens
aattttatgtcaccttttctcattcattaattgttatagccatagccaaaggatctgaaaacataggaccactaatgactgcaaaatgaaatcctgattattgtttttaaatttttagtatgtttaatacacatatgctaacattactgaacagttaaatgataaaataggataattattttattctaaaaaagtattgaccttgacctctttctagctatcttagaaagggcttttgtcaaaaacctccatctcaaaacaaacaaacaaaca

SEQ ID NO: 71751 - DNA, 266 bp, Homo sapiens
tgaagctgcgtcgacgcagtaatgtcaacataatgaaccatcttaattcagcctggcagaggtcacaacagctctagttttcaccttcatggtgaaggatgatcgtgttgttggaataaatagacctggacttgattacaagtgacatttgaaagtgttgattcagattgtcccgtcgcttcaaaatggagccctagtctttaagcacagtggtgagataagtattattaatgacaggcattagttaggataaaggcaaaaaaaaa

SEQ ID NO: 71752 - DNA, 583 bp, Homo sapiens
agataagaagacagacgtttatgaagttctagtgacttacccagtgaggtcaaactctggcaaggtaacgggccttatacttgagtggaggtgatctgactccaggaattcgggttgtgaaccattccatgaggattcctggtcatctcccatcatattcatccccctattccttcagggcctcctcctcatgttctgcctcctcagaccactagcacatcgcctccctgacctcttctagcccttgttcccagagtggactgctgtttacttagaacagaggcacctgggggacttgttcaaattgcatattcctggatctgcaaaatcagaagtctcaaggattagagtctaggaaggggcattttaaaccagctccctaggtaattttgatacacaccgaagttgggaagggctctttagagcaatcgacttaatgccacacaaaaaagcacttgcttatttgtttcccaattattttctgggtcaatgtgattctctaaaagaagagaactctctatggccttctgtagcactcaggttagcattaggcaaaaaaaggattccagggaaggcctactgg

SEQ ID NO: 71753 - DNA, 456 bp, Homo sapiens
atttttcttgaaaatattgtcaaaactctaatatgaaattttgaaattaattaggcaaaaagaaattactgtggtgtaattctgagctttccagtcagtacacagaataagttatggctattccaagataacgttttcctccttttttggatggctgggagagtgtaaggggatttagaacctcagggctgcccagtccagccccagcttcctgaaccatgtaaatattaaaaatttctacttgtgaacactgcttaagtgtggctataattaattgaggtcatcaaatgtgctgaaattgtatccaaaggatgctgtgtggtgagaaatttgggtttttttttcccatgtgaaagcatattctagtatctttttttattggggagaacatagaatttataaaatatataaccattatttgcgggtcagtaggtaccttttgtcccctatgtgttc

SEQ ID NO: 71754 - DNA, 2502 bp, Homo sapiens
aggcgtcgggcgaccgagcgcgcgggaagggcgagcgctatacgccgcgcggctgcctcgccctctctcctggtgatagccatttggcgtcttctgtctgctctcggtgcctggcgaagcccgagttggccctgaggcgtctgcacggggaggcgagggcgagcatgtttgttgtttaccaagaattggaaaaataagggcccggactcttcggactctctgtacggtattggggtgtgggagccacctcctcccctgaaggtcccaggatactcgctgcccgcaccctgcgggctcggccggacattcctcggaaacagctgcgtctgtgtgagaaatgagcggattacctgaggcgtggaggggtttagagacagcattttgccagtccacgacactgaagcggggcaaacgtgggaactccttactgccagaaaggtgagggaatgaggagatgcagcaagcctgctgaaaaggcggcagacatgctgcggggccagcagccacgggaccagcagccacgcagtctgccttcgcagcgtagcttcattcattcatgcgcgtagcaaataagtattcaatgctcaccctatgccattgttctgggcgtcaatgaagggagtataaacagcacctgctcccatggatttggaaggaatctttgctacaatagctaatgaagattgacttgtgcttcctcaagctactctataacttgtatgcccattgattttaattgcatttaagattctgcagtgcacttagtggatgtgcaaacgttttaaacataaaatagaggtcacagcctattgacctctgttcccgtttgcttctttggaaaagtttttagttttgttgctatcttgggatcaaaaatagtgtcccctcttttcttaatgtgcttataaattaatataagttcccttttattgattttccatttcaaacataaatgttaaccaacaagtaacagtttacacatagatgtctgtatgctgctctttctagtcacatccatttagctataacatgatgaagtctaattaattgaagcttcaataaatggaaggaccagcttaaagtaaaataagcctgtgaaaaatcttggcacaattgaaatttcataaatatctgtgaaagataattaggcatcttaaagtgaaaagtcttcattatgaacttattaatgaagatggatgtttttgaagtttgaaagaattcttgtcttaaggtaggggtgtccccaaggagagggtaaattattacctgtcaaaggatatgacaagaaagtacttactggtgaattttctgtgttcgaaagcctggctctgtagaactagaaattggtattgtaagcccaacagtgggttcattttttagagtagtctcaaatttataaatctcaaaaaaaaggaactgtgtaaactagaataacaatttactgattttcaagtaagaaatacgacatgcatttaattcaaactcatgcaaatatttatgaagcacctatgtccaggacactgtgctatgtgttgaaaatttggagttcaaatttatcaagaaagatatatattgaaaaagtaaaagtaggatgggtgttaagaaagaggaagtatgggagcttgtagaagcacgcacgaggtttataacctaggttagatggtcaggaagatctccaaaatgattttatcttaagggaatgagaaattattaaaaaggctttaaataggaaattagcatgatcagatttgtcggctagaatatttgtgtaatcggaaagggtaatgtttcaagaagtgtattaatgtcactttctgggtatacaacttaatcaatccaaggcacctttctgctgaggatttggattcttgtataaaaaatacaaaagaaatatttactttttaactttcgatattaaatataggattttttaaatcgagtttttaggcttcaaatcgaggcattgtcaagacataaaatgtaaatttgtttatggttcaacatatcaaggctaggcctggtggaccaaatgatagggtttctcccatagtaaagacaaggtatcttagtccagtatgaaggatttagtcagagattgatataaggaaggtggtggctatgaagtaggtaaagtagaagaaaatcctattctctttggcttggagaattacgggaaaggggtagaagagctcaagaaagacaccagaaacatttttactgttcccaccctgaagatgtagggtgaggggttgtggctttagaaatatccagattggtgtgggaaaactcaaggacagagaaattactttcccaattctcagatatctgggaagatatcaggctgagcaggaaccacattccagtaaccttgaacagggcggagacagggtaggcattgactttccagagtgctgtaagtttctatgtactgttgagactcagaaaacaatactcccctcctccaccaaaaaaaaaaaaaaaaaaaaaaaaaaaaaaaaaaaa

SEQ ID NO: 71755 - DNA, 2111 bp, Homo sapiens
aggcgtcgggcgaccgagcgcgcgggaagggcgagcgctatacgccgcgcggctgcctcgccctctctcctggtgatagccatttggcgtcttctgtctgctctcggtgcctggcgaagcccgagttggccctgaggcgtctgcacggggaggcgagggcgagcatgtttgttgtttaccaagaattggaaaaataagggcccggactcttcggactctctgtacggtattggggtgtgggagccacctcctcccctgaaggtcccaggatactcgctgcccgcaccctgcgggctcggccggacattcctcggaaacagctgcgtctgtgtgagaaatgagcggattacctgaggcgtggaggggtttagagacagcattttgccagtccacgacactgaagcggggcaaacgtgggaactccttactgccagaaaggtgagggaatgaggagatgcagcaagcctgctgaaaaggcggcagacatgctgcggggccagcagccacgggaccagcagccacgcagtctgccttcgcagcgtagcttcattcattcatgcgcgtagcaaataagtattcaatgctcaccctatgccattgttctgggcgtcaatgaagggagtataaacagcacctgctcccatggatttggaaggaatctttgctacaatagctaatgaagattgacttgtgcttcctcaagctactctataacttgtatgcccattgattttaattgcatttaagattctgcagtgcacttagtggatgtgcaaacgttttaaacataaaatagaggtcacagcctattgacctctgttcccgtttgcttctttggaaaagtttttagttttgttgctatcttgggatcaaaaatagtgtcccctcttttcttaatgtgcttataaattaatataagttcccttttattgattttccatttcaaacataaatgttaaccaacaagtaacagtttacacatagatgtctgtatgctgctctttctagtcacatccatttagctataacatgatgaagtctaattaattgaagcttcaataaatggaaggaccagcttaaagtaaaataagcctgtgaaaaatcttggcacaattgaaatttcataaatatctgtgaaagataattaggcatcttaaagtgaaaagtcttcattatgaacttattaatgaagatggatgtttttgaagtttgaaagaattcttgtcttaaggtaggggtgtccccaaggagagggtaaattattacctgtcaaaggatatgacaagaaagtacttactggtgaattttctgtgttcgaaagcctggctctgtagaactagaaattggtattgtaagcccaacagtgggttcattttttagagtagtctcaaatttataaatctcaaaaaaaaggaactgtgtaaactagaataacaatttactgattttcaagtaagaaatacgacatgcatttaattcaaactcatgcaaatatttatgaagcacctatgtccaggacactgtgctatgtgttgaaaatttggagttcaaatttatcaagaaagatatatattgaaaaagtaaaagtaggatgggtgttaagaaagaggaagtatgggagcttgtagaagcacgcacgaggtttataacctaggttagatggtcaggaagatctccaaaatgattttatcttaagggaatgagaaattattaaaaaggctttaaataggaaattagcatgatcagatttgtcggctagaatatttgtgtaatcggaaagggtaatgtttcaagaagtgtattaatgtcactttctgggtatacaacttaatcaatccaaggcacctttctgctgaggatttggattcttgtataaaaaatacaaaagaaatatttactttttaactttcgatattaaatataggattttttaaatcgagtttttaggcttcaaatcgaggcattgtcaagacataaaatgtaaatttgtttatggttcaacatatcaaggctaggcctggtggaccaaatgagccttagtcgccaaggttctactgaagcagctgacccatctgcagctctattccagaccccacttatctcccagcacc

SEQ ID NO: 71756 - DNA, 2281 bp, Homo sapiens
  misc_feature (1143)..(1143): n is a, c, g, or t
  misc_feature (1173)..(1173): n is a, c, g, or t
  misc_feature (1435)..(1435): n is a, c, g, or t
gttgcctaggtagtcacaagagatcagagggagtcactgtcttttccatgctgagcactcatgtgcccctccctgccctcggtcacatattggaagagtggaagaggcagccactgtggttctaactctgcggctttatctttttggactgtctgaaactcttattcagcatgagttttactgtctcttgtttctgtcactgagggaggtggcatgccatccagcccttcctggcatccagtggctctctcatactgcttgatgtggcttgtctgggagccatggggtttcttctgcctacctaagtaggaaagcttctggccacactatgtccacttgacatgaaggatttccctagataaggccttcccaacctgtgtttacagggacttaacacaaaaacatgtgaaagtaattattctgtgagaaaaaaatatctcttgaaagagtaacttttccgctgcattttgttagctggtgagactgcaaggtatctgaaccgtgtgccctggtacccacccctgtctctggacttctttatgaacactgagtatttgactccccacccttcatggtcagctccttttaacaccctagatatcattgctgtccttttcattgacatgctagagacatttccaattttcatgggagtcagtaagatagagatgatgaaaattcagagtgttcaaagaaagaggaggcctcatcagttgatagaatatacaacagattgtctaatctcagttttcttcacttttctacccattacagtggaaaaaagaacccttaaggaagccagtgcttctcaacattggttacaaaaccatcagtgccagcacttaatttaaaatcttctgaaaatccatcagttggttttcatgtctcactctaaactcagctccaaccaggctgcttcctagattcttgtctgtgtgtgtttctgttttggctctttgttacttccttctgtaaacttaagtaaactcagtttgttgacctagtgaattgattctttccattttctatactattcaccagcatatcaaagatgcttcttcctaactctgatttccagagtaactgtgctatcagcttttcatactaagaactaggtttttaccttttcacatttcttgcctnctacccagttcgtaagccaaattagactcntactcttgtgaagtgccctttagatactagtgtaaaatatactgcgtaattctccattgccctacatatattaaccctttaagaaaatatatcaccagtctattttatcttcgcagaacttgcccaggtatgagccagcatttattaccactcattctagaaggtgccagttaggtagctatccaggtttacattttaaggcagtcgagaccttattcacgtggtatataaacaaccacatttctcttttatatggaacaanacttttcatttgcggctggccttctcactagcttatgctttttttttttaagacctttcttagcactcgctgaactcctccccctcacaatcaatctcagcaactcagcagagtcgcttcagttcacagctcttaatccttcactccagactaaagctaatcttatgtcctcaaacagctacaactcactgttatcacagttccgactgcagagactccatttaagaggaaatttaaaaaataaacaatgctctatttctgtccacatcaaaggtacctctaacagaaacttgtctttgcttctgtctctctgctactggactctcagctcaaggtaatgtaagatgatctcatagatgcactttagcctcttgatgttagcagttgagtcctccctgcgcacaaaatacatttgtggtaatgaatgcccagaatctcactggcacacccaagagtagttaaactaaaattgctactaacacaacattgtagaattcgttgccttaatggatgtgatcttctaggcttactgtgtcttaacaagcagtcttatatatatttatcttgcccagaaagtacacttgtagaatttaacatttgctcctttctccaaacagattaaaggttatgcagctgattgattctgtgtcccattttaaaggtccaggctatcccctagatttagattagttcctaaaaaatcttccagtctgaatcctgacaaatggatagctaaattaatttccactcctcttctctcttgcactgtttggtacattacagccaccattagccttaaaagctgcagcagccaaattcggtgacagtaacataaagcctgagctt

SEQ ID NO: 71757 - DNA, 1464 bp, Homo sapiens
aggcgagctcagcccgcgacctttatcccgcgcgttgcggtcaagatggcgctggtggcttctgtgcgagtcccggcgcgcgttctgctccgcgcgggggcccggctcccgggcgcggccctcgggcggacggagcgggcggccggcggcggagacggcgcgcggcgcttcgggagccagcgggtgctggtggagccggacgcgggcgcaggggtcgctgtgatgaaattcaagaaccccccagtgaacagcctgagcctggagtttctgacggagctggtcatcagcctggagaagctggagaatgacaagagcttccgcggtgtcattctgacctcggaccgcccgggtgtcttctcggccggcctggacctgacggagatgtgtgggaggagccccgcccactacgctgggtactggaaggccgttcaggagctgtggctgcggttgtaccagtccaacctggtgctggtctccgccatcaacggagcctgccccgctggaggctgcctggtggccctgacctgtgactaccgcatcctggcggacaaccccaggtactgcataggactcaatgagacccagctgggcatcatcgcccctttctggttgaaagacaccctggagaacaccatcgggcaccgggcggcggagcgtgccctgcagctggggctgctcttcccgccggcggaggccctgcaggtgggcatagtggaccaggtggtcccggaggagcaggtgcagagcactgcgctgtcagcgatagcccagtggatggccattccagaccatgctcgacagctgaccaaggccatgatgcgaaaggccacggccagccgcctggtcacgcagcgcgatgcggacgtgcagaacttcgtcagcttcatctccaaagactccatccagaagtccctgcagatgtacttagagaggctcaaagaagaaaaaggctaacgattgggctgccacaggcttacggccacacgtgcccctgtgggtcccagggaggtcttaaacaaggtatttttcaacttaaaagtactgccagcgtttcattttgctgatgttacgtagaagttcctgttcctcatagcccagtggcccaaggcccagccacacacaaacacacatgggtgcctgtgcccgtcaggcaaggggagttggagggcagccttttgacttgggattgtgactggcaggggatgccattctggacctggtgaggttgccacggagtgtctctgttcccaaggcagaatcgtaagtcaagtccctggtcatccattctggcctttggactgcctgctcttaggtgtaaggccaggtggtcttggcccccatgacccacacagaactccccagggaaaagccctttggtcactgcccttactcatcaggatgaagagcgcacagtgaatcagagcaactgggggatcctgagccagcgggagtgggactctggag

SEQ ID NO: 71758 - DNA, 1424 bp, Homo sapiens
aggcgagctcagcccgcgacctttatcccgcgcgttgcggtcaagatggcgctggtggcttctgtgcgagtcccggcgcgcgttctgctccgcgcgggggcccggctcccgggcgcggccctcgggcggacggagcgggcggccggcggcggagacggcgcgcggcgcttcgggagccagcgggtgctggtggagccggacgcgggcgcaggggtcgctgtgatgaaattcaagaaccccccagtgaacagcctgagcctggagtttctgacggagctggtcatcagcctggagaagctggagaatgacaagagcttccgcggtgtcattctgacctcggaccgcccgggtgtcttctcggccggcctggacctgacggagatgtgtgggaggagccccgcccactacgctgggtactggaaggccgttcaggagctgtggctgcggttgtaccagtccaacctggtgctggtctccgccatcaacggagcctgccccgctggaggctgcctggtggccctgacctgtgactaccgcatcctggcggacaaccccaggtactgcataggactcaatgagacccagctgggcatcatcgcccctttctggttgaaagacaccctggagaacaccatcgggcaccgggcggcggagcgtgccctgcagctggggctgctcttcccgccggcggaggccctgcaggtgggcatagtggaccaggtggtcccggaggagcaggtgcagagcactgcgctgtcagcgatagcccagtggatggccattccagaccatgctcgacagctgaccaaggccatgatgcgaaaggccacggccagccgcctggtcacgcagcgcgatgcggacgtgcagaacttcgtcagcttcatctccaaagactccatccagaagtccctgcagatgtacttagagaggctcaaagaagaaaaaggctaacgattgggctgccacaggcttacggccacacgtgcccctgtgggtcccagggaggtcttaaacaaggtatttttcaacttaaaaaaaaaaaaaaaaaaaaaacaaaaatttggttgggccgggccttgggccccttgaaaaagtttttataaaccttcgcgtttggggcgccgcgggccccgttgggttagtgttgaccgtgtggccaagagctgtgtttccctaaggggaagaccccgtgggctcatggagcctataggtcgttgggggtttctcttccacacaatataaaaaaacacgcgccgggggggcgaaacccgggaacgcggtcttcgtggaaacaaattctcccagagatgggagagtgtcctgaggagggtccattaatgggggagtctcttattcacacggggggaggctccaggcggacgcctggattattcaaattatagcccccggcccgggggtgt

SEQ ID NO: 71759 - DNA, 1477 bp, Homo sapiens
gcgcggagcattattgggtaccttaagtgccaaagagtatgctgtcgtcgaatccgggatggcgctggtggcttctgtgcgagtcccggcgcgcgttctgctccgcgcgggggcccggctcccgggcgcggccctcgggcggacggagcgggcggccggcggcggagacggcgcgcggcgcttcgggagccagcgggtgctggtggagccggacgcgggcgcaggggtcgctgtgatgaaattcaagaaccccccagtgaacagcctgagcctggagtttctgacggagctggtcatcagcctggagaagctggagaatgacaagagcttccgcggtgtcattctgacctcggaccgcccgggtgtcttctcggccggcctggacctgacggagatgtgtgggaggagccccgcccactacgctgggtactggaaggccgttcaggagctgtggctgcggttgtaccagtccaacctggtgctggtctccgccatcaacggagcctgccccgctggaggctgcctggtggccctgacctgtgactaccgcatcctggcggacaaccccaggtactgcataggactcaatgagacccagctgggcatcatcgcccctttctggttgaaagacaccctggagaacaccatcgggcaccgggcggcggagcgtgccctgcagctggggctgctcttcccgccggcggaggccctgcaggtgggcatagtggaccaggtggtcccggaggagcaggtgcagagcactgcgctgtcagcgatagcccagtggatggccattccagaccatgctcgacagctgaccaaggccatgatgcgaaaggccacggccagccgcctggtcacgcagcgcgatgcggacgtgcagaacttcgtcagcttcatctccaaagactccatccagaagtccctgcagatgtacttagagaggctcaaagaagaaaaaggctaacgattgggctgccacaggcttacggccacacgtgcccctgtgggtcccagggaggtcttaaacaaggtatttttcaacttaaaagtactgccagcgtttcattttgctgatgttacgtagaagttcctgttcctcatagcccagtggcccaaggcccagccacacacaaacacacatgggtgcctgtgcccgtcaggcaaggggagttggagggcagccttttgacttgggattgtgactggcaggggatgccattctggacctggtgaggttgccacggagtgtctctgttcccaaggcagaatcgtaagtcaagtccctggtcatccattctggcctttggactgcctgctcttaggtgtaaggccaggtggtcttggcccccatgacccacacagaactccccagggaaaagccctttggtcactgcccttactcatcaggatgaagagcgcacagtgaatcagagcaactgggggatcctgagccagcgggagtgggactctggag

SEQ ID NO: 71760 - DNA, 1560 bp, Homo sapiens
gcgcggagcattattgggtaccttaagtgccaaagagtatgctgtcgtcgaatccgggatggcgctggtggcttctgtgcgagtcccggcgcgcgttctgctccgcgcgggcgaaacccggggtgggcagggatcgggccggggccggggccaggaccgggaactaacgggctcccccacgctgccttcgcaggggcccggctcccgggcgcggccctcgggcggacggagcgggcggccggcggcggagacggcgcgcggcgcttcgggagccagcgggtgctggtggagccggacgcgggcgcaggggtcgctgtgatgaaattcaagaaccccccagtgaacagcctgagcctggagtttctgacggagctggtcatcagcctggagaagctggagaatgacaagagcttccgcggtgtcattctgacctcggaccgcccgggtgtcttctcggccggcctggacctgacggagatgtgtgggaggagccccgcccactacgctgggtactggaaggccgttcaggagctgtggctgcggttgtaccagtccaacctggtgctggtctccgccatcaacggagcctgccccgctggaggctgcctggtggccctgacctgtgactaccgcatcctggcggacaaccccaggtactgcataggactcaatgagacccagctgggcatcatcgcccctttctggttgaaagacaccctggagaacaccatcgggcaccgggcggcggagcgtgccctgcagctggggctgctcttcccgccggcggaggccctgcaggtgggcatagtggaccaggtggtcccggaggagcaggtgcagagcactgcgctgtcagcgatagcccagtggatggccattccagaccatgctcgacagctgaccaaggccatgatgcgaaaggccacggccagccgcctggtcacgcagcgcgatgcggacgtgcagaacttcgtcagcttcatctccaaagactccatccagaagtccctgcagatgtacttagagaggctcaaagaagaaaaaggctaacgattgggctgccacaggcttacggccacacgtgcccctgtgggtcccagggaggtcttaaacaaggtatttttcaacttaaaagtactgccagcgtttcattttgctgatgttacgtagaagttcctgttcctcatagcccagtggcccaaggcccagccacacacaaacacacatgggtgcctgtgcccgtcaggcaaggggagttggagggcagccttttgacttgggattgtgactggcaggggatgccattctggacctggtgaggttgccacggagtgtctctgttcccaaggcagaatcgtaagtcaagtccctggtcatccattctggcctttggactgcctgctcttaggtgtaaggccaggtggtcttggcccccatgacccacacagaactccccagggaaaagccctttggtcactgcccttactcatcaggatgaagagcgcacagtgaatcagagcaactgggggatcctgagccagcgggagtgggactctggag

SEQ ID NO: 71761 - DNA, 1429 bp, Homo sapiens
agcggggtagcgcgcggctgcccggggtgaagccggagggcggcgagcggctgtttcggccggggcccggctcccgggcgcggccctcgggcggacggagcgggcggccggcggcggagacggcgcgcggcgcttcgggagccagcgggtgctggtggagccggacgcgggcgcaggggtcgctgtgatgaaattcaagaaccccccagtgaacagcctgagcctggagtttctgacggagctggtcatcagcctggagaagctggagaatgacaagagcttccgcggtgtcattctgacctcggaccgcccgggtgtcttctcggccggcctggacctgacggagatgtgtgggaggagccccgcccactacgctgggtactggaaggccgttcaggagctgtggctgcggttgtaccagtccaacctggtgctggtctccgccatcaacggagcctgccccgctggaggctgcctggtggccctgacctgtgactaccgcatcctggcggacaaccccaggtactgcataggactcaatgagacccagctgggcatcatcgcccctttctggttgaaagacaccctggagaacaccatcgggcaccgggcggcggagcgtgccctgcagctggggctgctcttcccgccggcggaggccctgcaggtgggcatagtggaccaggtggtcccggaggagcaggtgcagagcactgcgctgtcagcgatagcccagtggatggccattccagaccatgctcgacagctgaccaaggccatgatgcgaaaggccacggccagccgcctggtcacgcagcgcgatgcggacgtgcagaacttcgtcagcttcatctccaaagactccatccagaagtccctgcagatgtacttagagaggctcaaagaagaaaaaggctaacgattgggctgccacaggcttacggccacacgtgcccctgtgggtcccagggaggtcttaaacaaggtatttttcaacttaaaagtactgccagcgtttcattttgctgatgttacgtagaagttcctgttcctcatagcccagtggcccaaggcccagccacacacaaacacacatgggtgcctgtgcccgtcaggcaaggggagttggagggcagccttttgacttgggattgtgactggcaggggatgccattctggacctggtgaggttgccacggagtgtctctgttcccaaggcagaatcgtaagtcaagtccctggtcatccattctggcctttggactgcctgctcttaggtgtaaggccaggtggtcttggcccccatgacccacacagaactccccagggaaaagccctttggtcactgcccttactcatcaggatgaagagcgcacagtgaatcagagcaactgggggatcctgagccagcgggagtgggactctggag

SEQ ID NO: 71762 - DNA, 1441 bp, Homo sapiens
  misc_feature (46)..(47): n is a, c, g, or t
  misc_feature (70)..(70): n is a, c, g, or t
tctgctaggtcgagcctgggttgaatcggccgaggggctctgtgcnngtccggcgcgcgttctgctccgngcgggggcccggctcccgggcgcggccctcgggcggacggagcgggcggccggcggcggagacggcgcgcggcgcttcgggagccagcgggtgctggtggagccggacgcgggcgcaggggtcgctgtgatgaaattcaagaaccccccagtgaacagcctgagcctggagtttctgacggagctggtcatcagcctggagaagctggagaatgacaagagcttccgcggtgtcattctgacctcggaccgcccgggtgtcttctcggccggcctggacctgacggagatgtgtgggaggagccccgcccactacgctgggtactggaaggccgttcaggagctgtggctgcggttgtaccagtccaacctggtgctggtctccgccatcaacggagcctgccccgctggaggctgcctggtggccctgacctgtgactaccgcatcctggcggacaaccccaggtactgcataggactcaatgagacccagctgggcatcatcgcccctttctggttgaaagacaccctggagaacaccatcgggcaccgggcggcggagcgtgccctgcagctggggctgctcttcccgccggcggaggccctgcaggtgggcatagtggaccaggtggtcccggaggagcaggtgcagagcactgcgctgtcagcgatagcccagtggatggccattccagaccatgctcgacagctgaccaaggccatgatgcgaaaggccacggccagccgcctggtcacgcagcgcgatgcggacgtgcagaacttcgtcagcttcatctccaaagactccatccagaagtccctgcagatgtacttagagaggctcaaagaagaaaaaggctaacgattgggctgccacaggcttacggccacacgtgcccctgtgggtcccagggaggtcttaaacaaggtatttttcaacttaaaagtactgccagcgtttcattttgctgatgttacgtagaagttcctgttcctcatagcccagtggcccaaggcccagccacacacaaacacacatgggtgcctgtgcccgtcaggcaaggggagttggagggcagccttttgacttgggattgtgactggcaggggatgccattctggacctggtgaggttgccacggagtgtctctgttcccaaggcagaatcgtaagtcaagtccctggtcatccattctggcctttggactgcctgctcttaggtgtaaggccaggtggtcttggcccccatgacccacacagaactccccagggaaaagccctttggtcactgcccttactcatcaggatgaagagcgcacagtgaatcagagcaactgggggatcctgagccagcgggagtgggactctggag

SEQ ID NO: 71763 - DNA, 1466 bp, Homo sapiens
catgatgttatgaggcgtccctgttttaattcatccggggcctgatgttcattgtagttactgtgcagatggctggcgactctgtactgctccgcgcgggggcccggctcccgggcgcggccctcgggcggacggagcgggcggccggcggcggagacggcgcgcggcgcttcgggagccagcgggtgctggtggagccggacgcgggcgcaggggtcgctgtgatgaaattcaagaaccccccagtgaacagcctgagcctggagtttctgacggagctggtcatcagcctggagaagctggagaatgacaagagcttccgcggtgtcattctgacctcggaccgcccgggtgtcttctcggccggcctggacctgacggagatgtgtgggaggagccccgcccactacgctgggtactggaaggccgttcaggagctgtggctgcggttgtaccagtccaacctggtgctggtctccgccatcaacggagcctgccccgctggaggctgcctggtggccctgacctgtgactaccgcatcctggcggacaaccccaggtactgcataggactcaatgagacccagctgggcatcatcgcccctttctggttgaaagacaccctggagaacaccatcgggcaccgggcggcggagcgtgccctgcagctggggctgctcttcccgccggcggaggccctgcaggtgggcatagtggaccaggtggtcccggaggagcaggtgcagagcactgcgctgtcagcgatagcccagtggatggccattccagaccatgctcgacagctgaccaaggccatgatgcgaaaggccacggccagccgcctggtcacgcagcgcgatgcggacgtgcagaacttcgtcagcttcatctccaaagactccatccagaagtccctgcagatgtacttagagaggctcaaagaagaaaaaggctaacgattgggctgccacaggcttacggccacacgtgcccctgtgggtcccagggaggtcttaaacaaggtatttttcaacttaaaagtactgccagcgtttcattttgctgatgttacgtagaagttcctgttcctcatagcccagtggcccaaggcccagccacacacaaacacacatgggtgcctgtgcccgtcaggcaaggggagttggagggcagccttttgacttgggattgtgactggcaggggatgccattctggacctggtgaggttgccacggagtgtctctgttcccaaggcagaatcgtaagtcaagtccctggtcatccattctggcctttggactgcctgctcttaggtgtaaggccaggtggtcttggcccccatgacccacacagaactccccagggaaaagccctttggtcactgcccttactcatcaggatgaagagcgcacagtgaatcagagcaactgggggatcctgagccagcgggagtgggactctggag

SEQ ID NO: 71764 - DNA, 1402 bp, Homo sapiens
gggctaggtgcgaggccgtgtgttatgctcgggcggggcccggctcccgggcgcggccctcgggcggacggagcgggcggccggcggcggagacggcgcgcggcgcttcgggagccagcgggtgctggtggagccggacgcgggcgcaggggtcgctgtgatgaaattcaagaaccccccagtgaacagcctgagcctggagtttctgacggagctggtcatcagcctggagaagctggagaatgacaagagcttccgcggtgtcattctgacctcggaccgcccgggtgtcttctcggccggcctggacctgacggagatgtgtgggaggagccccgcccactacgctgggtactggaaggccgttcaggagctgtggctgcggttgtaccagtccaacctggtgctggtctccgccatcaacggagcctgccccgctggaggctgcctggtggccctgacctgtgactaccgcatcctggcggacaaccccaggtactgcataggactcaatgagacccagctgggcatcatcgcccctttctggttgaaagacaccctggagaacaccatcgggcaccgggcggcggagcgtgccctgcagctggggctgctcttcccgccggcggaggccctgcaggtgggcatagtggaccaggtggtcccggaggagcaggtgcagagcactgcgctgtcagcgatagcccagtggatggccattccagaccatgctcgacagctgaccaaggccatgatgcgaaaggccacggccagccgcctggtcacgcagcgcgatgcggacgtgcagaacttcgtcagcttcatctccaaagactccatccagaagtccctgcagatgtacttagagaggctcaaagaagaaaaaggctaacgattgggctgccacaggcttacggccacacgtgcccctgtgggtcccagggaggtcttaaacaaggtatttttcaacttaaaagtactgccagcgtttcattttgctgatgttacgtagaagttcctgttcctcatagcccagtggcccaaggcccagccacacacaaacacacatgggtgcctgtgcccgtcaggcaaggggagttggagggcagccttttgacttgggattgtgactggcaggggatgccattctggacctggtgaggttgccacggagtgtctctgttcccaaggcagaatcgtaagtcaagtccctggtcatccattctggcctttggactgcctgctcttaggtgtaaggccaggtggtcttggcccccatgacccacacagaactccccagggaaaagccctttggtcactgcccttactcatcaggatgaagagcgcacagtgaatcagagcaactgggggatcctgagccagcgggagtgggactctggag

SEQ ID NO: 71765 - DNA, 1473 bp, Homo sapiens
gtgtcaagatggctgcttgtggcttccttgtgctgatgctcctgtgctgctgctgttcttgctcctgctgctgtgttgtgccctgtgtctccctgtgtgctgctgtgccctcgtgtgctgtgactggagctgtggcgtgcctggctgtgctccggcggcggagacggcgcgcggcgcttcgggagccagcgggtgctggtggagccggacgcgggcgcaggggtcgctgtgatgaaattcaagaaccccccagtgaacagcctgagcctggagtttctgacggagctggtcatcagcctggagaagctggagaatgacaagagcttccgcggtgtcattctgacctcggaccgcccgggtgtcttctcggccggcctggacctgacggagatgtgtgggaggagccccgcccactacgctgggtactggaaggccgttcaggagctgtggctgcggttgtaccagtccaacctggtgctggtctccgccatcaacggagcctgccccgctggaggctgcctggtggccctgacctgtgactaccgcatcctggcggacaaccccaggtactgcataggactcaatgagacccagctgggcatcatcgcccctttctggttgaaagacaccctggagaacaccatcgggcaccgggcggcggagcgtgccctgcagctggggctgctcttcccgccggcggaggccctgcaggtgggcatagtggaccaggtggtcccggaggagcaggtgcagagcactgcgctgtcagcgatagcccagtggatggccattccagaccatgctcgacagctgaccaaggccatgatgcgaaaggccacggccagccgcctggtcacgcagcgcgatgcggacgtgcagaacttcgtcagcttcatctccaaagactccatccagaagtccctgcagatgtacttagagaggctcaaagaagaaaaaggctaacgattgggctgccacaggcttacggccacacgtgcccctgtgggtcccagggaggtcttaaacaaggtatttttcaacttaaaagtactgccagcgtttcattttgctgatgttacgtagaagttcctgttcctcatagcccagtggcccaaggcccagccacacacaaacacacatgggtgcctgtgcccgtcaggcaaggggagttggagggcagccttttgacttgggattgtgactggcaggggatgccattctggacctggtgaggttgccacggagtgtctctgttcccaaggcagaatcgtaagtcaagtccctggtcatccattctggcctttggactgcctgctcttaggtgtaaggccaggtggtcttggcccccatgacccacacagaactccccagggaaaagccctttggtcactgcccttactcatcaggatgaagagcgcacagtgaatcagagcaactgggggatcctgagccagcgggagtgggactctggag

SEQ ID NO: 71766 - DNA, 1432 bp, Homo sapiens
gcgcggagcattattgggtaccttaagtgccaaagagtatgctgtcgtcgaatccgggatggcgctggtggcttctgtgcgagtcccggcgcgcgttctgctccgcgcggccggcggcggagacggcgcgcggcgcttcgggagccagcgggtgctggtggagccggacgcgggcgcaggggtcgctgtgatgaaattcaagaaccccccagtgaacagcctgagcctggagtttctgacggagctggtcatcagcctggagaagctggagaatgacaagagcttccgcggtgtcattctgacctcggaccgcccgggtgtcttctcggccggcctggacctgacggagatgtgtgggaggagccccgcccactacgctgggtactggaaggccgttcaggagctgtggctgcggttgtaccagtccaacctggtgctggtctccgccatcaacggagcctgccccgctggaggctgcctggtggccctgacctgtgactaccgcatcctggcggacaaccccaggtactgcataggactcaatgagacccagctgggcatcatcgcccctttctggttgaaagacaccctggagaacaccatcgggcaccgggcggcggagcgtgccctgcagctggggctgctcttcccgccggcggaggccctgcaggtgggcatagtggaccaggtggtcccggaggagcaggtgcagagcactgcgctgtcagcgatagcccagtggatggccattccagaccatgctcgacagctgaccaaggccatgatgcgaaaggccacggccagccgcctggtcacgcagcgcgatgcggacgtgcagaacttcgtcagcttcatctccaaagactccatccagaagtccctgcagatgtacttagagaggctcaaagaagaaaaaggctaacgattgggctgccacaggcttacggccacacgtgcccctgtgggtcccagggaggtcttaaacaaggtatttttcaacttaaaagtactgccagcgtttcattttgctgatgttacgtagaagttcctgttcctcatagcccagtggcccaaggcccagccacacacaaacacacatgggtgcctgtgcccgtcaggcaaggggagttggagggcagccttttgacttgggattgtgactggcaggggatgccattctggacctggtgaggttgccacggagtgtctctgttcccaaggcagaatcgtaagtcaagtccctggtcatccattctggcctttggactgcctgctcttaggtgtaaggccaggtggtcttggcccccatgacccacacagaactccccagggaaaagccctttggtcactgcccttactcatcaggatgaagagcgcacagtgaatcagagcaactgggggatcctgagccagcgggagtgggactctggag

SEQ ID NO: 71767 - DNA, 1373 bp, Homo sapiens
aggcgagctcagcccgcgacctttatcccgcgcgttgcggtcaagatggcgctggtggcttctgtgcgagtcccggcgcgcgttctgctccgcgcgggggcccggctcccgggcgcggccctcgggcggacggagcgggcggccggcggcggagacggcgcgcggcgcttcgggagccagcgggtgctggtggagccggacgcgggcgcaggggtcgctgtgatgaaattcaagaaccccccagtgaacagcctgagcctggagtttctgacggagctggtcatcagcctggagaagctggagaatgacaagagcttccgcggtgtcattctgacctcggaccgcccgggtgtcttctcggccggcctggacctgacggagatgtgtgggaggagccccgcccactacgctgggtactggaaggccgttcaggagctgtggctgcggttgtaccagtccaacctggtgctggtctccgccatcaacggagcctgccccgctggaggctgcctggtggccctgacctgtgactaccgcatcctggcggacaaccccaggttgaaagacaccctggagaacaccatcgggcaccgggcggcggagcgtgccctgcagctggggctgctcttcccgccggcggaggccctgcaggtgggcatagtggaccaggtggtcccggaggagcaggtgcagagcactgcgctgtcagcgatagcccagtggatggccattccagaccatgctcgacagctgaccaaggccatgatgcgaaaggccacggccagccgcctggtcacgcagcgcgatgcggacgtgcagaacttcgtcagcttcatctccaaagactccatccagaagtccctgcagatgtacttagagaggctcaaagaagaaaaaggctaacgattgggctgccacaggcttacggccacacgtgcccctgtgggtcccagggaggtcttaaacaaggtatttttcaacttaaaaaaaaaaaaaaaaaaaaaacaaaaatttggttgggccgggccttgggccccttgaaaaagtttttataaaccttcgcgtttggggcgccgcgggccccgttgggttagtgttgaccgtgtggccaagagctgtgtttccctaaggggaagaccccgtgggctcatggagcctataggtcgttgggggtttctcttccacacaatataaaaaaacacgcgccgggggggcgaaacccgggaacgcggtcttcgtggaaacaaattctcccagagatgggagagtgtcctgaggagggtccattaatgggggagtctcttattcacacggggggaggctccaggcggacgcctggattattcaaattatagcccccggcccgggggtgt

SEQ ID NO: 71768 - DNA, 1830 bp, Homo sapiens
aggcgagctcagcccgcgacctttatcccgcgcgttgcggtcaagatggcgctggtggcttctgtgcgagtcccggcgcgcgttctgctccgcgcgggggcccggctcccgggcgcggccctcgggcggacggagcgggcggccggcggcggagacggcgcgcggcgcttcgggagccagcgggtgctggtggagccggacgcgggcgcaggggtcgctgtgatgaaattcaagaaccccccagtgaacagcctgagcctggagtttctgacggagctggtcatcagcctggagaagctggagaatgacaagagcttccgcggtgtcattctgacctcggaccgcccgggtgtcttctcggccggcctggacctgacggagatgtgtgggaggagccccgcccactacgctgggtactggaaggccgttcaggagctgtggctgcggttgtaccagtccaacctggtgctggtctccgccatcaacggagcctgccccgctggaggctgcctggtggccctgacctgtgactaccgcatcctggcggacaaccccaggtactgcataggactcaatgagacccagctgggcatcatcgcccctttctggttgaaagacaccctggagaacaccatcgggcaccgggcggcggagcgtgccctgcagctggggctgctcttcccgccggcggaggccctgcaggtgggcatagtggaccaggtggtcccggaggagcaggtgcagagcactgcgctgtcagcgatagcccagtggatggccattccaggtgaggcacggggcatggcgggcgcccgatgatgctggggagaccagaaggttctccacccaaaggttttctgtggacatcgtgacttcgggagactgttgataatcacagccatgtgggtgtcaggaggctgctgtaacaacgcagcacagaccgggtggcccagaccgcagaagctcatctcacggtgctggagaccagaggtgcaaaatcaaagtgtgggcaggactgcacttcctccctgcgttccagggaggctccttcctgccccgcccacttctgctggctccaggcctccctgggcttgtgggcgcctcgctctaatctctgcctccatccttacgcagctttctcccctgtgtttctgtgggtctcaggtctctctctcccttctcaggacacctgccatgtgatttaggacctaccttaaatccaagatgatcccaacttaattacatctgcagagactctttccaaataaggtcacacttccaagttccagagcagtggttagggcttggacctatcttttggggcacacttttcaacctactacaaagacaattgtccacttcatagaaaaagagctggtcatatcagcgatggtatagaccagggcccagcaaattctgtctctaaagggccaggtggcttgtgggctctgtaggtaagacctttgtagcagaaagcagccacagaggagacgtaaactgacaggtatagctgtgttccggcaaagctttatggacagtgggccaggtgcggtggctcacgcctgtaatctcagcactttgggaggctgaggcaggcagatcacttgagatcaggagttcaagaccagcctggccaacatggtgaaaccccatctctataaaaatacaaaaattagccaggtgtggcggcgggcgcctgtagtcccagctactcgagaggctgaggcaggaggatggcgtgaacccgggaggcggagcttgcagtgagctgagatcgcaccactgtactctagcctgagcaacagagagcaggactctgtctcaaaaaaa

SEQ ID NO: 71769 - DNA, 682 bp, Homo sapiens
attagacccagctgggcatcatagcccagtggatggccattccagaccatgctcgacagctgaccaaggccatgatgcgaaaggccacggccagccgcctggtcacgcagcgcgatgcggacgtgcagaacttcgtcagcttcatctccaaagactccatccagaagtccctgcagatgtacttagagaggctcaaagaagaaaaaggctaacgattgggctgccacaggcttacggccacacgtgcccctgtgggtcccagggaggtcttaaacaaggtatttttcaacttaaaaaaaaaaaaaaaaaaaaaacaaaaatttggttgggccgggccttgggccccttgaaaaagtttttataaaccttcgcgtttggggcgccgcgggccccgttgggttagtgttgaccgtgtggccaagagctgtgtttccctaaggggaagaccccgtgggctcatggagcctataggtcgttgggggtttctcttccacacaatataaaaaaacacgcgccgggggggcgaaacccgggaacgcggtcttcgtggaaacaaattctcccagagatgggagagtgtcctgaggagggtccattaatgggggagtctcttattcacacggggggaggctccaggcggacgcctggattattcaaattatagcccccggcccgggggtgt

SEQ ID NO: 71770 - DNA, 400 bp, Homo sapiens
gtatagaccagggcccagcaaattctgtctctaaagggccaggtggcttgtgggctctgtaggtaagacctttgtagcagaaagcagccacagaggagacgtaaactgacaggtatagctgtgttccggcaaagctttatggacagtgggccaggtgcggtggctcacgcctgtaatctcagcactttgggaggctgaggcaggcagatcacttgagatcaggagttcaagaccagcctggccaacatggtgaaaccccatctctactaaaaatacagaaatgggccaggcgcggtggctcacacctgtaatcccaacattttaagaggccgaggcgggcggatcacaaggtcaggagatcaagaccatcctggctaacacggtgaaaccctgtctctac

SEQ ID NO: 71771 - DNA, 350 bp, Homo sapiens
aacctgggatgtgtggccttctggccaagcatctgtcatttcatattgttggagcattccttataaccctggggttgcagctctctgtaagtttgctgtggcctgaccaagaaagaaggcatatgcagatttctacagaaattataattgaattaaagaatttgaggtgaggaaggctaatatctctcagagtacaaagtgattttggaacataaagtatttctttgggttgaattacatagaagtttgtcactgtacctgtgttcctgaactatctgtgaaacatgaatatgtgggctaagaaattgtttatcttaataaataattaacaaacactttgaacggttaaa

SEQ ID NO: 71772 - DNA, 407 bp, Homo sapiens
gcgagaccgaagccctgagagggcaaatggactgccgaaagctacacaggtacaggtcagcagggcaggtcaatctattatttatttatttatttatttttgacagagtctcgctctgtcgcccaggctggagtgcagtggcgtgatctcggctcactgcaagcttcgcctcctgggttcacggcattctcctgcctcagcctcccaagtagctgggaatacaggcacccaccaccatgcctggctaattttttggtttttttttagtaaagacggggtttcaccgtgttagccaggatagtcttgatctcctgacctcgtgatctgcccacctcggcctcccaaagtgctgggattacaggcatgagccaccgcgcccggcagattggcttctttcacctagtaaa

SEQ ID NO: 71773 - DNA, 375 bp, Homo sapiens
tgccatcttacacttaatagactacagtatagtgaaaacataacctgtatatacactgagaaaccaaaatcttcatgtgacttgctttattgcagtggtctggaactgaactcacaatatatctgaggtatgcctgtatttcaggaagtctaacaaaaaccacgcatcatttgtctgtgggaagagggtatagtataattgaaatgtcaaggtttttcaatagtttgcttttaatggaataatagttgctaggtgtggtaacactggttatctcatgaaaaaaggaattaacatatacaatttgtttcagataaaagatttacaaagtatagggaacatacgtgaaataataaaagtgtctttgtattgtgttcc

SEQ ID NO: 71774 - DNA, 692 bp, Homo sapiens
actttggcaaccctgggggtgagagtgaaggcctcaagatgcctgtcctgtaggtatctctggtgagcaaggccggggacatgttacgggacaagctacaggctgatttgtctcttcatagtgtagattgcagagtgggacaaatgttgggctcctcttcctcccttatggaggtagaatttgtgtgtgtcaatgcctgcacctgagtgttcatcctgatgggcttttacatgtgtgtatacccatgtaactactgctctgatcatgttatagaataagggtatccaatctttttgcttccctgggccacattggaagaagaattttcttgggccacacctaaaatacgctaacactaatgataactggtgagctaaataaaacaagcaaaaataaaaataaaaaataaagtcacaaaaaagtctcataatgttttaagaaagtttatgaatttgtgttgggccacattcaaagctgcctgggccgcatatggactgcaggttagacaagcatgttatagaacatttccatcaccttagggggcttccaagtaccccctcccagtccgtgcaccccagaggtaaccaccattctgactctaccccaaggactactctcgcctgccttcatgatgtgggctttttcccttagtctagtgggagatcttggcccttagctcaggggagggaggc

SEQ ID NO: 71775 - DNA, 402 bp, Homo sapiens
ggtacaacattcatcggatggtgagtataggagcaagcttaaaatctgttctatcattctgaggggctcttggcctctattttaaaatcaaatcaaatcaatcaacaggcatccttcagctggttaaaaatatgcttatcacgactgccattctaaggcctcagatgttaggcttgctggtggagaacacggagaacccccctcaatacccacgggtcattgggagtgtcggccgtgtttcgaatcagtttcctttcacggggaaaccttaccatcgcgtgaggctgggaaagttctggccaggacacaccctggcgttattcaaaggcctctgggtcggacccagcctccaacagcccatttcgggttttggcagagaatccccagctatcctgtcacaaa

SEQ ID NO: 71776 - DNA, 299 bp, Homo sapiens
gcctactactactaaattcgcggccgcgtcgaccagaaaatgatcaggatggtgaaagcaatcagcaaagagaccatgacttttcagccatgagtttctggttccagttctattctgattgttacaaatgctctttatttatcagtaactctaattaactgggttagtacatgtaccaggaacagcataagccccctgccacacttggtggtaattccacagagacaccaaatacttcaatgtcccagggactgtattagaatatgttactttccttttctattaaaagttatttcttg

SEQ ID NO: 71777 - DNA, 377 bp, Homo sapiens
ttttgtctttcctttgtgttcttgagcccatacccctcacttcattaatttattagcacattcactcattcatttttcaggtatttactgagcatctattaaatgccaggtagaactacaaagggggatatggcttaggcctctgcctcagggaactcctaggagtaaaagtaagcatgttatgaaataaatgcaaatgcagtgcggtaaatgaacacagatagctgcaacagatagagctcaaaattaagacctacaagtgatgacttttcctcctgaaacatccccttgggcatttccatttctctctctctgcccctcctctctggtttcatctaacttttactttctctaacttagtacttcatcaaactttg

SEQ ID NO: 71778 - DNA, 483 bp, Homo sapiens
agtagagacggggtttcaccatattggccaggctggtcttgaactcctgacctcaagtgatccacctgcctccacctcccaaagtgctgggattacaggtgtgagccaccgcccccagcaccctcagatgtttaatttacaaaatagtgtatgtgtgttgggagagggcagccttaaaagatgtcagggttttaccatccacttgacaaccccgcctggcagtcagtgacattctagacatctctggaactttccacttggttgttccgtgtaccagggtgaaccatgtggatttttagttgcagagtgtactgcgagttaagtggaaaggtctgagagagagagaaatgaggggtgggaaagagatcatagcccttgacagctggaaaaggctttgtgcttctctttctctgcccctttcctggggcaagggaggagggcagatggcacaggattgggtagcagtgggggagaatgaatgct

SEQ ID NO: 71779 - DNA, 3953 bp, Homo sapiens
cctacctggccatggccaacggagtgatcccgccgcccgggggcgcctcccccctaccccaggtccgggtgcccttggaggagccccctctaagtccagacgtggaggaggaggacgatgacttgggcaagaccttggctgtgagcaggtttggggacctcatcagcaagcccccggcctgggaccccgagaagcccagccgcagctacagcgagcgggactttgagtttcaccggcacacatcccaccacacccaccacccgctctcagcgcgcctgcctccaccccacaagctgcggcggctgccccccacctctgcccggcacaccaggagaaagaggaagaaggagaaaacctctgctcctccctccgaggggacccctcccatccaggaggaggggggagctggagtggatgaggaagaggaggaagaggaggaagaggaaggagaatctgaggcagaacctgtggagccccccccctcagggaccccacagaaggcaaagttctccattggaagtgacgaggatgacagtccaggcctccctgggagggctgctgtcaccaagcccctgccctcggtgggcccacacactgacaagagcccccagcactccagcagctcccccagcccccgggcccgggcctcccgactcgctggggagaaaagccggccctggagcccatcggccagttatgacctgcgggagcgactgtgcccaggcagtgccctgggcaacccaggtggtccagagcagcaggtgcccacagatgaggcggaggcccagatgctgggttctgcagacctggacgacatgaagagtcaccgactggaggacaaccctggtgtgcggcgacacttagtgaaaaagccctcccggacgcagggcgggaggggcagtcccagcggcctggcccccatccttcgcaggaagaagaagaagaaaaagctggaccggaggcctcatgaggtgttcgtggagctgaacgagctgatgctggaccgcagccaggagccccactggcgggagacggcccgctggatcaagtttgaggaggacgtggaggaggagacggagcgctgggggaagccccatgttgcctcgctctccttccgtagccttctggagctcaggaggaccatcgcccatggagctgccctcctggacctggagcaaaccaccctgccaggcattgcacacctcgtggtggagaccatgattgtgtctgaccagatccggccggaggacagggccagcgtcctacgtaccctgctactgaagcacagccatcccaacgatgacaaggacagtggcttctttccccgaaacccatcgagctccagcatgaactcggttctggggaatcatcacccaactcccagccatggccctgatggggcggtgcctaccatggctgatgacctgggggagccagccccactctggccacatgaccctgacgccaaggagaagcccctccacatgcctgggggagatggtcaccgggggaaaagcctgaagctgctggagaagatccctgaagatgctgaggccacggttgtgcttgtgggttgtgtgcctttcttggagcagcctgcagcagccttcgtgcgtctgaatgaggctgtactcctggagtctgtgcttgaggtccctgtcccggtccgcttcctcttcgtgatgctggggcccagccacaccagcactgactatcacgagcttgggcgctccattgccacccttatgtctgacaagctgtttcatgaggctgcctaccaggcagatgaccggcaagacctcctaagtgccatcagcgagttcctggatggcagcattgtgatccccccgtccgaggtggagggccgtgacctgctgcgctccgtggctgctttccagcgagagctgcttaggaagcggcgagagcgtgaacagaccaaagtcgagatgaccacacggggtggctacacggcccctgggaaagaactgtctttggagttggggggctctgaggcgacccctgaagatgaccccttgctgcggacgggctcggtatttggggggcttgtgcgggatgtgaggcgccggtacccgcactaccccagtgacctgcgagatgcgctgcactcccagtgtgtggccgctgtgctcttcatctacttcgcagccctcagccctgccatcaccttcggggggctgctgggagagaagaccgaggggctgatgggcgtgtccgagctgatcgtgtccaccgctgtgctcggcgtcctcttctctctgctgggagctcagccgctgcttgtggttggcttctctgggccgctgcttgtgtttgaggaagccttcttcaagttctgccgagcccaggacctggagtacctcactggccgggtgtgggttggtctctggctggtggtcttcgtccttgccctggtggccgccgaaggcagcttcctggtccgctacatctcgcctttcacccaggagatctttgcctttctcatctcactcattttcatctacgagaccttctacaagctctacaaggtgttcacagagcacccactgctgccgttctacccccctgagggggccctggaggggtccctggctgctggtctggagccaaatggcagtgccctgccccccaccgagggcccccccagcccgaggaaccagcccaatacggcactgctctcactcatcctcatgctcgggaccttcttcatagccttcttcctgcgcaagttcaggaacagccgcttcctggggggcaaggctcgtcgcatcatcggggactttggcatccccatctccatcctggtgatggtcctggtggattactccatcacagacacctacacgcagaagctgacagtgcctacagggctctcagtgacctctcccgataagcgctcgtggttcatcccacccctgggcagtgcccgtcctttcccgccgtggatgatggtggcagccgctgttcccgccctcctcgtcctcatcctgatcttcatggagacacagatcacggcgcttatcgtcagccagaaggcgcggaggctgctcaagggctccggtttccacctggacctgctcctcattggctccctgggggggctctgtgggctgtttgggttgccctggctcacggctgccacggtccgctccgtcacccatgtcaatgcgttgacagtgatgcgtactgccatcgcgcctggtgacaagccccagatccaggaggtgcgggagcagcgggtcactggtgtgctcatcgccagcctcgtgggcctgtccatcgtcatgggggctgtgctgcgtcggatcccattggctgtgctctttgggatcttcctgtacatgggggtcacgtccctgtctggtatccagctgtcccagcgtctgttgctcatcctcatgccggcaaaacaccatcctgagcagccctatgtgaccaaggtgaagacgtggcggatgcatctgttcacctgcatccagctgggctgcatcgcactgctctgggtggtcaagtccacggcggcctcactcgcctttcccttcctgctgctgctcacggtgcctctgaggcattgccttctgccccggctcttccaggacagggagctgcaggcgctggactcggaagatgctgaaccaaacttcgatgaggatggccaggatgagtacaatgagctgcacatgccagtgtgacccttgaagacagtgcccctcagagaccccaagaccttagggattgacacctgggcctcaggcagagcccagccctgggctggggggctcctcaggacccagagatgtgcctggaaccactcctgatgccatggctagagtggcccccctgacttctgcccggggtgttgacctcgcctcacctttcacagaccagaccggcacaggctttgagctcattataaccacactccttgtctcgtg

SEQ ID NO: 71780 - DNA, 3081 bp, Homo sapiens
cgagtcggtgacaagttggtgccctgccatcccagcggcctggcccccatccttcgcaggaagaagaagaagaaaaagctggaccggaggcctcatgaggtgttcgtggagctgaacgagctgatgctggaccgcagccaggagccccactggcgggagacggcccgctggatcaagtttgaggaggacgtggaggaggagacggagcgctgggggaagccccatgttgcctcgctctccttccgtagccttctggagctcaggaggaccatcgcccatggagctgccctcctggacctggagcaaaccaccctgccaggcattgcacacctcgtggtggagaccatgattgtgtctgaccagatccggccggaggacagggccagcgtcctacgtaccctgctactgaagcacagccatcccaacgatgacaaggacagtggcttctttccccgaaacccatcgagctccagcatgaactcggttctggggaatcatcacccaactcccagccatggccctgatggggcggtgcctaccatggctgatgacctgggggagccagccccactctggccacatgaccctgacgccaaggagaagcccctccacatgcctgggggagatggtcaccgggggaaaagcctgaagctgctggagaagatccctgaagatgctgaggccacggttgtgcttgtgggttgtgtgcctttcttggagcagcctgcagcagccttcgtgcgtctgaatgaggctgtactcctggagtctgtgcttgaggtccctgtcccggtccgcttcctcttcgtgatgctggggcccagccacaccagcactgactatcacgagcttgggcgctccattgccacccttatgtctgacaagctgtttcatgaggctgcctaccaggcagatgaccggcaagacctcctaagtgccatcagcgagttcctggatggcagcattgtgatccccccgtccgaggtggagggccgtgacctgctgcgctccgtggctgctttccagcgagagctgcttaggaagcggcgagagcgtgaacagaccaaagtcgagatgaccacacggggtggctacacggcccctgggaaagaactgtctttggagttggggggctctgaggcgacccctgaagatgaccccttgctgcggacgggctcggtatttggggggcttgtgcgggatgtgaggcgccggtacccgcactaccccagtgacctgcgagatgcgctgcactcccagtgtgtggccgctgtgctcttcatctacttcgcagccctcagccctgccatcaccttcggggggctgctgggagagaagaccgaggggctgatgggcgtgtccgagctgatcgtgtccaccgctgtgctcggcgtcctcttctctctgctgggagctcagccgctgcttgtggttggcttctctgggccgctgcttgtgtttgaggaagccttcttcaagttctgccgagcccaggacctggagtacctcactggccgggtgtgggttggtctctggctggtggtcttcgtccttgccctggtggccgccgaaggcagcttcctggtccgctacatctcgcctttcacccaggagatctttgcctttctcatctcactcattttcatctacgagaccttctacaagctctacaaggtgttcacagagcacccactgctgccgttctacccccctgagggggccctggaggggtccctggctgctggtctggagccaaatggcagtgccctgccccccaccgagggcccccccagcccgaggaaccagcccaatacggcactgctctcactcatcctcatgctcgggaccttcttcatagccttcttcctgcgcaagttcaggaacagccgcttcctggggggcaaggctcgtcgcatcatcggggactttggcatccccatctccatcctggtgatggtcctggtggattactccatcacagacacctacacgcagaagctgacagtgcctacagggctctcagtgacctctcccgataagcgctcgtggttcatcccacccctgggcagtgcccgtcctttcccgccgtggatgatggtggcagccgctgttcccgccctcctcgtcctcatcctgatcttcatggagacacagatcacggcgcttatcgtcagccagaaggcgcggaggctgctcaagggctccggtttccacctggacctgctcctcattggctccctgggggggctctgtgggctgtttgggttgccctggctcacggctgccacggtccgctccgtcacccatgtcaatgcgttgacagtgatgcgtactgccatcgcgcctggtgacaagccccagatccaggaggtgcgggagcagcgggtcactggtgtgctcatcgccagcctcgtgggcctgtccatcgtcatgggggctgtgctgcgtcggatcccattggctgtgctctttgggatcttcctgtacatgggggtcacgtccctgtctggtatccagctgtcccagcgtctgttgctcatcctcatgccggcaaaacaccatcctgagcagccctatgtgaccaaggtgaagacgtggcggatgcatctgttcacctgcatccagctgggctgcatcgcactgctctgggtggtcaagtccacggcggcctcactcgcctttcccttcctgctgctgctcacggtgcctctgaggcattgccttctgccccggctcttccaggacagggagctgcaggcgctggactcggaagatgctgaaccaaacttcgatgaggatggccaggatgagtacaatgagctgcacatgccagtgtgacccttgaagacagtgcccctcagagaccccaagaccttagggattgacacctgggcctcaggcagagcccagccctgggctggggggctcctcaggacccagagatgtgcctggaaccactcctgatgccatggctagagtggcccccctgacttctgcccggggtgttgacctcgcctcacctttcacagaccagaccggcacaggctttgagctcattataaccacactccttgtctcgtg

SEQ ID NO: 71781 - DNA, 4034 bp, Homo sapiens
cctacctggccatggccaacggagtgatcccgccgcccgggggcgcctcccccctaccccaggtccgggtgcccttggaggagccccctctaagtccagacgtggaggaggaggacgatgacttgggcaagaccttggctgtgagcaggtttggggacctcatcagcaagcccccggcctgggaccccgagaagcccagccgcagctacagcgagcgggactttgagtttcaccggcacacatcccaccacacccaccacccgctctcagcgcgcctgcctccaccccacaagctgcggcggctgccccccacctctgcccggcacaccaggagaaagaggaagaaggagaaaacctctgctcctccctccgaggggacccctcccatccaggaggaggggggagctggagtggatgaggaagaggaggaagaggaggaagaggaaggagaatctgaggcagaacctgtggagccccccccctcagggaccccacagaaggcaaagttctccattggaagtgacgaggatgacagtccaggcctccctgggagggctgctgtcaccaagcccctgccctcggtgggcccacacactgacaagagcccccagcactccagcaggccgtgctctgagctgagggacggtgatggaaccaccgacctggccctgtcaagtccaaggctgctgtgttgcctccccagctcccccagcccccgggcccgggcctcccgactcgctggggagaaaagccggccctggagcccatcggccagttatgacctgcgggagcgactgtgcccaggcagtgccctgggcaacccaggtggtccagagcagcaggtgcccacagatgaggcggaggcccagatgctgggttctgcagacctggacgacatgaagagtcaccgactggaggacaaccctggtgtgcggcgacacttagtgaaaaagccctcccggacgcagggcgggaggggcagtcccagcggcctggcccccatccttcgcaggaagaagaagaagaaaaagctggaccggaggcctcatgaggtgttcgtggagctgaacgagctgatgctggaccgcagccaggagccccactggcgggagacggcccgctggatcaagtttgaggaggacgtggaggaggagacggagcgctgggggaagccccatgttgcctcgctctccttccgtagccttctggagctcaggaggaccatcgcccatggagctgccctcctggacctggagcaaaccaccctgccaggcattgcacacctcgtggtggagaccatgattgtgtctgaccagatccggccggaggacagggccagcgtcctacgtaccctgctactgaagcacagccatcccaacgatgacaaggacagtggcttctttccccgaaacccatcgagctccagcatgaactcggttctggggaatcatcacccaactcccagccatggccctgatggggcggtgcctaccatggctgatgacctgggggagccagccccactctggccacatgaccctgacgccaaggagaagcccctccacatgcctgggggagatggtcaccgggggaaaagcctgaagctgctggagaagatccctgaagatgctgaggccacggttgtgcttgtgggttgtgtgcctttcttggagcagcctgcagcagccttcgtgcgtctgaatgaggctgtactcctggagtctgtgcttgaggtccctgtcccggtccgcttcctcttcgtgatgctggggcccagccacaccagcactgactatcacgagcttgggcgctccattgccacccttatgtctgacaagctgtttcatgaggctgcctaccaggcagatgaccggcaagacctcctaagtgccatcagcgagttcctggatggcagcattgtgatccccccgtccgaggtggagggccgtgacctgctgcgctccgtggctgctttccagcgagagctgcttaggaagcggcgagagcgtgaacagaccaaagtcgagatgaccacacggggtggctacacggcccctgggaaagaactgtctttggagttggggggctctgaggcgacccctgaagatgaccccttgctgcggacgggctcggtatttggggggcttgtgcgggatgtgaggcgccggtacccgcactaccccagtgacctgcgagatgcgctgcactcccagtgtgtggccgctgtgctcttcatctacttcgcagccctcagccctgccatcaccttcggggggctgctgggagagaagaccgaggggctgatgggcgtgtccgagctgatcgtgtccaccgctgtgctcggcgtcctcttctctctgctgggagctcagccgctgcttgtggttggcttctctgggccgctgcttgtgtttgaggaagccttcttcaagttctgccgagcccaggacctggagtacctcactggccgggtgtgggttggtctctggctggtggtcttcgtccttgccctggtggccgccgaaggcagcttcctggtccgctacatctcgcctttcacccaggagatctttgcctttctcatctcactcattttcatctacgagaccttctacaagctctacaaggtgttcacagagcacccactgctgccgttctacccccctgagggggccctggaggggtccctggctgctggtctggagccaaatggcagtgccctgccccccaccgagggcccccccagcccgaggaaccagcccaatacggcactgctctcactcatcctcatgctcgggaccttcttcatagccttcttcctgcgcaagttcaggaacagccgcttcctggggggcaaggctcgtcgcatcatcggggactttggcatccccatctccatcctggtgatggtcctggtggattactccatcacagacacctacacgcagaagctgacagtgcctacagggctctcagtgacctctcccgataagcgctcgtggttcatcccacccctgggcagtgcccgtcctttcccgccgtggatgatggtggcagccgctgttcccgccctcctcgtcctcatcctgatcttcatggagacacagatcacggcgcttatcgtcagccagaaggcgcggaggctgctcaagggctccggtttccacctggacctgctcctcattggctccctgggggggctctgtgggctgtttgggttgccctggctcacggctgccacggtccgctccgtcacccatgtcaatgcgttgacagtgatgcgtactgccatcgcgcctggtgacaagccccagatccaggaggtgcgggagcagcgggtcactggtgtgctcatcgccagcctcgtgggcctgtccatcgtcatgggggctgtgctgcgtcggatcccattggctgtgctctttgggatcttcctgtacatgggggtcacgtccctgtctggtatccagctgtcccagcgtctgttgctcatcctcatgccggcaaaacaccatcctgagcagccctatgtgaccaaggtgaagacgtggcggatgcatctgttcacctgcatccagctgggctgcatcgcactgctctgggtggtcaagtccacggcggcctcactcgcctttcccttcctgctgctgctcacggtgcctctgaggcattgccttctgccccggctcttccaggacagggagctgcaggcgctggactcggaagatgctgaaccaaacttcgatgaggatggccaggatgagtacaatgagctgcacatgccagtgtgacccttgaagacagtgcccctcagagaccccaagaccttagggattgacacctgggcctcaggcagagcccagccctgggctggggggctcctcaggacccagagatgtgcctggaaccactcctgatgccatggctagagtggcccccctgacttctgcccggggtgttgacctcgcctcacctttcacagaccagaccggcacaggctttgagctcattataaccacactccttgtctcgtg

SEQ ID NO: 71782 - DNA, 2061 bp, Homo sapiens
aggatctcgtagctcggagtgacgagagttgacagaactagtatcattaacattgaccactggggtgatggttacaatgcgcctgggaaagaactgtctttggagttggggggctctgaggcgacccctgaagatgaccccttgctgcggacgggctcggtatttggggggcttgtgcgggatgtgaggcgccggtacccgcactaccccagtgacctgcgagatgcgctgcactcccagtgtgtggccgctgtgctcttcatctacttcgcagccctcagccctgccatcaccttcggggggctgctgggagagaagaccgaggggctgatgggcgtgtccgagctgatcgtgtccaccgctgtgctcggcgtcctcttctctctgctgggagctcagccgctgcttgtggttggcttctctgggccgctgcttgtgtttgaggaagccttcttcaagttctgccgagcccaggacctggagtacctcactggccgggtgtgggttggtctctggctggtggtcttcgtccttgccctggtggccgccgaaggcagcttcctggtccgctacatctcgcctttcacccaggagatctttgcctttctcatctcactcattttcatctacgagaccttctacaagctctacaaggtgttcacagagcacccactgctgccgttctacccccctgagggggccctggaggggtccctggctgctggtctggagccaaatggcagtgccctgccccccaccgagggcccccccagcccgaggaaccagcccaatacggcactgctctcactcatcctcatgctcgggaccttcttcatagccttcttcctgcgcaagttcaggaacagccgcttcctggggggcaaggctcgtcgcatcatcggggactttggcatccccatctccatcctggtgatggtcctggtggattactccatcacagacacctacacgcagaagctgacagtgcctacagggctctcagtgacctctcccgataagcgctcgtggttcatcccacccctgggcagtgcccgtcctttcccgccgtggatgatggtggcagccgctgttcccgccctcctcgtcctcatcctgatcttcatggagacacagatcacggcgcttatcgtcagccagaaggcgcggaggctgctcaagggctccggtttccacctggacctgctcctcattggctccctgggggggctctgtgggctgtttgggttgccctggctcacggctgccacggtccgctccgtcacccatgtcaatgcgttgacagtgatgcgtactgccatcgcgcctggtgacaagccccagatccaggaggtgcgggagcagcgggtcactggtgtgctcatcgccagcctcgtgggcctgtccatcgtcatgggggctgtgctgcgtcggatcccattggctgtgctctttgggatcttcctgtacatgggggtcacgtccctgtctggtatccagctgtcccagcgtctgttgctcatcctcatgccggcaaaacaccatcctgagcagccctatgtgaccaaggtgaagacgtggcggatgcatctgttcacctgcatccagctgggctgcatcgcactgctctgggtggtcaagtccacggcggcctcactcgcctttcccttcctgctgctgctcacggtgcctctgaggcattgccttctgccccggctcttccaggacagggagctgcaggcgctggactcggaagatgctgaaccaaacttcgatgaggatggccaggatgagtacaatgagctgcacatgccagtgtgacccttgaagacagtgcccctcagagaccccaagaccttagggattgacacctgggcctcaggcagagcccagccctgggctggggggctcctcaggacccagagatgtgcctggaaccactcctgatgccatggctagagtggcccccctgacttctgcccggggtgttgacctcgcctcacctttcacagaccagaccggcacaggctttgagctcattataaccacactccttgtctcgtg

SEQ ID NO: 71783 - DNA, 908 bp, Homo sapiens
ccaaagtgctgggattacaggcgtgagccaatgtgtctgcccccccccccgcccctccttctcttgttcagggtgataaggccaagttgattggtccagtgggtccatgtcgcctccccccaggcctctccatcctcacgggggctgtctgagggtcaggcagatctgtgtcacctcttccaggcctgtccatcctcacgggggctgtctgagggtcaggcgggtctgtgtcacctcctccaggcctgtccatcgtcatgggggctgtgctgcgtcggatcccattggctgtgctctttgggatcttcctgtacatgggggtcacgtccctgtctggtatccagctgtcccagcgtctgttgctcatcctcatgccggcaaaacaccatcctgagcagccctatgtgaccaaggtgaagacgtggcggatgcatctgttcacctgcatccagctgggctgcatcgcactgctctgggtggtcaagtccacggcggcctcactcgcctttcccttcctgctgctgctcacggtgcctctgaggcattgccttctgccccggctcttccaggacagggagctgcaggcgctggactcggaagatgctgaaccaaacttcgatgaggatggccaggatgagtacaatgagctgcacatgccagtgtgacccttgaagacagtgcccctcagagaccccaagaccttagggattgacacctgggcctcaggcagagcccagccctgggctggggggctcctcaggacccagagatgtgcctggaaccactcctgatgccatggctagagtggcccccctgacttctgcccggggtgttgacctcgcctcacctttcacagaccagaccggcacaggctttgagctcattataaccacactccttgtctcgtg

SEQ ID NO: 71784 - DNA, 3634 bp, Homo sapiens
cctacctggccatggccaacggagtgatcccgccgcccgggggcgcctcccccctaccccaggtccgggtgcccttggaggagccccctctaagtccagacgtggaggaggaggacgatgacttgggcaagaccttggctgtgagcaggtttggggacctcatcagcaagcccccggcctgggaccccgagaagcccagccgcagctacagcgagcgggactttgagtttcaccggcacacatcccaccacacccaccacccgctctcagcgcgcctgcctccaccccacaagctgcggcggctgccccccacctctgcccggcacaccaggagaaagaggaagaaggagaaaacctctgctcctccctccgaggggacccctcccatccaggaggaggggggagctggagtggatgaggaagaggaggaagaggaggaagaggaaggagaatctgaggcagaacctgtggagccccccccctcagggaccccacagaaggcaaagttctccattggaagtgacgaggatgacagtccaggcctccctgggagggctgctgtcaccaagcccctgccctcggtgggcccacacactgacaagagcccccagcactccagcaggccgtgctctgagctgagggacggtgatggaaccaccgacctggccctgtcaagtccaaggctgctgtgttgcctccccagctcccccagcccccgggcccgggcctcccgactcgctggggagaaaagccggccctggagcccatcggccagttatgacctgcgggagcgactgtgcccaggcagtgccctgggcaacccaggtggtccagagcagcaggtgcccacagatgaggcggaggcccagatgctgggttctgcagacctggacgacatgaagagtcaccgactggaggacaaccctggtgtgcggcgacacttagtgaaaaagccctcccggacgcagggcgggaggggcagtcccagcggcctggcccccatccttcgcaggaagaagaagaagaaaaagctggaccggaggcctcatgaggtgttcgtggagctgaacgagctgatgctggaccgcagccaggagccccactggcgggagacggcccgctggatcaagtttgaggaggacgtggaggaggagacggagcgctgggggaagccccatgttgcctcgctctccttccgtagccttctggagctcaggaggaccatcgcccatggagctgccctcctggacctggagcaaaccaccctgccaggcattgcacacctcgtggtggagaccatgattgtgtctgaccagatccggccggaggacagggccagcgtcctacgtaccctgctactgaagcacagccatcccaacgatgacaaggacagtggcttctttccccgaaacccatcgagctccagcatgaactcggttctggggaatcatcacccaactcccagccatggccctgatggggcggtgcctaccatggctgatgacctgggggagccagccccactctggccacatgaccctgacgccaaggagaagcccctccacatgcctgggggagatggtcaccgggggaaaagcctgaagctgctggagaagatccctgaagatgctgaggccacggttgtgcttgtgggttgtgtgcctttcttggagcagcctgcagcagccttcgtgcgtctgaatgaggctgtactcctggagtctgtgcttgaggtccctgtcccggtccgcttcctcttcgtgatgctggggcccagccacaccagcactgactatcacgagcttgggcgctccattgccacccttatgtctgacaagctgtttcatgaggctgcctaccaggcagatgaccggcaagacctcctaagtgccatcagcgagttcctggatggcagcattgtgatccccccgtccgaggtggagggccgtgacctgctgcgctccgtggctgctttccagcgagagctgcttaggaagcggcgagagcgtgaacagaccaaagtcgagatgaccacacggggtggctacacggcccctgggaaagaactgtctttggagttggggggctctgaggcgacccctgaagatgaccccttgctgcggacgggctcggtatttggggggcttgtgcgggatgtgaggcgccggtacccgcactaccccagtgacctgcgagatgcgctgcactcccagtgtgtggccgctgtgctcttcatctacttcgcagccctcagccctgccatcaccttcggggggctgctgggagagaagaccgaggggctgatgggcgtgtccgagctgatcgtgtccaccgctgtgctcggcgtcctcttctctctgctgggagctcagccgctgcttgtggttggcttctctgggccgctgcttgtgtttgaggaagccttcttcaagttctgccgagcccaggacctggagtacctcactggccgggtgtgggttggtctctggctggtggtcttcgtccttgccctggtggccgccgaaggcagcttcctggtccgctacatctcgcctttcacccaggagatctttgcctttctcatctcactcattttcatctacgagaccttctacaagctctacaaggtgttcacagagcacccactgctgccgttctacccccctgagggggccctggaggggtccctggctgctggtctggagccaaatggcagtgccctgccccccaccgagggcccccccagcccgaggaaccagcccaatacggcactgctctcactcatcctcatgctcgggaccttcttcatagccttcttcctgcgcaagttcaggaacagccgcttcctggggggcaaggctcgtcgcatcatcggggactttggcatccccatctccatcctggtgatggtcctggtggattactccatcacagacacctacacgcagaagctgacagtgcctacagggctctcagtgacctctcccgataagcgctcgtggttcatcccacccctgggcagtgcccgtcctttcccgccgtggatgatggtggcagccgctgttcccgccctcctcgtcctcatcctgatcttcatggagacacagatcacggcgcttatcgtcagccagaaggcgcggaggctgctcaagggctccggtttccacctggacctgctcctcattggctccctgggggggctctgtgggctgtttgggttgccctggctcacggctgccacggtccgctccgtcacccatgtcaatgcgttgacagtgatgcgtactgccatcgcgcctggtgacaagccccagatccaggaggtgcgggagcagcgggtcactggtgtgctcatcgccagcctcgtgggtgagagcccgcctccaccctgcacacccccttccttgggccccacggtcttacatcttcactatcccaggcttgaccctgaatctcccaatgtgctgtgtgttgccctcaatctgacccccaaacctgcttcccagcactcccctagccctttactcctggagtccttttctggctctctgtcctgccccctcttctctctctttttttttgagacggagtctcgctctgtcacccaggctggagtgcagtggcgcgatctcgg

SEQ ID NO: 71785 - DNA, 2816 bp, Homo sapiens
cctacctggccatggccaacggagtgatcccgccgcccgggggcgcctcccccctaccccaggtccgggtgcccttggaggagccccctctaagtccagacgtggaggaggaggacgatgacttgggcaagaccttggctgtgagcaggtttggggacctcatcagcaagcccccggcctgggaccccgagaagcccagccgcagctacagcgagcgggactttgagtttcaccggcacacatcccaccacacccaccacccgctctcagcgcgcctgcctccaccccacaagctgcggcggctgccccccacctctgcccggcacaccaggagaaagaggaagaaggagaaaacctctgctcctccctccgaggggacccctcccatccaggaggaggggggagctggagtggatgaggaagaggaggaagaggaggaagaggaaggagaatctgaggcagaacctgtggagccccccccctcagggaccccacagaaggcaaagttctccattggaagtgacgaggatgacagtccaggcctccctgggagggctgctgtcaccaagcccctgccctcggtgggcccacacactgacaagagcccccagcactccagcaggccgtgctctgagctgagggacggtgatggaaccaccgacctggccctgtcaagtccaaggctgctgtgttgcctccccagctcccccagcccccgggcccgggcctcccgactcgctggggagaaaagccggccctggagcccatcggccagttatgacctgcgggagcgactgtgcccaggcagtgccctgggcaacccaggtggtccagagcagcaggtgcccacagatgaggcggaggcccagatgctgggttctgcagacctggacgacatgaagagtcaccgactggaggacaaccctggtgtgcggcgacacttagtgaaaaagccctcccggacgcagggcgggaggggcagtcccagcggcctggcccccatccttcgcaggaagaagaagaagaaaaagctggaccggaggcctcatgaggtgttcgtggagctgaacgagctgatgctggaccgcagccaggagccccactggcgggagacggcccgctggatcaagtttgaggaggacgtggaggaggagacggagcgctgggggaagccccatgttgcctcgctctccttccgtagccttctggagctcaggaggaccatcgcccatggagctgccctcctggacctggagcaaaccaccctgccaggcattgcacacctcgtggtggagaccatgattgtgtctgaccagatccggccggaggacagggccagcgtcctacgtaccctgctactgaagcacagccatcccaacgatgacaaggacagtggcttctttccccgaaacccatcgagctccagcatgaactcggttctggggaatcatcacccaactcccagccatggccctgatggggcggtgcctaccatggctgatgacctgggggagccagccccactctggccacatgaccctgacgccaaggagaagcccctccacatgcctgggggagatggtcaccgggggaaaagcctgaagctgctggagaagatccctgaagatgctgaggccacggttgtgcttgtgggttgtgtgcctttcttggagcagcctgcagcagccttcgtgcgtctgaatgaggctgtactcctggagtctgtgcttgaggtccctgtcccggtccgcttcctcttcgtgatgctggggcccagccacaccagcactgactatcacgagcttgggcgctccattgccacccttatgtctgacaagctgtttcatgaggctgcctaccaggcagatgaccggcaagacctcctaagtgccatcagcgagttcctggatggcagcattgtgatccccccgtccgaggtggagggccgtgacctgctgcgctccgtggctgctttccagcgagagctgcttaggaagcggcgagagcgtgaacagaccaaagtcgagatgaccacacggggtggctacacggcccctgggaaagaactgtctttggagttggggggctctgaggcgacccctgaagatgaccccttgctgcggacgggctcggtatttggggggcttgtgcgggatgtgaggcgccggtacccgcactaccccagtgacctgcgagatgcgctgcactcccagtgtgtggccgctgtgctcttcatctacttcgcagccctcagccctgccatcaccttcggggggctgctgggagagaagaccgaggggctgatgggcgtgtccgagctgatcgtgtccaccgctgtgctcggcgtcctcttctctctgctgggagctcagccgctgcttgtggttggcttctctgggccgctgcttgtgtttgaggaagccttcttcaagttctgccgagcccaggacctggagtacctcactggccgggtgtgggttggtctctggctggtggtcttcgtccttgccctggtggccgccgaaggcagcttcctggtccgctacatctcgcctttcacccaggagatctttgcctttctcatctcactcattttcatctacgagaccttagggattgacacctgggcctcaggcagagcccagccctgggctggggggctcctcaggacccagagatgtgcctggaaccactcctgatgccatggctagagtggcccccctgacttctgcccggggtgttgacctcgcctcacctttcacagaccagaccggcacaggctttgagctcattataaccacactccttgtctcgtg

SEQ ID NO: 71786 - DNA, 250 bp, Homo sapiens
cctgcgagatgcgctgcactcccagtgtgtggccgctgtgctcttcatctacttcgcagccctcagccctgccatcaccttcggggggctgctgggtaagggactggggcttggggagttgaggggctcctctagtcacttctggtcccagtgtcacttgcaggattctgggtctgggtgtgatcacattagggggccaatggttagatgtgctagcaaaggtgtaagcaccttacagagatgctggatc

SEQ ID NO: 71787 - DNA, 465 bp, Homo sapiens
agcgctcgtggttcatcccacccctgggcagtgcccgtcctttcccgccgtggatgatggtggcagccgctgttcccgccctcctcgtcctcatcctgatcttcatggagacacagatcacggcgtgagagagatgggaggaggaggtgggagggacgaggccaagctccttggctccttggcttggtttcagggttatagcagggacatcattatcagtatcagggtgctgggtggtgggagctggtggcaatccttgaggaagagagtgtgtgtggaggagctggcaggggtgaggaggaggtgggggaggagcagagagcagtggcatccggggcaggggcatggtttccccgtgatggtttgacatgacatctatctgttgccaccactctttgcagggtggcacttgacagtgctcagaacactctagcagtctaagcttgcacccagggatgctcacat

SEQ ID NO: 71788 - DNA, 622 bp, Homo sapiens
  misc_feature (3)..(3): n is a, c, g, or t
  misc_feature (8)..(8): n is a, c, g, or t
ccncgggntgcaggaattcggcacgagaggggtctggggaggtgacatgttgggctgtgggatcccagcgctgggcctgctcctgctgctgcagggctcggcagacggaaatggaatccagggattcttctacccatggagctgtgagggtgacatatgggaccgggagagctgtgggggccaggcggccatcgatagccccaacctctgcctgcgtctccggtgctgctaccgcaatggggtctgctaccaccagcgtccagacgaaaacgtgcggaggaagcacatgtgggcgctggtctggacgtgcagcggcctcctcctcctgagctgcagcatctgcttgttctggtgggccaagcgccgggacgtgctgcatatgcccggtttcctggcgggtccgtgtgacatgtccaagtccgtctcgctgctctccaagcaccgagggaccaagaagacgccgtccacgggcagcgtgccagtcgccctgtccaaagagtccagggatgtggagggaggcaccgagggggaagggacggaggagggtgaggagacagagggcgaggaagaggaggattaggggagtccccgggggactgctcaatacagatacggtggacga

SEQ ID NO: 71789 - DNA, 741 bp, Homo sapiens
gatctacagaaaagttgcagagatagtgtagagaattccctcatcctcctccccagtttcccctattgtaccatctcatattactgtgtttcatttgtcacaactaggaaaccaccgttggtacattctgttaactgagctctggacttagtcggatttcactagtttttcatgtaacgtcctatttctgttccagggtcctatccaggacaccacaggacagttgtcatgccccctcagtcttctctgggctgtgacagtttctgtctttccttgttttccatgaccttgacagtttggagagaagtgctaggcaagtattttgtagactgtgctcagttgaggtttggctcatgtttttctcagggcctagcaccagtgaagaaacgaagaaatttcccagtaaaacaatggggaaaaaatgacccttttcctctcggccctctcaaagggatggaaccattttttggcccagatagcaaaggagcttttcccagcaaaaccagaatgtttccatttggcttttcttggaaacaaaagaggaaaccatgggcagggccgcgagctgggagtagaagctatgggctctctcctgcatccccgcatccccgcccgaccagctgggcatactacaggttgccatcctctctccagagccctgggaacagggcactgtctcattcagatccgcatcaaacctgctctgctcctgggatgataggctggggtggggcagccatc

SEQ ID NO: 71790 - DNA, 1060 bp, Homo sapiens
gctaaatatcaattttgacatgttctaaatataacaattattaatgaaaaatattacattcttttggctttgtactaaacatttgaaatgtggtgtacgtttttcacttatagcacacgcaattcagatgctacatttttattaggaatatttaatctgtagatagatatcgtaaaatttacatttgaaaaaaatagattcagacacctaagttgttacaagcatacttaaaagttttcaatgactgaattgagtatcagttttaaaatttaaaatcaatgaaattaattaaaatgaaatgaaaatttagaaactattcctcagtcacgctggctacatttcaagtgcttcatagccacatgaaagctgtattggacagcaaagaagtagaatatatttggaataaaaattttaaagtggacacattgtgttactctcgttagccatgctattgctattttttttcctatagctaattaaaaccttaagatccagtaggttctccacctttttttaaagcattagttccatgtcgaccctgtagatggcagcactttcttcctaaaactacatggagggagttgcctgggcttgtcactcagattctggcacttttcatagaaagagtctgaattatctggaaaattctttggtaacataggtcagaatcttttcagctctattgttattctgcacagatggctgttgcttatgaaaacaatctctcagcctctagtccaggatattactcattcctcagttcaagaaactctagggtgagaggagaaaggggttcaattacagaactgttatcaaaatgcgttggtttatgcacatccgtgttttggacatggtgattccaagagactcttaataaaacttttcaaagtagatgagagacagtttttccctcacatgctgtggcaatattaatctatgttttcatgttccactggactttgtaattgaattttaaggaatgcatacagggcttcatatttatatataaaatatccatatccagtgttgaaagaaattaacaataaaatatgtacctgta

SEQ ID NO: 71791 - DNA, 358 bp, Homo sapiens
tcaagcttaaaatgaatttaatatctttagaaagagggaaagtgaaatcatcaaaacagcctaaataaacttaaaaactcttctttacagaaaggctattttaaacccaaacaagctcataacaagaacaatggattgtaagttctaacactctcagactgaaggctgaactggaaagaccagctgctaacagcggctgctgtagttccaggtgaggggcaggacactggaatattccttatgtgactatagtatgggtgcaagagacacacacatatatatatatacacacactgttgcttactttttggctggagaataaagctcaggaaaaaagagccaaaaccatgcagacatg

SEQ ID NO: 71792 - DNA, 1284 bp, Homo sapiens
ggcacgagggccggaaggcggcgtccgcgacgcagctgttcacgcttaggtgggcgacgtgggcgcaggtgggcgcaggatggcaaaacagaagagaaaagttcctgaagtgacagagaaaaagaacaaaaagctgaagaaggcgtcagcagaggggccactgctgggccctgaggctgcaccaagtggcgaaggagccggctccaagggcgaagctgtgctcaggcccgggctggacgcagagccagagctgtccccagaggagcagagggtcctggaaaggaagctgaaaaaggaacggaagaaagaggagaggcagcgtctgcgggaggcaggccttgtggcccagcacccgcctgccaggcgctcgggggccgaactggccctggactacctctgcagatgggcccaaaagcacaagaactggaggtttcagaagacgaggcagacgtggctcctgctgcacatgtatgacagtgacaaggttcccgatgagcacttctccaccctgctggcctacctggaggggctgcagggccgggcccgagagctgacggtgcagaaggcggaagccctgatgcgggagctggatgaggagggctctgatccccccctgccggggagggcccagcgcatccgacaggtgctgcagctgctctcctagtgggttcagcgcggggcggggccgctgcccagtgcagggctgcctcagaccacacagggtgcagctcctccggcggtgggggccgggttcaccagcagggcagcggctgagcaagggctttcagctcctccggtggtgggggccgggatcaccagcaccagagcctcgcaagggccccttccctcctccagaccctccttggccggtgacggctgtgacagtgatggcaggttcagtgccttcagcgcagagcgtggatgctctggaatcacccggacccctggccttggagggaccctccagccccaggaatctgctttggagggaaatgtctatttttctaccgggaatattttagagattggggcatgctggctcctcccgccagctgcaaacctgcaccttccgcctgattcccgatccccctgcgtgggccgcattcctggtcccctgcctgcgtccatcgaggggcctggctgtggcctgttttcctttgaccccacacagcgtcattgcgggtcatggggagcccctggtgggagcttgtggagtcggatcacgtacctgtgcagaaaccgcctctgtggctgcatttgaaataaaacccgacccagcagcag

SEQ ID NO: 71793 - DNA, 315 bp, Homo sapiens
ggagtattaaaagtgcccgcacttgaaatcttactgcgtgtcctgaagagagccctgtccctttcccatgagatgctgagccgtgatctgtactcgggaagcacacagatctcctgtctccaccctggcgtgttctgacaggtgcagccgctgtgtcaccagcaccccggcaagggagaccgcctccgtcgcccctccctggcccacgccctcccagacccggccctcgtcgccgctgtgtcgctggtgaggtgggttccctgctctggagctgctgaagaggctccagtactttgcacgtgctcacatctagct

SEQ ID NO: 71794 - DNA, 1200 bp, Homo sapiens
tataggtaggaggcctgggtggccgagtgaggctgctggaggcgcgggccgggcggtgcgcactgcgggcgcatccctgccccggcgccgtccgtgcccgcgggacctgacagccgggtcagagggcgaagctgtgctcaggcccgggctggacgcagagccagagctgtccccagaggagcagagggtcctggaaaggaagctgaaaaaggaacggaagaaagaggagaggcagcgtctgcgggaggcaggccttgtggcccagcacccgcctgccaggcgctcgggggccgaactggccctggactacctctgcagatgggcccaaaagcacaagaactggaggtttcagaagacgaggcagacgtggctcctgctgcacatgtatgacagtgacaaggttcccgatgagcacttctccaccctgctggcctacctggaggggctgcagggccgggcccgagagctgacggtgcagaaggcggaagccctgatgcgggagctggatgaggagggctctgatccccccctgccggggagggcccagcgcatccgacaggtgctgcagctgctctcctagtgggttcagcgcggggcggggccgctgcccagtgcagggctgcctcagaccacacagggtgcagctcctccggcggtgggggccgggttcaccagcagggcagcggctgagcaagggctttcagctcctccggtggtgggggccgggatcaccagcaccagagcctcgcaagggccccttccctcctccagaccctccttggccggtgacggctgtgacagtgatggcaggttcagtgccttcagcgcagagcgtggatgctctggaatcacccggacccctggccttggagggaccctccagccccaggaatctgctttggagggaaatgtctatttttctaccgggaatattttagagattggggcatgctggctcctcccgccagctgcaaacctgcaccttccgcctgattcccgatccccctgcgtgggccgcattcctggtcccctgcctgcgtccatcgaggggcctggctgtggcctgttttcctttgaccccacacagcgtcattgcgggtcatggggagcccctggtgggagcttgtggagtcggatcacgtacctgtgcagaaaccgcctctgtggctgcatttgaaataaaacccgacccagcagcag

SEQ ID NO: 71795 - DNA, 1275 bp, Homo sapiens
cgctggcgtcacggtccagccggctggatctggttccagccgcgccgggccggccgggcatgggcagtgtggaggcgctgaggctgctggaggcgcgggccgggcggtgcgcactgcgggcgcatccctgccccggcgccgtccgtgcccgcgggacctgacagccgggtcagagggcgaagctgtgctcaggcccgggctggacgcagagccagagctgtccccagaggagcagagggtcctggaaaggaagctgaaaaaggaacggaagaaagaggagaggcagcgtctgcgggaggcaggccttgtggcccagcacccgcctgccaggcgctcgggggccgaactggccctggactacctctgcagatgggcccaaaagcacaagaactggaggtttcagaagacgaggcagacgtggctcctgctgcacatgtatgacagtgacaaggttcccgatgagcacttctccaccctgctggcctacctggaggggctgcagggccgggcccgagagctgacggtgcagaaggcggaagccctgatgcgggagctggatgaggagggctctgatccccccctgccggggagggcccagcgcatccgacaggtgctgcagctgctctcctagtgggttcagcgcggggcggggccgctgcccagtgcagggctgcctcagaccacacagggtgcagctcctccggcggtgggggccgggttcaccagcagggcagcggctgagcaagggctttcagctcctccggtggtgggggccgggatcaccagcaccagagcctcgcaagggccccttccctcctccagaccctccttggccggtgacggctgtgacagtgatggcaggttcagtgccttcagcgcagagcgtggatgctctggaatcacccggacccctggccttggagggaccctccagccccaggaatctgctttggagggaaatgtctatttttctaccgggaatattttagagattggggcatgctggctcctcccgccagctgcaaacctgcaccttccgcctgattcccgatccccctgcgtgggccgcattcctggtcccctgcctgcgtccatcgaggggcctggctgtggcctgttttcctttgaccccacacagcgtcattgcgggtcatggggagcccctggtgggagcttgtggagtcggatcacgtacctgtgcagaaaccgcctctgtggctgcatttgaaataaaacccgacccagcagcagaaaacacaacaacaaaacaaaaaa

SEQ ID NO: 71796 - DNA, 1264 bp, Homo sapiens
ggcacgagggccggaaggcggcgtccgcgacgcagctgttcacgcttaggtgggcgacgatggcaaaacagaagagaaaagttcctgaagtgacagagaaaaagaacaaaaagctgaagaaggcgtcagcagaggggccactgctgggccctgaggctgcaccaagtggcgaaggagccggctccaagggcgaagctgtgctcaggcccgggctggacgcagagccagagctgtccccagaggagcagagggtcctggaaaggaagctgaaaaaggaacggaagaaagaggagaggcagcgtctgcgggaggcaggccttgtggcccagcacccgcctgccaggcgctcgggggccgaactggccctggactacctctgcagatgggcccaaaagcacaagaactggaggtttcagaagacgaggcagacgtggctcctgctgcacatgtatgacagtgacaaggttcccgatgagcacttctccaccctgctggcctacctggaggggctgcagggccgggcccgagagctgacggtgcagaaggcggaagccctgatgcgggagctggatgaggagggctctgatccccccctgccggggagggcccagcgcatccgacaggtgctgcagctgctctcctagtgggttcagcgcggggcggggccgctgcccagtgcagggctgcctcagaccacacagggtgcagctcctccggcggtgggggccgggttcaccagcagggcagcggctgagcaagggctttcagctcctccggtggtgggggccgggatcaccagcaccagagcctcgcaagggccccttccctcctccagaccctccttggccggtgacggctgtgacagtgatggcaggttcagtgccttcagcgcagagcgtggatgctctggaatcacccggacccctggccttggagggaccctccagccccaggaatctgctttggagggaaatgtctatttttctaccgggaatattttagagattggggcatgctggctcctcccgccagctgcaaacctgcaccttccgcctgattcccgatccccctgcgtgggccgcattcctggtcccctgcctgcgtccatcgaggggcctggctgtggcctgttttcctttgaccccacacagcgtcattgcgggtcatggggagcccctggtgggagcttgtggagtcggatcacgtacctgtgcagaaaccgcctctgtggctgcatttgaaataaaacccgacccagcagcag

SEQ ID NO: 71797 - DNA, 1374 bp, Homo sapiens
cgctggcgtcacggtccagccggctggatctggttccagccgcgccgggccggccgggcatgggcagtgtggaggcgctgaggctgctggaggcgcgggccgggcggtgcgcactgcgggcgcatccctgccccggcgccgtccgtgcccgcgggacctgacagccgggtcagagggcgaagctgtgctcaggcccgggctggacgcagagccagagctgtccccagaggagcagagggtcctggaaaggaagctgaaaaaggaacggaagaaagaggagaggcagcgtctgcgggaggcaggccttgtggcccagcacccgcctgccaggcgctcgggggccgaactggccctggactacctctgcagatgggcccaaaagcacaagaactggaggtttcagaagacgaggcagacgtggctcctgctgcacatgtatgacagtgacaaggttcccgatgagcacttctccaccctgctggcctacctggaggggctgcagggccgggcccgagagctgacggtgcagaaggcggaagccctgatgcgggagctggatgaggagggctctgatccccccctgccggggagggcccagcgcatccgacaggtgctgcagctgctctcctagtgggttcagcgcggggcggggccgctgcccagtgcagggctgcctcagaccacacagggtgcagctcctccggcggtgggggccgggttcaccagcagggcagcggctgagcaagggctttcagctcctccggtggtgggggccgggatcaccagcaccagagcctcgcaagggccccttccctcctccagaccctccttggccggtgacggctgtgacagtgatggcaggttcagtgccttcagcgcagagcgtggatgctctggaatcacccggacccctggccttggagggaccctccagccccaggaatctgctttggagggaaatgtctatttttctaccgggaatattttagagattggggcatgctggctcctcccgccagctgcaaacctgcaccttccgcctgattcccgatccccctgcgtgggccgcattcctggtcccctgcctgcgtccatcgaggggcctggctgtggcctgttttcctttgaccccacacagcgtcattgcgggtcatggggagcccctggtgggagcttgtggagtcggatcacgtacctgtgcagaaaccgcctctgtggctgcatttgaaataaaacccgacccagcagcagaagagagcggggtctggccgggaaacaaaccacaacaaacaagaacaacggaacacagacagcagcgagaaaaaagagcgcccagaaacagccacgcttcgctcccggagacacacgggcatg

SEQ ID NO: 71798 - DNA, 1273 bp, Homo sapiens
ggcccggcgcggcgcgaccgggcggcggccctggggtccgcggtgctggggaggctggtgcggccgggatggcaaaacagaagagaaaagttcctgaagtgacagagaaaaagaacaaaaagctgaagaaggcgtcagcagaggggccactgctgggccctgaggctgcaccaagtggcgaaggagccggctccaagggcgaagctgtgctcaggcccgggctggacgcagagccagagctgtccccagaggagcagagggtcctggaaaggaagctgaaaaaggaacggaagaaagaggagaggcagcgtctgcgggaggcaggccttgtggcccagcacccgcctgccaggcgctcgggggccgaactggccctggactacctctgcagatgggcccaaaagcacaagaactggaggtttcagaagacgaggcagacgtggctcctgctgcacatgtatgacagtgacaaggttcccgatgagcacttctccaccctgctggcctacctggaggggctgcagggccgggcccgagagctgacggtgcagaaggcggaagccctgatgcgggagctggatgaggagggctctgatccccccctgccggggagggcccagcgcatccgacaggtgctgcagctgctctcctagtgggttcagcgcggggcggggccgctgcccagtgcagggctgcctcagaccacacagggtgcagctcctccggcggtgggggccgggttcaccagcagggcagcggctgagcaagggctttcagctcctccggtggtgggggccgggatcaccagcaccagagcctcgcaagggccccttccctcctccagaccctccttggccggtgacggctgtgacagtgatggcaggttcagtgccttcagcgcagagcgtggatgctctggaatcacccggacccctggccttggagggaccctccagccccaggaatctgctttggagggaaatgtctatttttctaccgggaatattttagagattggggcatgctggctcctcccgccagctgcaaacctgcaccttccgcctgattcccgatccccctgcgtgggccgcattcctggtcccctgcctgcgtccatcgaggggcctggctgtggcctgttttcctttgaccccacacagcgtcattgcgggtcatggggagcccctggtgggagcttgtggagtcggatcacgtacctgtgcagaaaccgcctctgtggctgcatttgaaataaaacccgacccagcagcag

SEQ ID NO: 71799 - DNA, 1327 bp, Homo sapiens
ggagtattaaaagtgcccgcacttgaaatcttactgcgtgtcctgaagagagccctgtccctttcccatgagatgctgagccgtgatctgtactcgggaagcacacagatctcctgtctccaccctggcgtgttctgacaggtgcagccgctgtgtcaccagcaccccggcaagggagaccgcctccgtcgcccctccctggcccacgccctcccagacccggccctcgtcgccgctgtgtcgctggtgagggcgaagctgtgctcaggcccgggctggacgcagagccagagctgtccccagaggagcagagggtcctggaaaggaagctgaaaaaggaacggaagaaagaggagaggcagcgtctgcgggaggcaggccttgtggcccagcacccgcctgccaggcgctcgggggccgaactggccctggactacctctgcagatgggcccaaaagcacaagaactggaggtttcagaagacgaggcagacgtggctcctgctgcacatgtatgacagtgacaaggttcccgatgagcacttctccaccctgctggcctacctggaggggctgcagggccgggcccgagagctgacggtgcagaaggcggaagccctgatgcgggagctggatgaggagggctctgatccccccctgccggggagggcccagcgcatccgacaggtgctgcagctgctctcctagtgggttcagcgcggggcggggccgctgcccagtgcagggctgcctcagaccacacagggtgcagctcctccggcggtgggggccgggttcaccagcagggcagcggctgagcaagggctttcagctcctccggtggtgggggccgggatcaccagcaccagagcctcgcaagggccccttccctcctccagaccctccttggccggtgacggctgtgacagtgatggcaggttcagtgccttcagcgcagagcgtggatgctctggaatcacccggacccctggccttggagggaccctccagccccaggaatctgctttggagggaaatgtctatttttctaccgggaatattttagagattggggcatgctggctcctcccgccagctgcaaacctgcaccttccgcctgattcccgatccccctgcgtgggccgcattcctggtcccctgcctgcgtccatcgaggggcctggctgtggcctgttttcctttgaccccacacagcgtcattgcgggtcatggggagcccctggtgggagcttgtggagtcggatcacgtacctgtgcagaaaccgcctctgtggctgcatttgaaataaaacccgacccagcagcag

SEQ ID NO: 71800 - DNA, 1391 bp, Homo sapiens
aataattcgaaggacgacgtcggcaacccacttgttaaccctaagggggccaacggggccgcaggtggtcccagatggcaaaacagaagagaaaagttcctgaagtgacagagaaaaagaacaaaaagctgaagaaggcgtcagcagaggggccactgctgggccctgaggctgcaccaagtggcgaaggagccggctccaagggcgaagctgtgctcaggcccgggctggacgcagagccagagctgtccccagaggagcagagggtcctggaaaggaagctgaaaaaggaacggaagaaagaggagaggcagcgtctgcgggaggcaggccttgtggcccagcacccgcctgccaggcgctcgggggccgaactggccctggactacctctgcaggtgagcggccctgccccacgcggttctgtcccggacgtgcgtctcaacccctgcctgagggggtcgaagccttcactcgcacacactgtgtggaaggttctagagcagtgagatgggcccaaaagcacaagaactggaggtttcagaagacgaggcagacgtggctcctgctgcacatgtatgacagtgacaaggttcccgatgagcacttctccaccctgctggcctacctggaggggctgcagggccgggcccgagagctgacggtgcagaaggcggaagccctgatgcgggagctggatgaggagggctctgatccccccctgccggggagggcccagcgcatccgacaggtgctgcagctgctctcctagtgggttcagcgcggggcggggccgctgcccagtgcagggctgcctcagaccacacagggtgcagctcctccggcggtgggggccgggttcaccagcagggcagcggctgagcaagggctttcagctcctccggtggtgggggccgggatcaccagcaccagagcctcgcaagggccccttccctcctccagaccctccttggccggtgacggctgtgacagtgatggcaggttcagtgccttcagcgcagagcgtggatgctctggaatcacccggacccctggccttggagggaccctccagccccaggaatctgctttggagggaaatgtctatttttctaccgggaatattttagagattggggcatgctggctcctcccgccagctgcaaacctgcaccttccgcctgattcccgatccccctgcgtgggccgcattcctggtcccctgcctgcgtccatcgaggggcctggctgtggcctgttttcctttgaccccacacagcgtcattgcgggtcatggggagcccctggtgggagcttgtggagtcggatcacgtacctgtgcagaaaccgcctctgtggctgcatttgaaataaaacccgacccagcagcag

SEQ ID NO: 71801 - DNA, 1197 bp, Homo sapiens
cgctggcgtcacggtccagccggctggatctggttccagccgcgccgggccggccgggcatgggcagtgtggaggcgctgaggctgctggaggcgcgggccgggcggtgcgcactgcgggcgcatccctgccccggcgccgtccgtgcccgcgggacctgacagccgggtcagagggcgaagctgtgctcaggcccgggctggacgcagagccagagctgtccccagaggagcagagggtcctggaaaggaagctgaaaaaggaacggaagaaagaggagaggcagcgtctgcgggaggcaggccttgtggcccagcacccgcctgccaggcgctcgggggccgaactggccctggactacctctgcagatgggcccaaaagcacaagaactggaggtttcagaagacgaggcagacgtggctcctgctgcacatgtatgacagtgacaaggttcccgatgagcacttctccaccctgctggcctacctggaggggctgcagggccgggcccgagagctgacggtgcagaaggcggaagccctgatgcgggagctggatgaggagggctctgatccccccctgccggggagggcccagcgcatccgacaggtgctgcagctgctctcctagtgggttcagcgcggggcggggccgctgcccagtgcagggctgcctcagaccacacagggtgcagctcctccggcggtgggggccgggttcaccagcagggcagcggctgagcaagggctttcagctcctccggtggtgggggccgggatcaccagcaccagagcctcgcaagggccccttccctcctccagaccctccttggccggtgacggctgtgacagtgatggcaggttcagtgccttcagcgcagagcgtggatgctctggaatcacccggacccctggccttggagggaccctccagccccaggaatctgctttggagggaaatgtctatttttctaccgggaatattttagagattggggcatgctggctcctcccgccagctgcaaacctgcaccttccgcctgattcccctggctgtggcctgttttcctttgaccccacacagcgtcattgcgggtcatggggagcccctggtgggagcttgtggagtcggatcacgtacctgtgcagaaaccgcctctgtggctgcatttgaaataaaacccgacccagcagcag

SEQ ID NO: 71802 - DNA, 782 bp, Homo sapiens
aaggcttatgagtgggaaatcctggggctgcagggccgggcccgagagctgacggtgcagaaggcggaagccctgatgcgggagctggatgaggagggctctgatccccccctgccggggagggcccagcgcatccgacaggtgctgcagctgctctcctagtgggttcagcgcggggcggggccgctgcccagtgcagggctgcctcagaccacacagggtgcagctcctccggcggtgggggccgggttcaccagcagggcagcggctgagcaagggctttcagctcctccggtggtgggggccgggatcaccagcaccagagcctcgcaagggccccttccctcctccagaccctccttggccggtgacggctgtgacagtgatggcaggttcagtgccttcagcgcagagcgtggatgctctggaatcacccggacccctggccttggagggaccctccagccccaggaatctgctttggagggaaatgtctatttttctaccgggaatattttagagattggggcatgctggctcctcccgccagctgcaaacctgcaccttccgcctgattcccgatccccctgcgtgggccgcattcctggtcccctgcctgcgtccatcgaggggcctggctgtggcctgttttcctttgaccccacacagcgtcattgcgggtcatggggagcccctggtgggagcttgtggagtcggatcacgtacctgtgcagaaaccgcctctgtggctgcatttgaaataaaacccgacccagcagcag

SEQ ID NO: 71803 - DNA, 1132 bp, Homo sapiens
cgctggcgtcacggtccagccggctggatctggttccagccgcgccgggccggccgggcatgggcagtgtggaggcgctgaggctgctggaggcgcgggccgggcggtgcgcactgcgggcgcatccctgccccggcgccgtccgtgcccgcgggacctgacagccgggtcagagggcgaagctgtgctcaggcccgggctggacgcagagccagagctgtccccagaggagcagagggtcctggaaaggaagctgaaaaaggaacggaagaaagaggagaggcagcgtctgcgggaggcaggccttgtggcccagcacccgcctgccaggcgctcgggggccgaactggccctggactacctctgcagatgggcccaaaagcacaagaactggaggtttcagaagacgaggcagacgtggctcctgctgcacatgtatgacagtgacaaggttcccgatgagcacttctccaccctgctggcctacctggatgctgcagctgctctcctagtgggttcagcgcggggcggggccgctgcccagtgcagggctgcctcagaccacacagggtgcagctcctccggcggtgggggccgggttcaccagcagggcagcggctgagcaagggctttcagctcctccggtggtgggggccgggatcaccagcaccagagcctcgcaagggccccttccctcctccagaccctccttggccggtgacggctgtgacagtgatggcaggttcagtgccttcagcgcagagcgtggatgctctggaatcacccggacccctggccttggagggaccctccagccccaggaatctgctttggagggaaatgtctatttttctaccgggaatattttagagattggggcatgctggctcctcccgccagctgcaaacctgcaccttccgcctgattcccgatccccctgcgtgggccgcattcctggtcccctgcctgcgtccatcgaggggcctggctgtggcctgttttcctttgaccccacacagcgtcattgcgggtcatggggagcccctggtgggagcttgtggagtcggatcacgtacctgtgcagaaaccgcctctgtggctgcatttgaaataaaacccgacccagcagcag

SEQ ID NO: 71804 - DNA, 1083 bp, Homo sapiens
aaaggctaggtacgagggctgggttgtggtgaggctgctggaggcgcgggccgggcggtgcgcactgcgggcgcatccctgccccggcgccgtccgtgcccgcgggacctgacagccgggtcagagggcgaagctgtgctcaggcccgggctggacgcagagccagagctgtccccagaggagcagagggtcctggaaaggaagctgaaaaaggaacggaagaaagaggagaggcagcgtctgcgggaggcaggccttgtggcccagcacccgcctgccaggcgctcgggggccgaactggccctggactacctctgcagatgggcccaaaagcacaagaactggaggtttcagaagacgaggcagacgtggctcctgctgcacatgtatgacagtgacaaggttcccgatgagcacttctccaccctgctggcctacctggatgctgcagctgctctcctagtgggttcagcgcggggcggggccgctgcccagtgcagggctgcctcagaccacacagggtgcagctcctccggcggtgggggccgggttcaccagcagggcagcggctgagcaagggctttcagctcctccggtggtgggggccgggatcaccagcaccagagcctcgcaagggccccttccctcctccagaccctccttggccggtgacggctgtgacagtgatggcaggttcagtgccttcagcgcagagcgtggatgctctggaatcacccggacccctggccttggagggaccctccagccccaggaatctgctttggagggaaatgtctatttttctaccgggaatattttagagattggggcatgctggctcctcccgccagctgcaaacctgcaccttccgcctgattcccgatccccctgcgtgggccgcattcctggtcccctgcctgcgtccatcgaggggcctggctgtggcctgttttcctttgaccccacacagcgtcattgcgggtcatggggagcccctggtgggagcttgtggagtcggatcacgtacctgtgcagaaaccgcctctgtggctgcatttgaaataaaacccgacccagcagcag

SEQ ID NO: 71805 - DNA, 1038 bp, Homo sapiens
cgctggcgtcacggtccagccggctggatctggttccagccgcgccgggccggccgggcatgggcagtgtggaggcgctgaggctgctggaggcgcgggccgggcggtgcgcactgcgggcgcatccctgccccggcgccgtccgtgcccgcgggacctgacagccgggtcagagggcgaagctgtgctcaggcccgggctggacgcagagccagagctgtccccagaggagcagagggtcctggaaaggaagctgaaaaaggaacggaagaaagaggagaggcagcgtctgcgggaggcaggccttgtggcccagcacccgcctgccaggcgctcgggggccgaactggccctggactacctctgcagatgggcccaaaagcacaagaactggaggtttcagaagacgaggcagacgtggctcctgctgcacatgtatgacagtgacaaggttcccgatgagcacttctccaccctgctggcctacctggaggggctgcagggccgggcccgagagctgacggtgcagaaggcggaagccctgatgcgggagctggatgaggagggctctgatccccccctgccggggagggcccagcgcatccgacaggcctccttggccggtgacggctgtgacagtgatggcaggttcagtgccttcagcgcagagcgtggatgctctggaatcacccggacccctggccttggagggaccctccagccccaggaatctgctttggagggaaatgtctatttttctaccgggaatattttagagattggggcatgctggctcctcccgccagctgcaaacctgcaccttccgcctgattcccgatccccctgcgtgggccgcattcctggtcccctgcctgcgtccatcgaggggcctggctgtggcctgttttcctttgaccccacacagcgtcattgcgggtcatggggagcccctggtgggagcttgtggagtcggatcacgtacctgtgcagaaaccgcctctgtggctgcatttgaaataaaacccgacccagcagcag

SEQ ID NO: 71806 - DNA, 1600 bp, Homo sapiens
  misc_feature (1316)..(1316): n is a, c, g, or t
ggcacgagggccggaaggcggcgtccgcgacgcagctgttcacgcttaggtgggcgacgtgggcgcaggtgggcgcaggatggcaaaacagaagagaaaagttcctgaagtgacagagaaaaagaacaaaaagctgaagaaggcgtcagcagaggggccactgctgggccctgaggctgcaccaagtggcgaaggagccggctccaagggcgaagctgtgctcaggcccgggctggacgcagagccagagctgtccccagaggagcagagggtcctggaaaggaagctgaaaaaggaacggaagaaagaggagaggcagcgtctgcgggaggcaggccttgtggcccagcacccgcctgccaggcgctcgggggccgaactggccctggactacctctgcagatgggcccaaaagcacaagaactggaggtttcagaagacgaggcagacgtggctcctgctgcacatgtatgacagtgacaaggttcccgatgagcacttctccaccctgctggcctacctggaggggctgcagggccgggcccgagagctgacggtgcagaaggcggaagccctgatgcgggagctggatgaggagggctctgatccccccctgccggggagggcccagcgcatccgacaggtgctgcagctgctctcctagtgggttcagcgcggggcggggccgctgcccagtgcagggctgcctcagaccacacagggtgcagctcctccggcggtgggggccgggttcaccagcagggcagcggctgagcaagggctttcagctcctccggtggtgggggccgggatcaccagcaccagagccctccttggccggtgacggctgtgacagtgatggcaggttcagtgccttcagcgcagagcgtggatgctctggaatcacccggacccctggccttggagggaccctccagccccaggaatctgctttggagggaaatgtctatttttctaccgggaatattttagagattggggcatgctggctcctcccgccagctgcaaacctgcaccttccgcctgattcccgatccccctgcgtgggccgcattcctggtcccctgcctgcgtccatcgaggggcctggctgtggcctgttttcctttgaccccacacagcgtcattgcgggtcatggggagcccctggtgggagcttgtggagtcggatcacgtacctgtgcagaaaccgcctctgtggctgcatttgaaataaaacccgacccagcagcagaaaaaaaaaaaaaaaaaaaaaaaaattcgggaaaaagttctccctctcttccccggggacngccctgggggcctgggggggccccaggggcccgggggggttgcgctgggagcgcggagagacacttggagccgcggcgagggggagagtacacgggatcgaccgcccccggatgtgggggggctccccgaaaaacatcggggagaggcccttttccgggaaagatggaacgacaagagaacccccagtggggattccccccaaagaaaaccccagggcgtgcggggaagaaacttggacctaggcaaaagtgcgtctttggaggcgaaaaattgggcacccgga

SEQ ID NO: 71807 - DNA, 977 bp, Homo sapiens
ggcacgagggccggaaggcggcgtccgcgacgcagctgttcacgcttaggtgggcgacgtgggcgcaggtgggcgcaggatggcaaaacagaagagaaaagttcctgaagtgacagagaaaaagaacaaaaagctgaagaaggcgtcagcagaggggccactgctgggccctgaggctgcaccaagtggcgaaggagccggctccaagggcgaagctgtgctcaggcccgggctggacgcagagccagagctgtccccagaggagcagagggtcctggaaaggaagctgaaaaaggaacggaagaaagaggagaggcagcgtctgcgggaggcaggccttgtggcccagcacccgcctgccaggcgctcgggggccgaactggccctggactacctctgcagatgggcccaaaagcacaagaactggaggtttcagaagacgaggcagacgtggctcctgctgcacatgtatgacagtgacaaggttcccgatgagcacttctccaccctgctggcctacctggaggggctgcagggccgggcccgagagctgacggtgcagaaggcggaagccctgatgcgggagctggatgaggagggctctgatccccccctgccggggagggcccagcgcatccgacaggtgctgcagctgctctcctagtgggttcagcgcggggcggggccgctgcccagtgcagggctgcctcagaccacacagggtgcagctcctccggcggtgggggccgggttcaccagcagggcagcggctgagcaagggctttcagctcctccggtggtgggggccgggatcaccagcaccagagccctggctgtggcctgttttcctttgaccccacacagcgtcattgcgggtcatggggagcccctggtgggagcttgtggagtcggatcacgtacctgtgcagaaaccgcctctgtggctgcatttgaaataaaacccgacccagcagcag

SEQ ID NO: 71808 - DNA, 961 bp, Homo sapiens
cgctggcgtcacggtccagccggctggatctggttccagccgcgccgggccggccgggcatgggcagtgtggaggcgctgaggctgctggaggcgcgggccgggcggtgcgcactgcgggcgcatccctgccccggcgccgtccgtgcccgcgggacctgacagccgggtcagagggcgaagctgtgctcaggcccgggctggacgcagagccagagctgtccccagaggagcagagggtcctggaaaggaagctgaaaaaggaacggaagaaagaggagaggcagcgtctgcgggaggcaggccttgtggcccagcacccgcctgccaggcgctcgggggccgaactggccctggactacctctgcagatgggcccaaaagcacaagaactggaggtttcagaagacgaggcagacgtggctcctgctgcacatgtatgacagtgacaaggttcccgatgagcacttctccaccctgctggcctacctggaggggctgcagggccgggcccgagagctgacggtgcagaaggcggaagccctgatgcgggagctggatgaggagggctctgatccccccctgccggggagggcccagcgcatccgacaggtgctgcagctgctctcctagtgggttcagcgcggggcggggccgctgcccagtgcagggctgcctcagaccacacagggtgcagctcctccggcggtgggggccgggttcaccagcagggcagcggctgagcaagggctttcagctccgatccccctgcgtgggccgcattcctggtcccctgcctgcgtccatcgaggggcctggctgtggcctgttttcctttgaccccacacagcgtcattgcgggtcatggggagcccctggtgggagcttgtggagtcggatcacgtacctgtgcagaaaccgcctctgtggctgcatttgaaataaaacccgacccagcagcag

SEQ ID NO: 71809 - DNA, 464 bp, Homo sapiens
aataattcgaaggacgacgtcggcaacccacttgttaaccctaagggggccaacggggccgcaggtggtcccagatggcaaaacagaagagaaaagttcctgaagtgacagagaaaaagaacaaaaagctgaagaaggcgtcagcagaggggccactgctgggccctgaggctgcaccaagtggcgaaggagccggctccaagggcgaagctgtgctcaggcccgggctggacgcagagccagagctgtccccagaggagccgatccccctgcgtgggccgcattcctggtcccctgcctgcgtccatcgaggggcctggctgtggcctgttttcctttgaccccacacagcgtcattgcgggtcatggggagcccctggtgggagcttgtggagtcggatcacgtacctgtgcagaaaccgcctctgtggctgcatttgaaataaaacccgacccagcagcag

SEQ ID NO: 71810 - DNA, 933 bp, Homo sapiens
aaaggctaggtacgagggctgggttgtggtgaggctgctggaggcgcgggccgggcggtgcgcactgcgggcgcatccctgccccggcgccgtccgtgcccgcgggacctgacagccgggtcagaggctcctgcacggcgggtgctgtgtctccgggcccaggtgacctcggggtgagaaggaaggggcctctgagatgagaacatagttttgctgttttcagtttatactcaaagccctgcagtttcctgacagcacagagcacacctgtcacgcgagcaggatgaagcccagaggctgcctggtgaagtgggcggcgcgctggaaaatccacgtagctttgttccctccacggggagcgtgcaaggccctctcgagcactacgggagcctcgccttctgcacagacttcggagccaggtgctggagcggcagcaactgaggggcgtggatgtctttgcatggttcccatacgttttttaaacgttaataatgtgattttcagtaaagtggcaggatcagcattgaagaatggggagcaactgtgagccgatttcctgcgagtggttgagaagcaggctttgtgtggttggccgtccttgtgcttagcggctgctcctgccggagctgcctgcctgtcttagaaacaacgccgcctccgactgctagttagcggtggcttccacaggtgaagcccaggcaggttagtgttctcacagctaggaaggacacgggcctggcagggagctgcagcacagcctctgtcgacacagaagcactgccgtgcgaacccttgcctcccgggacagctgttgcgcgcccagcagctggagcgctggctctgcgagggctcttcagcaatgccaggtgcagctgggctccaccctcaactggtccaatagtagcgaaagaaacgaggagtgtcgtgaatcgt

SEQ ID NO: 71811 - DNA, 527 bp, Homo sapiens
aaaggctaggtacgagggctgggttgtggtgaggctgctggaggcgcgggccgggcggtgcgcactgcgggcgcatccctgccccggcgccgtccgtgcccgcgggacctgacagccgggtcagaggctcctgcacggcgggtgctgtgtctccgggcccaggtgacctcggggtgagaaggaaggggcctctgagatgagaacatagttttgctgttttcagtttatactcaaagccctgcagtttcctgacagcacagagcacacctgtcacgcgagcaggatgaagcccagaggctgcctggtgaagtgggcggcgcgctggaaaatccacgtagctttgttccctccacggggagcgtgcaaggccctctcgagcactacgggagcctcgccttctgcacagacttcggagccaggtgctggagcggcagcaactgaggggcgtggatgtctttgcatggttcccatacgttttttaaacgttaataatgtgattttcagtaaagtggcaggatcagcattga

SEQ ID NO: 71812 - DNA, 1251 bp, Homo sapiens
cgctggcgtcacggtccagccggctggatctggttccagccgcgccgggccggccgggcatgggcagtgtggaggcgctgaggctgctggaggcgcgggccgggcggtgcgcactgcgggcgcatccctgccccggcgccgtccgtgcccgcgggacctgacagccgggtcagagggcgaagctgtgctcaggcccgggctggacgcagagccagagctgtccccagaggagcagagggtcctggaaaggaagctgaaaaaggaacggaagaaagaggagaggcagcgtctgcgggaggcaggccttgtggcccagcacccgcctgccaggcgctcgggggccgaactggccctggactacctctgcagatgggcccaaaagcacaagaactggaggtttcagaagacgaggcagacgtggctcctgctgcacatgtatgacagtgacaaggttcccgatgagcacttctccaccctgctggcctacctggaggggctgcagggccgggcccgagagctgacggtgcagaaggcggaagccctgatgcgggagctggatgaggagggctctgatccccccctgccggggagggcccagcgcatccgacaggtgctgcagctgctctcctagtgggttcagcgcggggcggggccgctgcccagtgcagggctgcctcagaccacacagggtgcagctcctccggcggtgggggccgggttcaccagcagggcagcggctgagcaagggctttcagctcctccggtggtgggggccgggatcaccagcaccagagcctcgcaagggccccttccctcctccagaccctccttggccggtgacggctgtgacagtgatggcaggttcagtgccttcagcgcagagcgtggatgctctggaatcacccggacccctggccttggagggaccctccagccccaggaatctgctttggagggaaatgtctatttttctaccgggaatattttagagattggggcatgctggctcctcccgccagctgcaaacctgcaccttccgcctgattcccgatccccctgcgtgggccgcattcctggtcccctgcctgcgtccatcgaggggcctggctgtggcctgttttcctttgaccccacacagcgtcattgcgggtcatggggagcccctggtgggagcttgtggagtcggatcacgtacctgtgcagaaaccgcctctgtggctgcatttgaaataaaacccgacccagcagcag

SEQ ID NO: 71813 - DNA, 1616 bp, Homo sapiens
  misc_feature (1332)..(1332): n is a, c, g, or t
cgctggcgtcacggtccagccggctggatctggttccagccgcgccgggccggccgggcatgggcagtgtggaggcgctgaggctgctggaggcgcgggccgggcggtgcgcactgcgggcgcatccctgccccggcgccgtccgtgcccgcgggacctgacagccgggtcagagggcgaagctgtgctcaggcccgggctggacgcagagccagagctgtccccagaggagcagagggtcctggaaaggaagctgaaaaaggaacggaagaaagaggagaggcagcgtctgcgggaggcaggccttgtggcccagcacccgcctgccaggcgctcgggggccgaactggccctggactacctctgcagatgggcccaaaagcacaagaactggaggtttcagaagacgaggcagacgtggctcctgctgcacatgtatgacagtgacaaggttcccgatgagcacttctccaccctgctggcctacctggaggggctgcagggccgggcccgagagctgacggtgcagaaggcggaagccctgatgcgggagctggatgaggagggctctgatccccccctgccggggagggcccagcgcatccgacaggtgctgcagctgctctcctagtgggttcagcgcggggcggggccgctgcccagtgcagggctgcctcagaccacacagggtgcagctcctccggcggtgggggccgggttcaccagcagggcagcggctgagcaagggctttcagctcctccggtggtgggggccgggatcaccagcaccagagcctcgcaagggccccttccctcctccagaccctccttggccggtgacggctgtgacagtgatggcaggttcagtgccttcagcgcagagcgtggatgctctggaatcacccggacccctggccttggagggaccctccagccccaggaatctgctttggagggaaatgtctatttttctaccgggaatattttagagattggggcatgctggctcctcccgccagctgcaaacctgcaccttccgcctgattcccgatccccctgcgtgggccgcattcctggtcccctgcctgcgtccatcgaggggcctggctgtggcctgttttcctttgaccccacacagcgtcattgcgggtcatggggagcccctggtgggagcttgtggagtcggatcacgtacctgtgcagaaaccgcctctgtggctgcatttgaaataaaacccgacccagcagcagaaaaaaaaaaaaaaaaaaaaaaaaaaaaaaaaaaaaaaaaaaaaattcgggaaaaagttctccctctcttccccggggacngccctgggggcctgggggggccccaggggcccgggggggttgcgctgggagcgcggagagacacttggagccgcggcgagggggagagtacacgggatcgaccgcccccggatgtgggggggctccccgaaaaacatcggggagaggcccttttccgggaaagatggaacgacaagagaacccccagtggggattccccccaaagaaaaccccagggcgtgcggggaagaaacttggacctaggcaaaagtgcgtctttggaggcgaaaaattgggcacccgga

SEQ ID NO: 71814 - DNA, 1279 bp, Homo sapiens
aataattcgaaggacgacgtcggcaacccacttgttaaccctaagggggccaacggggccgcaggtggtcccagatggcaaaacagaagagaaaagttcctgaagtgacagagaaaaagaacaaaaagctgaagaaggcgtcagcagaggggccactgctgggccctgaggctgcaccaagtggcgaaggagccggctccaagggcgaagctgtgctcaggcccgggctggacgcagagccagagctgtccccagaggagcagagggtcctggaaaggaagctgaaaaaggaacggaagaaagaggagaggcagcgtctgcgggaggcaggccttgtggcccagcacccgcctgccaggcgctcgggggccgaactggccctggactacctctgcagatgggcccaaaagcacaagaactggaggtttcagaagacgaggcagacgtggctcctgctgcacatgtatgacagtgacaaggttcccgatgagcacttctccaccctgctggcctacctggaggggctgcagggccgggcccgagagctgacggtgcagaaggcggaagccctgatgcgggagctggatgaggagggctctgatccccccctgccggggagggcccagcgcatccgacaggtgctgcagctgctctcctagtgggttcagcgcggggcggggccgctgcccagtgcagggctgcctcagaccacacagggtgcagctcctccggcggtgggggccgggttcaccagcagggcagcggctgagcaagggctttcagctcctccggtggtgggggccgggatcaccagcaccagagcctcgcaagggccccttccctcctccagaccctccttggccggtgacggctgtgacagtgatggcaggttcagtgccttcagcgcagagcgtggatgctctggaatcacccggacccctggccttggagggaccctccagccccaggaatctgctttggagggaaatgtctatttttctaccgggaatattttagagattggggcatgctggctcctcccgccagctgcaaacctgcaccttccgcctgattcccgatccccctgcgtgggccgcattcctggtcccctgcctgcgtccatcgaggggcctggctgtggcctgttttcctttgaccccacacagcgtcattgcgggtcatggggagcccctggtgggagcttgtggagtcggatcacgtacctgtgcagaaaccgcctctgtggctgcatttgaaataaaacccgacccagcagcag

SEQ ID NO: 71815 - DNA, 1273 bp, Homo sapiens
cgctggcgtcacggtccagccggctggatctggttccagccgcgccgggccggccgggcatgggcagtgtggaggcgctgaggctgctggaggcgcgggccgggcggtgcgcactgcgggcgcatccctgccccggcgccgtccgtgcccgcgggacctgacagccgggtcagagggcgaagctgtgctcaggcccgggctggacgcagagccagagctgtccccagaggagcagagggtcctggaaaggaagctgaaaaaggaacggaagaaagaggagaggcagcgtctgcgggaggcaggccttgtggcccagcacccgcctgccaggcgctcgggggccgaactggccctggactacctctgcagatgggcccaaaagcacaagaactggaggtttcagaagacgaggcagacgtggctcctgctgcacatgtatgacagtgacaaggttcccgatgagcacttctccaccctgctggcctacctggaggggctgcagggccgggcccgagagctgacggtgcagaaggcggaagccctgatgcgggagctggatgaggagggctctgatccccccctgccggggagggcccagcgcatccgacaggtgctgcagctgctctcctagtgggttcagcgcggggcggggccgctgcccagtgcagggctgcctcagaccacacagggtgcagctcctccggcggtgggggccgggttcaccagcagggcagcggctgagcaagggctttcagctcctccggtggtgggggccgggatcaccagcaccagagcctcgcaagggccccttccctcctccagaccctccttggccggtgacggctgtgacagtgatggcaggttcagtgccttcagcgcagagcgtggatgctctggaatcacccggacccctggccttggagggaccctccagccccaggaatctgctttggagggaaatgtctatttttctaccgggaatattttagagattggggcatgctggctcctcccgccagctgcaaacctgcaccttccgcctgattcccgatccccctgcgtgggccgcattcctggtcccctgcctgcgtccatcgaggggcctggctgtggcctgttttcctttgaccccacacagcgtcattgcgggtcatggggagcccctggtgggagcttgtggagtcggatcacgtacctgtgcagaaaccgcctctgtggctgcatttgaaataaaacccgacccagcagcaggggtcctgctctgtacggtgcg

SEQ ID NO: 71816 - DNA, 1347 bp, Homo sapiens
ggtggaccacgggggtggggaaggggcctctgggcagttaatcctggcacctggcgcctgcccgcaggactggccatcctcatgtgacctgtctgtctcttcgtcgtagcacaggcttagcaggatggtgtcggctggggccagacccagtgcttggggacagagcttttggccactactgaggtgagggtgggctcgggaagccccaggcagcgcacccgtctctggataccctccatccccgaagcctaatgtgttccttgactttcagggcgaagctgtgctcaggcccgggctggacgcagagccagagctgtccccagaggagcagagggtcctggaaaggaagctgaaaaaggaacggaagaaagaggagaggcagcgtctgcgggaggcaggccttgtggcccagcacccgcctgccaggcgctcgggggccgaactggccctggactacctctgcagatgggcccaaaagcacaagaactggaggtttcagaagacgaggcagacgtggctcctgctgcacatgtatgacagtgacaaggttcccgatgagcacttctccaccctgctggcctacctggaggggctgcagggccgggcccgagagctgacggtgcagaaggcggaagccctgatgcgggagctggatgaggagggctctgatccccccctgccggggagggcccagcgcatccgacaggtgctgcagctgctctcctagtgggttcagcgcggggcggggccgctgcccagtgcagggctgcctcagaccacacagggtgcagctcctccggcggtgggggccgggttcaccagcagggcagcggctgagcaagggctttcagctcctccggtggtgggggccgggatcaccagcaccagagcctcgcaagggccccttccctcctccagaccctccttggccggtgacggctgtgacagtgatggcaggttcagtgccttcagcgcagagcgtggatgctctggaatcacccggacccctggccttggagggaccctccagccccaggaatctgctttggagggaaatgtctatttttctaccgggaatattttagagattggggcatgctggctcctcccgccagctgcaaacctgcaccttccgcctgattcccgatccccctgcgtgggccgcattcctggtcccctgcctgcgtccatcgaggggcctggctgtggcctgttttcctttgaccccacacagcgtcattgcgggtcatggggagcccctggtgggagcttgtggagtcggatcacgtacctgtgcagaaaccgcctctgtggctgcatttgaaataaaacccgacccagcagcag

SEQ ID NO: 71817 - DNA, 1245 bp, Homo sapiens
aataattcgaaggacgacgtcggcaacccacttgttaaccctaagggggccaacggggccgcaggtggtcccagatggcaaaacagaagagaaaagttcctgaagtgacagagaaaaagaacaaaaagctgaagaaggcgtcagcagaggggccactgctgggccctgaggctgcaccaagtggcgaaggagccggctccaagggcgaagctgtgctcaggcccgggagagggtcctggaaaggaagctgaaaaaggaacggaagaaagaggagaggcagcgtctgcgggaggcaggccttgtggcccagcacccgcctgccaggcgctcgggggccgaactggccctggactacctctgcagatgggcccaaaagcacaagaactggaggtttcagaagacgaggcagacgtggctcctgctgcacatgtatgacagtgacaaggttcccgatgagcacttctccaccctgctggcctacctggaggggctgcagggccgggcccgagagctgacggtgcagaaggcggaagccctgatgcgggagctggatgaggagggctctgatccccccctgccggggagggcccagcgcatccgacaggtgctgcagctgctctcctagtgggttcagcgcggggcggggccgctgcccagtgcagggctgcctcagaccacacagggtgcagctcctccggcggtgggggccgggttcaccagcagggcagcggctgagcaagggctttcagctcctccggtggtgggggccgggatcaccagcaccagagcctcgcaagggccccttccctcctccagaccctccttggccggtgacggctgtgacagtgatggcaggttcagtgccttcagcgcagagcgtggatgctctggaatcacccggacccctggccttggagggaccctccagccccaggaatctgctttggagggaaatgtctatttttctaccgggaatattttagagattggggcatgctggctcctcccgccagctgcaaacctgcaccttccgcctgattcccgatccccctgcgtgggccgcattcctggtcccctgcctgcgtccatcgaggggcctggctgtggcctgttttcctttgaccccacacagcgtcattgcgggtcatggggagcccctggtgggagcttgtggagtcggatcacgtacctgtgcagaaaccgcctctgtggctgcatttgaaataaaacccgacccagcagcag

SEQ ID NO: 71818 - DNA, 1184 bp, Homo sapiens
gcgagcggcacagattgccaatgccaagcagagcggttagactaggtagtagattccatggatgcattagataaagttgtccaggaaagagaagatgccctaaggcttcttcagactggtcaagaaagagctagacctggtgcttggagaagagacatctttggaagaatcatctggcacaagttcaagcagtgggttataccttggcacctaaataaaagatacaataggaaacgattcttggccttgccatatgcaattgcatatggcaaggccaagagcgggacggctcatcttcggtgatgggcccaaaagcacaagaactggaggtttcagaagacgaggcagacgtggctcctgctgcacatgtatgacagtgacaaggttcccgatgagcacttctccaccctgctggcctacctggaggggctgcagggccgggcccgagagctgacggtgcagaaggcggaagccctgatgcgggagctggatgaggagggctctgatccccccctgccggggagggcccagcgcatccgacaggtgctgcagctgctctcctagtgggttcagcgcggggcggggccgctgcccagtgcagggctgcctcagaccacacagggtgcagctcctccggcggtgggggccgggttcaccagcagggcagcggctgagcaagggctttcagctcctccggtggtgggggccgggatcaccagcaccagagcctcgcaagggccccttccctcctccagaccctccttggccggtgacggctgtgacagtgatggcaggttcagtgccttcagcgcagagcgtggatgctctggaatcacccggacccctggccttggagggaccctccagccccaggaatctgctttggagggaaatgtctatttttctaccgggaatattttagagattggggcatgctggctcctcccgccagctgcaaacctgcaccttccgcctgattcccgatccccctgcgtgggccgcattcctggtcccctgcctgcgtccatcgaggggcctggctgtggcctgttttcctttgaccccacacagcgtcattgcgggtcatggggagcccctggtgggagcttgtggagtcggatcacgtacctgtgcagaaaccgcctctgtggctgcatttgaaataaaacccgacccagcagcag

SEQ ID NO: 71819 - DNA, 1125 bp, Homo sapiens
aaaggctaggtacgagggctgggttgtggtgaggctgctggaggcgcgggccgggcggtgcgcactgcgggcgcatccctgccccggcgccgtccgtgcccgcgggacctgacagccgggtcagaggctctgatccccccctgcctggggagggcccagcgcatcctgacaggtgctgcagctgctctcctagtgggttcagcgcggggcggggccgctgcccagtgcagggctgcctcagaccacacagagggtcctggaaaggaagctgaaaaaggaacggaagaaagaggagaggcagcgtctgcgggaggcaggccttgtggcccagcacccgcctgccaggcgctcgggggccgaactggccctggactacctctgcagatgggcccaaaagcacaagaactggaggtttcagaagacgaggcagacgtggctcctgctgcacatgtatgacagtgacaaggttcccgatgagcacttctccaccctgctggcctacctggaggggctgcagggccgggcccgagagctgacggtgcagaaggcggaagccctgatgcgggagctggatgaggaggtgggggccgggttcaccagcagggcagcggctgagcaagggctttcagctcctccggtggtgggggccgggatcaccagcaccagagcctcgcaagggccccttccctcctccagaccctccttggccggtgacggctgtgacagtgatggcaggttcagtgccttcagcgcagagcgtggatgctctggaatcacccggacccctggccttggagggaccctccagccccaggaatctgctttggagggaaatgtctatttttctaccgggaatattttagagattggggcatgctggctcctcccgccagctgcaaacctgcaccttccgcctgattcccgatccccctgcgtgggccgcattcctggtcccctgcctgcgtccatcgaggggcctggctgtggcctgttttcctttgaccccacacagcgtcattgcgggtcatggggagcccctggtgggagcttgtggagtcggatcacgtacctgtgcagaaaccgcctctgtggctgcatttgaaataaaacccgacccagcagcag

SEQ ID NO: 71820 - DNA, 1087 bp, Homo sapiens
ggcacgagggccggaaggcggcgtccgcgacgcagctgttcacgcttaggtgggcgacgtgggcgcaggtgggcgcaggatggcaaaacagaagagaaaagttcctgaagtgacagagaaaaagaacaaaaagctgaagaaggcgtcagcagaggggccactgctgggccctgaggctgcaccaagtggcgaaggagccggctccaagggcgaagctgtgctcaggcccgggctggacgcagagccagagctgtccccagaggagcagagggtcctggaaaggaagctgaaaaaggaacggaagaaagaggagaggcagcgtctgcgggaggcaggccttgtggcccagcacccgcctgccaggcgctcgggggccgaactggccctggactacctctgcagatgggcccaaaagcacaagaactggaggtttcagaagacgaggcagacgtggctcctgctgcacatgtatgacagtgacaaggttcccgatgagcacttctccaccctgctggcctacctggaggggctgcagggccgggcccgagagctgacggtgcagaaggcggaagccctgatgcgggagctggatgaggagggctctgatccccccctgccggggagggcccagcgcatccgacaggtgctgcagctgctctcctagtgggttcagcgcggggcggggccgctgcccagtgcagggctgcctcagaccacacagggtgcagctcctccggcggtgggggccgggttcaccagcaggcctccagccccaggaatctgctttggagggaaatgtctatttttctaccgggaatattttagagattggggcatgctggctcctcccgccagctgcaaacctgcaccttccgcctgattcccgatccccctgcgtgggccgcattcctggtcccctgcctgcgtccatcgaggggcctggctgtggcctgttttcctttgaccccacacagcgtcattgcgggtcatggggagcccctggtgggagcttgtggagtcggatcacgtacctgtgcagaaaccgcctctgtggctgcatttgaaataaaacccgacccagcagcag

SEQ ID NO: 71821 - DNA, 899 bp, Homo sapiens
cgctggcgtcacggtccagccggctggatctggttccagccgcgccgggccggccgggcatgggcagtgtggaggcgctgaggctgctggaggcgcgggccgggcggtgcgcactgcgggcgcatccctgccccggcgccgtccgtgcccgcgggacctgacagccgggtcagagggcgaagctgtgctcaggcccgggctggacgcagagccagagctgtccccagaggagcagagggtcctggaaaggaagctgaaaaaggaacggaagaaagaggagaggcagcgtctgcgggaggcaggccttgtggcccagcacccgcctgccaggcgctcgggggccgaactggccctggactacctctgcagatgggcccaaaagcacaagaactggaggtttcagaagacgaggcagacgtggctcctgctgcacatgtatgacagtgacaaggttcccgatgagcacttctccaccctgctggcctacctggaggggctgcagggccgggcccgagagctgacggtgcagaaggcggaagccctgatgcgggagctggatgaggagggctctgatccccccctgccggggagggcccagcgcatccgacaggtgctgcagctgctctcctagtgggttcagcgcggggcggggccgctgcccagtgcagggctgccgatccccctgcgtgggccgcattcctggtcccctgcctgcgtccatcgaggggcctggctgtggcctgttttcctttgaccccacacagcgtcattgcgggtcatggggagcccctggtgggagcttgtggagtcggatcacgtacctgtgcagaaaccgcctctgtggctgcatttgaaataaaacccgacccagcagcaggggtcctgctctgtacggtgcg

SEQ ID NO: 71822 - DNA, 1152 bp, Homo sapiens
aaaggctaggtacgagggctgggttgtggtgaggctgctggaggcgcgggccgggcggtgcgcactgcgggcgcatccctgccccggcgccgtccgtgcccgcgggacctgacagccgggtcagagggcgaagctgtgctcaggcccgggctggacgcagagccagagctgtccccagaggagcggcccagcgcatccgacaggtgctgcagctgctctcctagtgggttcagcgcggggcggggccgctgcccagtgcagggctgcctcagaccacacagggtgcagctcctccggcggtgggggccgggttcaccagcagggcagcggctgagcaagggctttcagctcctccggtggtgggggccgggatcaccagcaccagagcctcgcaagggccccttccctcctccagaccctccttggccggtgacggctgtgacagtgatggcaggttcagtgccttcagcgcagagcgtggatgctctggaatcacccggacccctggccttggagggaccctccagccccaggaatctgctttggagggaaatgtctatttttctaccgggaatattttagagattggggcagggccttgtggcccagcacccgcctgcaggcgctcgggggccgaactggccctggactacctctgcagcatgggccaaaaggcacaagactggaggtttcagcaggacgaggcagacgtgggatcctgctgcacatgtattaccagtgacaagggtcccgatgagcacttctcaacctggtggctactggagggctgcaggccggccgagaagtgacggtcagaaggcggagcccgatgcggactgataagagggctgaatccacctgtcgggagggccagggactcgaaacgtgcgggcgcgtgaagacgtgcaccctttcggcgaattccggaacccggtgggtgcggcatccggtgccccacgtggcaacgaggggccggggtcgcggttactttgccccccagggtttttggtttggagggccccgtgggagatggcaaacaccactgacaaagccgtggtgctaataccgcccgagagaacgaaagcaaagagagtcgtggtgacgacctggcgcatcctttatgtacaggctcagggggtgtctcacgcgagt

SEQ ID NO: 71823 - DNA, 2768 bp, Homo sapiens
  misc_feature (238)..(238): n is a, c, g, or t
gggtctgtgtgcccctccgcactggctactgtcttcctcgggcgccggtcggcttttgcgtccccacattcaatcccaactgcggctcccgcggttcccgcactggccgcagaggagccacggggcacagctggctgtgtttagggccctgcacagccccacagccagtcgctccccccacagttccgaaagaatatggccccccagaggaaggacctgcatggactgtcattctccnttcttcgagcacagaaccgcgacaagctgttcaaagtctctgtcccccacgtcctggagatgcggaagcgggagctgaggcccaggtgggtccaggaggggctgccccacctgcttccctccaggcccctctggtgggacccactgtggcccctgtagagtcccctccctacagattgcccggaatgacccatgtggctggaaggactgatgccttcagacacagctggatccaggtgctgccttcctgggacctacccaccccatttccccaggcctgacacccctgcacacagcctcaatccacgggtggggagcaaagccaccaccccccacccagccccccgggtgcagaatgagccctgggaaagctctaatgggtgcctgtggccccgggaaggaacatggctctctagccaggggccaaaggcacctgccccaacccctagcctccagccaccagctgacgaggacctgaagtgagtgatgagacccccacaggagccagagaagggtggaaaagccagtttgtcagacacaactgggacagccacagcttgggaccctgggaccctgggaccctgaggcagagccgcaggggtccggcctgggccgatggtgggtgggggcaaggcgggagcgcaagcctctgacttccttctagttccgacgagtaccaggccgcccgagccaccctgctcagagcgttccaggcgaagtttgacacatttgtagttccctgtgttgttgccagtggcgacatcaaagacaggaaggggtcagaacccctgagcttcaggtgcggggtgctctggccagaacagggtgtggtcagccgcaaacgcgctgtccctctgctactgcccaactctggggcctgggcgggcagggggccgcccaccctgccctcagcatgcccttcctatcccagcccccacaacaccctgtacctggagctgtggtgcccgacggtggcaccatctgttgtggtgacgtcccataaaggcaagaccatctttaacttcggcgacgtcgctgtggggcaccgcagtatcaagaagatctccatccagaacgtctctcccgaggatctggccctggacttctccctgctgaaccccaacggcccctttgtcctgctgaaccactccagcctgctgcgtgcaggtgggacccaggtcctggtgctttccttctctccccacgagagcatcctggctcaagaaacactggacatcatcaccaagagaggcacgctcaccctcaccctcatgggcactggcgtggcgtccatgatcacgtgctccattgaaggcagcgtcctcaacatgggctatgtgattgccggagagtctgtgtcctcaggcttcaagctgcagaacaactctctgctccccatcaagttctccatgcacctggacagcctctccagcacccggggccggggccagcagcagctgccgcagttcctcagctcgccctcccagaggacggaggtggtcgggacgcagaatctcaacggtcagagcgtgttcagcgtggcccccgtcaagggcgtcatggaccccgggaagacacaagacttcactgtcaccttcagccccgaccacgaaagcctctacttctccgacaagctccaggtggtgctctttgaaaagaaaatctcccaccagatcctgctgaagggtgccgcctgtcagcacatgatgttcgtggagggcggcgaccccctggacgtgcccgtggagtctctgacagcgatccctgtatttgaccccaggcacagagaggccagctcccggccaggccctctctctccagaagctgaggagctgaggcccatcctggtgaccctggactacatccagtttgacacagacacgccagccccacctgccacccgagagctgcaggtgggctgtatccggaccacccagccatctccaaagaagaccgttgagttcagcatagacagcgtcgcatccctgcagcacaagggtttctctattgagccctccaggggctccgtggagcgcggccagacgaagaccatcagcatctcctgggtgccacctgcggactttgatccagaccacccactcatggtgtcggccctgctgcagctaaggggggatgtgaaggagacctacaaggtcatctttgtagcccaggtgttgactggcccctaagcctctgcacagagcaccctcgggccctcctgtccaccctcaaagccctccccaggctgagggccaggtcatactaccctagagcctgggacctggccatcctctgccagtcagattccaataggccgccctccacatggcgccacggccacttcctgctgccctggaccccgcaagcccagggacatccaagagcacccctcctgagaccccagactcagaagcagcgagaaggccaggccagccctcagccatcctagccagaccccctcagagcccccagcccccaggagagccctccacagcctgtcaataaattttttgtaggccaacacatgcagc

SEQ ID NO: 71824 - DNA, 1731 bp, Homo sapiens
  misc_feature (238)..(238): n is a, c, g, or t
gggtctgtgtgcccctccgcactggctactgtcttcctcgggcgccggtcggcttttgcgtccccacattcaatcccaactgcggctcccgcggttcccgcactggccgcagaggagccacggggcacagctggctgtgtttagggccctgcacagccccacagccagtcgctccccccacagttccgaaagaatatggccccccagaggaaggacctgcatggactgtcattctccnttcttcgagcacagaaccgcgacaagctgttcaaagtctctgtcccccacgtcctggagatgcggaagcgggagctgaggcccaggtgggtccaggaggggctgccccacctgcttccctccaggcccctctggtgggacccactgtggcccctgtagagtcccctccctacagattgcccggaatgacccatgtggctggaaggactgatgccttcagacacagctggatccaggtgctgccttcctgggacctacccaccccatttccccaggcctgacacccctgcacacagcctcaatccacgggtggggagcaaagccaccaccccccacccagccccccgggtgcagaatgagccctgggaaagctctaatgggtgcctgtggccccgggaaggaacatggctctctagccaggggccaaaggcacctgccccaacccctagcctccagccaccagctgacgaggacctgaagtgagtgatgagacccccacaggagccagagaagggtggaaaagccagtttgtcagacacaactgggacagccacagcttgggaccctgggaccctgggaccctgaggcagagccgcaggggtccggcctgggccgatggtgggtgggggcaaggcgggagcgcaagcctctgacttccttctagttccgacgagtaccaggccgcccgagccaccctgctcagagcgttccaggcgaagtttgacacatttgtagttccctgtgttgttgccagtggcgacatcaaagacaggaaggggtcagaacccctgagcttcagcccccacaacaccctgtacctggagctgtggtgcccgacggtggcaccatctgttgtggtgacgtcccataaaggcaagaccatctttaacttcggcgacgtcgctgtggggcaccgcagtatcaagaagatctccatccagaacgtctctcccgaggatctggccctggacttctccctgctgaaccccaacggcccctttgtcctgctgaaccactccagcctgctgcgtgcaggtgggacccaggtcctggtgctttccttctctccccacgagagcatcctggctcaagaaacactggacatcatcaccaagagaggcacgctcaccctcaccctcatgggcactggcgtggcgtccatgatcacgtgctccattgaaggcagcgtcctcaacatgggctatgtgattgccggagagtctgtgtcctcaggcttcaaggtgaagcacacgtgggccctggtgctggctccagcctcccaggaggggtttccaccaggcaggactcaggccagctgtcaaaagtgacccgtgggtcggagagcccgtggggacacaggtggccccctctacccctcctctacacagctgccgcctctgccgccctctcctgcagggaacccggggcctgtttctggggaggctgcagatgtcccctagtcctccccacctccctgtcctccttggcgctctt

SEQ ID NO: 71825 - DNA, 287 bp, Homo sapiens
agttcggcactaggcctcgctacaccaacaaatctaagccctccctagctgcttggtaactgtgtcatgaagctgccggacagacacacgtggcatctccctgggcaggagagcaggcctgcagcatgggtcctgttcccgtgtgccgtgggtggcagtggctgcacctggcactagggctgctctgtggatgtgggtgacaacggcaggaggggatgctggccttcctgcacatagacctgcagttagtaaatcataagcccaaataaacaggttgtttgaatata

SEQ ID NO: 71826 - DNA, 191 bp, Homo sapiens
aattcaagcttctaacgatgtacggggacatgggtcctgttcccgtgtgccgtgggtggcagtggctgcacctggcactagggctgctctgtggatgtgggtgacaacggcaggaggggatgctggccttcctgcacatagacctgcagttagtaaatcataagcccaaataaacaggttgtttgaatata

SEQ ID NO: 71827 - DNA, 520 bp, Homo sapiens
ggagtatagggcttgaactgagagcctggcctcccagaaggttttaatagacctacggcacagaaattgacacagcccgtaagttcatgggaggggcctgagaggagacgggtgagacagacgcgtccgagcaggttgggagaaagggcttctctgcgaggcttctctgccaggtcactgtgccacgtgggttacggaactctccttggtgtagggctcaacagggtggagccacgagtccatgagctcttcgtacttgcacagccctaggcctggcatggagtggccagggcgaggctggttctgctgtccgctctccccagggtcccgccacgagggtggcgtggcatggggcacatcgcccggacttcctgtccctcttgggtttaggaatgggatggtgaggcctccctggcagcttgttaggaggagtaaaccaagcgagccgaccagctcccagcagggtcccggcacacagtaggtgctcagcaaacgaagctgtgacctgagggtggagagt

SEQ ID NO: 71828 - DNA, 1916 bp, Homo sapiens
ttttttcttccggtggctggtctccggcggccccgtccccgactgggccccgtgcccccccgcccccgcggccccccgccgccgggccagccgccaccatgaagaaattctttcaggagttcaaggccgacatcaagttcaagagcgcgggacccggtcagaagctcaaagagtccgtgggggaaaaggcccacaaagagaagcccaaccagccagcccccaggccgccccgccagggacccaccaatgaggcacagatggcagccgctgctgccctagcccggctggagcagaagcagtcccgggcctggggccccacatcgcaggacaccatccgaaaccaggtgagaaaggaacttcaagccgaagccaccgtcagcgggagccccgaggccccagggaccaacgtggtatctgagcccagagaggaaggctctgcccacctggctgtgcctggcgtgtacttcacctgtccgctcactggggccaccctgaggaaggaccagcgggacgcctgcatcaaggaggccattctcttgcacttctccaccgacccagtggccgcctccatcatgaagatctacacgttcaacaaagaccaggaccgggtgaagctgggtgtggacaccattgccaagtacctggacaacatccacctgcaccccgaggaggagaagtaccggaagatcaagctgcagaacaaggtgtttcaggagcgcattaactgcctggaagggacccacgagttttttgaggccattgggttccagaaggtgttgcttcccgcccaggatcaggaggaccccgaggagttctacgtgctgagcgagaccaccttggcccagccccagagcctggagaggcacaaggaacagctgctggctgcggagcccgtgcgcgccaagctggacaggcagcgccgcgtcttccagccctcgcccctggcctcgcagttcgaactgcctggggacttcttcaacctcacagcagaggagatcaagcgggagcagaggctcaggtccgaggcggtggagcggctgagcgtgctgcggaccaaggccatgcgggagaaggaggagcagcgggggctgcgcaagtacaactacacgctgctgcgcgtgcgcctccccgatggctgcctcctgcagggcactttctacgctcgggagcggctgggggcggtgtacgggttcgtccgggaggccctgcagagcgactggctgccttttgagctgctggcctcgggagggcagaagctgtccgaggacgagaacctggccttgaacgagtgcgggctggtgccctctgccctcctgaccttctcgtgggacatggctgtgctggaggacatcaaggccgcgggggccgagccggactccatcctgaaacccgagctcctgtcagccatcgagaagctcttgtgaaataaaagcagggttggcctcagccctgtgggtctgtctcatgctctccctgttcctctccccgccaccccagggcctccaagccacctctggaaatacttggctctgccccatgggcacgggaggggcgccagccgtggagctgtggaattgggccccgtggcagagcccccatcccttgggggctgtggggatgcgcccaagcccccgagggagaggcctggggacaccaacaaatctaagccctccctagctgcttggtaactgtgtcatgaagctgccggacagacacacgtggcatctccctgggcaggagagcaggcctgcagcatgggtcctgttcccgtgtgccgtgggtggcagtggctgcacctggcactagggctgctctgtggatgtgggtgacaacggcaggaggggatgctggccttcctgcacatagacctgcagttagtaaatcataagcccaaataaacaggttgtttgaatata

SEQ ID NO: 71829 - DNA, 1987 bp, Homo sapiens
gggcaggacttgcccgatggtgcagagctgagtggaaccagcatctccttcctccaggggctcttccgcctgcagtagaaccatctggtggctgcaggtggcccctgggaaccaggtgtcctggcccacataggcagggacacgtctggctgatggtgctggggaggggcagaagctcctctgtgtgactgcacgtcagctttgccggccacctcgggaggatacactcactctccctcggtctgttcccagggaaaaggcccacaaagagaagcccaaccagccagcccccaggccgccccgccagggacccaccaatgaggcacagatggcagccgctgctgccctagcccggctggagcagaagcagtcccgggcctggggccccacatcgcaggacaccatccgaaaccaggtgagaaaggaacttcaagccgaagccaccgtcagcgggagccccgaggccccagggaccaacgtggtatctgagcccagagaggaaggctctgcccacctggctgtgcctggcgtgtacttcacctgtccgctcactggggccaccctgaggaaggaccagcgggacgcctgcatcaaggaggccattctcttgcacttctccaccgacccagtggccgcctccatcatgaagatctacacgttcaacaaagaccaggaccgggtgaagctgggtgtggacaccattgccaagtacctggacaacatccacctgcaccccgaggaggagaagtaccggaagatcaagctgcagaacaaggtgtttcaggagcgcattaactgcctggaagggacccacgagttttttgaggccattgggttccagaaggtgttgcttcccgcccaggatcaggaggaccccgaggagttctacgtgctgagcgagaccaccttggcccagccccagagcctggagaggcacaaggaacagctgctggctgcggagcccgtgcgcgccaagctggacaggcagcgccgcgtcttccagccctcgcccctggcctcgcagttcgaactgcctggggacttcttcaacctcacagcagaggagatcaagcgggagcagaggctcaggtccgaggcggtggagcggctgagcgtgctgcggaccaaggccatgcgggagaaggaggagcagcgggggctgcgcaagtacaactacacgctgctgcgcgtgcgcctccccgatggctgcctcctgcagggcactttctacgctcgggagcggctgggggcggtgtacgggttcgtccgggaggccctgcagagcgactggctgccttttgagctgctggcctcgggagggcagaagctgtccgaggacgagaacctggccttgaacgagtgcgggctggtgccctctgccctcctgaccttctcgtgggacatggctgtgctggaggacatcaaggccgcgggggccgagccggactccatcctgaaacccgagctcctgtcagccatcgagaagctcttgtgaaataaaagcagggttggcctcagccctgtgggtctgtctcatgctctccctgttcctctccccgccaccccagggcctccaagccacctctggaaatacttggctctgccccatgggcacgggaggggcgccagccgtggagctgtggaattgggccccgtggcagagcccccatcccttgggggctgtggggatgcgcccaagcccccgagggagaggcctggggacaccaacaaatctaagccctccctagctgcttggtaactgtgtcatgaagctgccggacagacacacgtggcatctccctgggcaggagagcaggcctgcagcatgggtcctgttcccgtgtgccgtgggtggcagtggctgcacctggcactagggctgctctgtggatgtgggtgacaacggcaggaggggatgctggccttcctgcacatagacctgcagttagtaaatcataagcccaaataaacaggttgtttgaatata

SEQ ID NO: 71830 - DNA, 2228 bp, Homo sapiens
cacccgccctcatctgggcagcccagggaggtgcgggtggcagccctgcttcccaggccatgggtggctctctgggtgtggccgtgtgtgatggctgtgccgagcgtggatttgtgccccaatcttttccaggtcttagggtacgtactgttctcagcctctccatgctgggacgctgttcgcagtcagcagggctggttctgggaaacccccagagttccagctatgacttctcccctcccccggtaacataggtggataggtgggacctcggggaggggcaggggctgggggtatccgtcttccagctattgagtttcagacattgagggttgcagactcatttgtgtcctctctgccacctgccatccctgtgaccctggacgatgggcctctcggtctctttgtaaacatgaggcccgggagtggttccagaacgtccatcatggggctgcgagagcaggagggatggggcgtccatggtggcgggaggttctgtaagtggcggtggccttgatggatctcagcactgaggtcgagttctaaagccagagtgtgaggcacagttctgtcgcgtcacactggcttccaagtcccatggatctagccttgagaaggcggaaggggagacttgagttctgctgggtcttggctgcgtcgcctctgccctggggcgtgggcagggctgcggtcttggagggtctctcttttcctttctgtgatgagcgcacagctggggccgctccaagccgctgttctgccttccttttcctgcccctgttacctgggcagcggagggccgtgcggcccgggctctcagtgagtggctttccctgcttccctcctcccagcacttctccaccgacccagtggccgcctccatcatgaagatctacacgttcaacaaagaccaggaccgggtgaagctgggtgtggacaccattgccaagtacctggacaacatccacctgcaccccgaggaggagaagtaccggaagatcaagctgcagaacaaggtgtttcaggagcgcattaactgcctggaagggacccacgagttttttgaggccattgggttccagaaggtgttgcttcccgcccaggatcaggaggaccccgaggagttctacgtgctgagcgagaccaccttggcccagccccagagcctggagaggcacaaggaacagctgctggctgcggagcccgtgcgcgccaagctggacaggcagcgccgcgtcttccagccctcgcccctggcctcgcagttcgaactgcctggggacttcttcaacctcacagcagaggagatcaagcgggagcagaggctcaggtccgaggcggtggagcggctgagcgtgctgcggaccaaggccatgcgggagaaggaggagcagcgggggctgcgcaagtacaactacacgctgctgcgcgtgcgcctccccgatggctgcctcctgcagggcactttctacgctcgggagcggctgggggcggtgtacgggttcgtccgggaggccctgcagagcgactggctgccttttgagctgctggcctcgggagggcagaagctgtccgaggacgagaacctggccttgaacgagtgcgggctggtgccctctgccctcctgaccttctcgtgggacatggctgtgctggaggacatcaaggccgcgggggccgagccggactccatcctgaaacccgagctcctgtcagccatcgagaagctcttgtgaaataaaagcagggttggcctcagccctgtgggtctgtctcatgctctccctgttcctctccccgccaccccagggcctccaagccacctctggaaatacttggctctgccccatgggcacgggaggggcgccagccgtggagctgtggaattgggccccgtggcagagcccccatcccttgggggctgtggggatgcgcccaagcccccgagggagaggcctggggacaccaacaaatctaagccctccctagctgcttggtaactgtgtcatgaagctgccggacagacacacgtggcatctccctgggcaggagagcaggcctgcagcatgggtcctgttcccgtgtgccgtgggtggcagtggctgcacctggcactagggctgctctgtggatgtgggtgacaacggcaggaggggatgctggccttcctgcacatagacctgcagttagtaaatcataagcccaaataaacaggttgtttgaatata

SEQ ID NO: 71831 - DNA, 2608 bp, Homo sapiens
ttttttcttccggtggctggtctccggcggccccgtccccgactgggccccgtgcccccccgcccccgcggccccccgccgccgggccagccgccaccatgaagaaattctttcaggagttcaaggccgacatcaagttcaagagcgcgggacccggtcagaagctcaaagagtccgtgggggaaaaggcccacaaagagaagcccaaccagccagcccccaggccgccccgccagggacccaccaatgaggcacagatggcagccgctgctgccctagcccggctggagcagaagcagtcccgggcctggggccccacatcgcaggacaccatccgaaaccaggtgagaaaggaacttcaagccgaagccaccgtcagcgggagccccgaggccccagggaccaacgtggtatctgagcccagagaggaaggctctgcccacctggctgtgcctggcgtgtacttcacctgtccgctcactggggccaccctgaggaaggaccagcgggacgcctgcatcaaggaggccattctcttgcacttctccaccgacccagtggccgcctccatcatgaagatctacacgttcaacaaagaccaggaccgggtgaagctgggtgtggacaccattgccaagtgagcgtgtggcccctttgccctgcctggcccctccagctcatcccagcacccctcccactggggctgtcaccccctctggccccctcattacctgctgaggtgggttgggaaggagcataggccgagagtgaggcagctccacccagaggcctcaggcaaagggctgggcctccttgggcctcagtttacccgtgtgcaaaatgaaggtgttgaaggaatcaggggtttcccaccctggcttccttggggaacatgtggaggaggcagggtcccaccccactccccgggtctcaggatcgggggcaggcctggaggtccacgctgcccgccaacgccgagggagcaccccgcaggagccccctgctggcactgcggcccttcagctctggctctccactcttccggcactgtggcttccccaccgctgtggttaattgtgcccttccagggctggtgggacggtgaggggttccgtggggctcctgctggcaccaggggtgggctccatggggtgtccgaggtgtgccttccacccggagatggtctgctgccctcgcgtcactgggccgcttcttccctctgactagaggccaagtgtggctgagctgctgttacctggagcaggaggcacagaggggccgggtgggcagcctgggctgtgccccactcaccttctccacctaccccaggtacctggacaacatccacctgcaccccgaggaggagaagtaccggaagatcaagctgcagaacaaggtgtttcaggagcgcattaactgcctggaagggacccacgagttttttgaggccattgggttccagaaggtgttgcttcccgcccaggatcaggaggaccccgaggagttctacgtgctgagcgagaccaccttggcccagccccagagcctggagaggcacaaggaacagctgctggctgcggagcccgtgcgcgccaagctggacaggcagcgccgcgtcttccagccctcgcccctggcctcgcagttcgaactgcctggggacttcttcaacctcacagcagaggagatcaagcgggagcagaggctcaggtccgaggcggtggagcggctgagcgtgctgcggaccaaggccatgcgggagaaggaggagcagcgggggctgcgcaagtacaactacacgctgctgcgcgtgcgcctccccgatggctgcctcctgcagggcactttctacgctcgggagcggctgggggcggtgtacgggttcgtccgggaggccctgcagagcgactggctgccttttgagctgctggcctcgggagggcagaagctgtccgaggacgagaacctggccttgaacgagtgcgggctggtgccctctgccctcctgaccttctcgtgggacatggctgtgctggaggacatcaaggccgcgggggccgagccggactccatcctgaaacccgagctcctgtcagccatcgagaagctcttgtgaaataaaagcagggttggcctcagccctgtgggtctgtctcatgctctccctgttcctctccccgccaccccagggcctccaagccacctctggaaatacttggctctgccccatgggcacgggaggggcgccagccgtggagctgtggaattgggccccgtggcagagcccccatcccttgggggctgtggggatgcgcccaagcccccgagggagaggcctggggacaccaacaaatctaagccctccctagctgcttggtaactgtgtcatgaagctgccggacagacacacgtggcatctccctgggcaggagagcaggcctgcagcatgggtcctgttcccgtgtgccgtgggtggcagtggctgcacctggcactagggctgctctgtggatgtgggtgacaacggcaggaggggatgctggccttcctgcacatagacctgcagttagtaaatcataagcccaaataaacaggttgtttgaatata

SEQ ID NO: 71832 - DNA, 1572 bp, Homo sapiens
ttttttcttccggtggctggtctccggcggccccgtccccgactgggccccgtgcccccccgcccccgcggccccccgccgccgggccagccgccaccatgaagaaattctttcaggagttcaaggccgacatcaagttcaagagcgcgggacccggtcagaagctcaaagagtccgtgggggaaaaggcccacaaagagaagcccaaccagccagcccccaggccgccccgccagggacccaccaatgaggcacagatggcagccgctgctgccctagcccggctggagcagaagcagtcccgggcctggggccccacatcgcaggacaccatccgaaaccaggtggccgcctccatcatgaagatctacacgttcaacaaagaccaggaccgggtgaagctgggtgtggacaccattgccaagtacctggacaacatccacctgcaccccgaggaggagaagtaccggaagatcaagctgcagaacaaggtgtttcaggagcgcattaactgcctggaagggacccacgagttttttgaggccattgggttccagaaggtgttgcttcccgcccaggatcaggaggaccccgaggagttctacgtgctgagcgagaccaccttggcccagccccagagcctggagaggcacaaggaacagctgctggctgcggagcccgtgcgcgccaagctggacaggcagcgccgcgtcttccagccctcgcccctggcctcgcagttcgaactgcctggggacttcttcaacctcacagcagaggagatcaagcgggagcagaggctcaggcactttctacgctcgggagcggctgggggcggtgtacgggttcgtccgggaggccctgcagagcgactggctgccttttgagctgctggcctcgggagggcagaagctgtccgaggacgagaacctggccttgaacgagtgcgggctggtgccctctgccctcctgaccttctcgtgggacatggctgtgctggaggacatcaaggccgcgggggccgagccggactccatcctgaaacccgagctcctgtcagccatcgagaagctcttgtgaaataaaagcagggttggcctcagccctgtgggtctgtctcatgctctccctgttcctctccccgccaccccagggcctccaagccacctctggaaatacttggctctgccccatgggcacgggaggggcgccagccgtggagctgtggaattgggccccgtggcagagcccccatcccttgggggctgtggggatgcgcccaagcccccgagggagaggcctggggacaccaacaaatctaagccctccctagctgcttggtaactgtgtcatgaagctgccggacagacacacgtggcatctccctgggcaggagagcaggcctgcagcatgggtcctgttcccgtgtgccgtgggtggcagtggctgcacctggcactagggctgctctgtggatgtgggtgacaacggcaggaggggatgctggccttcctgcacatagacctgcagttagtaaatcataagcccaaataaacaggttgtttgaatata

SEQ ID NO: 71833 - DNA, 795 bp, Homo sapiens
attcgagctcggtaccccattggataaggcactttctacgctcgggagcggctgggggcggtgtacgggttcgtccgggaggccctgcagagcgactggctgccttttgagctgctggcctcgggagggcagaagctgtccgaggacgagaacctggccttgaacgagtgcgggctggtgccctctgccctcctgaccttctcgtgggacatggctgtgctggaggacatcaaggccgcgggggccgagccggactccatcctgaaacccgagctcctgtcagccatcgagaagctcttgtgaaataaaagcagggttggcctcagccctgtgggtctgtctcatgctctccctgttcctctccccgccaccccagggcctccaagccacctctggaaatacttggctctgccccatgggcacgggaggggcgccagccgtggagctgtggaattgggccccgtggcagagcccccatcccttgggggctgtggggatgcgcccaagcccccgagggagaggcctggggacaccaacaaatctaagccctccctagctgcttggtaactgtgtcatgaagctgccggacagacacacgtggcatctccctgggcaggagagcaggcctgcagcatgggtcctgttcccgtgtgccgtgggtggcagtggctgcacctggcactagggctgctctgtggatgtgggtgacaacggcaggaggggatgctggccttcctgcacatagacctgcagttagtaaatcataagcccaaataaacaggttgtttgaatata

SEQ ID NO: 71834 - DNA, 1225 bp, Homo sapiens
ttttttcttccggtggctggtctccggcggccccgtccccgactgggccccgtgcccccccgcccccgcggccccccgccgccgggccagccgccaccatgaagaaattctttcaggagttcaaggccgacatcaagttcaagagcgcgggacccggtcagaagctcaaagagtccgtgggggaaaaggcccacaaagagaagcccaaccagccagcccccaggccgccccgccagggacccaccaatgaggcacagatggcagccgctgctgccctagcccggctggagcagaagcagtcccgggcctggggccccacatcgcaggacaccatccgaaaccaggtgagaaaggaacttcaagccgaagccaccgtcagcgggagccccgaggccccagggaccaacgtggtatctgagcccagagaggaaggctctgcccacctggctgtgcctggcgtgtacttcacctgtccgctcactggggccaccctgaggaaggaccagcgggacgcctgcatcaaggaggccattctcttgcacttctccaccgacccagtggccgcctccatcatgaagatctacacgttcaacaaagaccaggaccgggtgaagctgggtgtggacaccattgccaagtacctggacaacatccacctgcaccccgaggaggagaagtaccggaagatcaagctgcagaacaaggtgtttcaggagcgcattaactgcctggaagggacccacgagttttttgaggccattgggttccagaaggtgttgcttcccgcccaggatcaggaggaccccgaggagttctacgtgctgagcgagaccaccttggcccagccccagagcctggagaggcacaaggaacagctgctggctgcggagcccgtgcgcgccaagctggacaggcagcgccgcgtcttccagccctcgcccctggcctcgcagttcgaactgcctggggacttcttcaacctcacagcagaggagatcaagcgggagcagaggctcaggtccgaggcggtggagcggctgagcgtgctgcggaccaaggccatgcgggagaaggaggagcagcgggggctgcgcaagtacaactacacgctgctgcgcgtgcgcctccccgatggctgcctcctgcagggtgggcaccaacgatgcccgtggagggcggctcgggttggtagggggccctgggccccacccgctctgactccccc

SEQ ID NO: 71835 - DNA, 679 bp, Homo sapiens
ttttttcttccggtggctggtctccggcggccccgtccccgactgggccccgtgcccccccgcccccgcggccccccgccgccgggccagccgccaccatgaagaaattctttcaggagttcaaggccgacatcaagttcaagagcgcgggacccggtcagaagctcaaagagtccgtgggggaaaaggcccacaaagagaagcccaaccagccagcccccaggccgccccgccagggacccaccaatgaggcacagatggcagccgctgctgccctagcccggctggagcagaagcagtcccgggcctggggccccacatcgcaggacaccatccgaaaccaggtgagaaaggaacttcaagccgaagccaccgtcagcgggagccccgaggccccagggaccaacgtggtatctgagcccagagaggaaggctctgcccacctggctgtgcctggcgtgtacttcacctgtccgctcactggggccaccctgaggaaggaccagcgggacgcctgcatcaaggaggccattctcttgcacttctccaccgacccagtggccgcctccatcatgaagatctacacgttcaacaaagaccaggtacttggcaatggtgtccacacccagcttcacccgtcctgtctttgtgaacgtggggacctctagacaccacacaa

SEQ ID NO: 71836 - DNA, 756 bp, Homo sapiens
cccaatacacacgcacgtcgccaactagcgtaggtagagccctgggtgtgtatcaggcagaggcctgccccgcggccccccgccgccgggccagccgccaccatgaagaaattctttcaggagttcaaggccgacatcaagttcaagagcgcgggacccggtcagaagctcaaagagtccgtgggggaaaaggcccacaaagagaagcccaaccagccagcccccaggccgccccgccagggacccaccaatgaggcacagatggcagccgctgctgccctagcccggctggagcagaagcagtcccgggcctggggccccacatcgcaggacaccatccgaaaccaggtgagaaaggaacttcaagccgaagccaccgtcagcgggagccccgaggccccagggaccaacgtggtatctgagcccagagaggaaggctctgcccacctggctgtgcctggcgtgtacttcacctgtccgctcactggggccaccctgaggaaggaccagcgggacgcctgcatcaaggaggccattctcttgcacttctccaccgacccagtggccgcctccatcatgaagatctacacgttcaacaaagaccaggaccgggtgaagctgggtgtggacaccattgccaagtacctggacaacatccacctgcaccccgaggaggagaagtaccggaagatcaagctgcacatagacctgcagttagtaaatcataagcccaaataaacaggttgtttgaatata

SEQ ID NO: 71837 - DNA, 463 bp, Homo sapiens
gggcaggacttgcccgatggtgcagagctgagtggaaccagcatctccttcctccaggggctcttccgcctgcagtagaaccatctggtggctgcaggtggcccctgggaaccaggtgtcctggcccacataggcagggacacgtctggctgatggtgctggggaggggcagaagctcctctgtgtgactgcacgtcagctttgccggccacctcgggaggatacactcactctccctcggtctgttcccagggaaaaggcccacaaagagaagcccaaccagccagcccccaggccgccccgccagggacccaccaatgaggcacagatggcatggctgcacctggcactagggctgctctgtggatgtgggtgacaacggcaggaggggatgctggccttcctgcacatagacctgcagttagtaaatcataagcccaaataaacaggttgtttgaatata

SEQ ID NO: 71838 - DNA, 1813 bp, Homo sapiens
ggagtatagggcttgaactgagagcctggcctcccagaaggttttaatagacctacggcacagaaattgacacagcccggaaaaggcccacaaagagaagcccaaccagccagcccccaggccgccccgccagggacccaccaatgaggcacagatggcagccgctgctgccctagcccggctggagcagaagcagtcccgggcctggggccccacatcgcaggacaccatccgaaaccaggtgagaaaggaacttcaagccgaagccaccgtcagcgggagccccgaggccccagggaccaacgtggtatctgagcccagagaggaaggctctgcccacctggctgtgcctggcgtgtacttcacctgtccgctcactggggccaccctgaggaaggaccagcgggacgcctgcatcaaggaggccattctcttgcacttctccaccgacccagtggccgcctccatcatgaagatctacacgttcaacaaagaccaggaccgggtgaagctgggtgtggacaccattgccaagtacctggacaacatccacctgcaccccgaggaggagaagtaccggaagatcaagctgcagaacaaggtgtttcaggagcgcattaactgcctggaagggacccacgagttttttgaggccattgggttccagaaggtgttgcttcccgcccaggatcaggaggaccccgaggagttctacgtgctgagcgagaccaccttggcccagccccagagcctggagaggcacaaggaacagctgctggctgcggagcccgtgcgcgccaagctggacaggcagcgccgcgtcttccagccctcgcccctggcctcgcagttcgaactgcctggggacttcttcaacctcacagcagaggagatcaagcgggagcagaggctcaggtccgaggcggtggagcggctgagcgtgctgcggaccaaggccatgcgggagaaggaggagcagcgggggctgcgcaagtacaactacacgctgctgcgcgtgcgcctccccgatggctgcctcctgcagggcactttctacgctcgggagcggctgggggcggtgtacgggttcgtccgggaggccctgcagagcgactggctgccttttgagctgctggcctcgggagggcagaagctgtccgaggacgagaacctggccttgaacgagtgcgggctggtgccctctgccctcctgaccttctcgtgggacatggctgtgctggaggacatcaaggccgcgggggccgagccggactccatcctgaaacccgagctcctgtcagccatcgagaagctcttgtgaaataaaagcagggttggcctcagccctgtgggtctgtctcatgctctccctgttcctctccccgccaccccagggcctccaagccacctctggaaatacttggctctgccccatgggcacgggaggggcgccagccgtggagctgtggaattgggccccgtggcagagcccccatcccttgggggctgtggggatgcgcccaagcccccgagggagaggcctggggacaccaacaaatctaagccctccctagctgcttggtaactgtgtcatgaagctgccggacagacacacgtggcatctccctgggcaggagagcaggcctgcagcatgggtcctgttcccgtgtgccgtgggtggcagtggctgcacctggcactagggctgctctgtggatgtgggtgacaacggcaggaggggatgctggccttcctgcacatagacctgcagttagtaaatcataagcccaaataaacaggttgtttgaatata

SEQ ID NO: 71839 - DNA, 1340 bp, Homo sapiens
  misc_feature (1057)..(1057): n is a, c, g, or t
cacccgccctcatctgggcagcccagggaggtgcgggtggcagccctgcttcccaggccatgggtggctctctgggtgtggccgtgtgtgatggctgtgccgagcgtggatttgtgccccaatcttttccaggtcttagggtacgtactgttctcagcctctccatgctgggacgctgttcgcagtcagcagggctggttctgggaaacccccagagttccagctatgacttctcccctcccccggtaacataggtggataggtgggacctcggggaggggcaggggctgggggtatccgtcttccagctattgagtttcagacattgagggttgcagactcatttgtgtcctctctgccacctgccatccctgtgaccctggacgatgggcctctcggtctctttgtaaacatgaggcccgggagtggttccagaacgtccatcatggggctgcgagagcaggagggatggggcgtccatggtggcgggaggttctgtaagtggcggtggccttgatggatctcagcactgaggtcgagttctaaagccagagtgtgaggcacagttctgtcgcgtcacactggcttccaagtcccatggatctagccttgagaaggcggaaggggagacttgagttctgctgggtcttggctgcgtcgcctctgccctggggcgtgggcagggctgcggtcttggagggtctctcttttcctttctgtgatgagcgcacagctggggccgctccaagccgctgttctgccttccttttcctgcccctgttacctgggcagcggagggccgtgcggcccgggctctcagtgagtggctttccctgcttccctcctcccagcacttctccaccgacccagtggccgcctccatcatgaagatctacacgttcaacaaagaccaggaccgggtgaagctgggtgtggacaccattgccaagtacctggacaacatccacctgcaccccgaggaggagaagtaccggaagatcaagctgcagaacaaggtgtttcaggagcgcataacgtgctggaaggaccacgagtntttgggggcatgggtccagaagggtgcttccgccagatcaggagacccggagaagtctacgtgccgagtagaacaccttggccagcagaggctggagaggccagacacgtgggtgcggaccggggccaaggagggaggccggttcaacccgcctggccggggagcggggattcaccagagagaaaggcgcaagccgccccgggggggcccggacacacgaaagagggggcaccaccgggcccgccgagaacgggggggggcgcccccccgcgggcggggacgg

SEQ ID NO: 71840 - DNA, 1207 bp, Homo sapiens
taccgttaaacgctgaactatgtgtgggacccacgagttttttgaggccattgggttccagaaggtgttgcttcccgcccaggatcaggaggaccccgaggagttctacgtgctgagcgagaccaccttggcccagccccagagcctggagaggcacaaggaacagctgctggctgcggagcccgtgcgcgccaagctggacaggcagcgccgcgtcttccagccctcgcccctggcctcgcagttcgaactgcctggggacttcttcaacctcacagcagaggagatcaagcgggagcagaggctcaggtccgaggcggtggagcggctgagcgtgctgcggaccaaggccatgcgggagaaggaggagcagcgggggctgcgcaagtacaactacacgctgctgcgcgtgcgcctccccgatggctgcctcctgcagggcactttctacgctcgggagcggctgggggcggtgtacgggttcgtccgggaggccctgcagagcgactggctgccttttgagctgctggcctcgggagggcagaagctgtccgaggacgagaacctggccttgaacgagtgcgggctggtgccctctgccctcctgaccttctcgtgggacatggctgtgctggaggacatcaaggccgcgggggccgagccggactccatcctgaaacccgagctcctgtcagccatcgagaagctcttgtgaaataaaagcagggttggcctcagccctgtgggtctgtctcatgctctccctgttcctctccccgccaccccagggcctccaagccacctctggaaatacttggctctgccccatgggcacgggaggggcgccagccgtggagctgtggaattgggccccgtggcagagcccccatcccttgggggctgtggggatgcgcccaagcccccgagggagaggcctggggacaccaacaaatctaagccctccctagctgcttggtaactgtgtcatgaagctgccggacagacacacgtggcatctccctgggcaggagagcaggcctgcagcatgggtcctgttcccgtgtgccgtgggtggcagtggctgcacctggcactagggctgctctgtggatgtgggtgacaacggcaggaggggatgctggccttcctgcacatagacctgcagttagtaaatcataagcccaaataaacaggttgtttgaatata

SEQ ID NO: 71841 - DNA, 796 bp, Homo sapiens
cggacgcggtgggtcgacccacgcgtcgcgcactttctacgctcgggagcggctgggggcggtgtacgggttcgtccgggaggccctgcagagcgactggctgccttttgagctgctggcctcgggagggcagaagctgtccgaggacgagaacctggccttgaacgagtgcgggctggtgccctctgccctcctgaccttctcgtgggacatggctgtgctggaggacatcaaggccgcgggggccgagccggactccatcctgaaacccgagctcctgtcagccatcgagaagctcttgtgaaataaaagcagggttggcctcagccctgtgggtctgtctcatgctctccctgttcctctccccgccaccccagggcctccaagccacctctggaaatacttggctctgccccatgggcacgggaggggcgccagccgtggagctgtggaattgggccccgtggcagagcccccatcccttgggggctgtggggatgcgcccaagcccccgagggagaggcctggggacaccaacaaatctaagccctccctagctgcttggtaactgtgtcatgaagctgccggacagacacacgtggcatctccctgggcaggagagcaggcctgcagcatgggtcctgttcccgtgtgccgtgggtggcagtggctgcacctggcactagggctgctctgtggatgtgggtgacaacggcaggaggggatgctggccttcctgcacatagacctgcagttagtaaatcataagcccaaataaacaggttgtttgaatata

SEQ ID NO: 71842 - DNA, 752 bp, Homo sapiens
ttttttcttccggtggctggtctccggcggccccgtccccgactgggccccgtgcccccccgcccccgcggccccccgccgccgggccagccgccaccatgaagaaattctttcaggagttcaaggccgacatcaagttcaagagcgcgggacccggtcagaagctcaaagagtccgtgggggaaaaggcccacaaagagaagcccaaccagccagcccccaggccgccccgccagggacccaccaatgaggcacagatggcagccgctgctgccctagcccggctggagcagaagcagtcccgggcctggggccccacatcgcaggacaccatccgaaaccaggtgagaaaggaacttcaagccgaagccaccgtcagcgggagccccgaggccccagggaccaacgtggtatctgagcccagagaggaaggctctgcccacctggctgtgcctggcgtgtacttcacctgtccgctcactggggccaccctgaggaaggaccagcgggacgcctgcatcaaggaggccattctcttgcacttctccaccgacccagtggccgcctccatcatgaagatctacacgttcaacaaagaccaggaccgggtgaagctgggtgtggacaccattgccaagtacctggacaacatccacctgcaccccgaggaggagaagtaccggaagatcaagctgcacatagacctgcagttagtaaatcataagcccaaataaacaggttgtttgaatata

SEQ ID NO: 71843 - DNA, 676 bp, Homo sapiens
ttttttcttccggtggctggtctccggcggccccgtccccgactgggccccgtgcccccccgcccccgcggccccccgccgccgggccagccgccaccatgaagaaattctttcaggagttcaaggccgacatcaagttcaagagcgcgggacccggtcagaagctcaaagagtccgtgggggaaaaggcccacaaagagaagcccaaccagccagcccccaggccgccccgccagggacccaccaatgaggcacagatggcagccgctgctgccctagcccggctggagcagaagcagtcccgggcctggggccccacatcgcaggacaccatccgaaaccaggtgagaaaggaacttcaagccgaagccaccgtcagcgggagccccgaggccccagggaccaacgtgacaccaacaaatctaagccctccctagctgcttggtaactgtgtcatgaagctgccggacagacacacgtggcatctccctgggcaggagagcaggcctgcagcatgggtcctgttcccgtgtgccgtgggtggcagtggctgcacctggcactagggctgctctgtggatgtgggtgacaacggcaggaggggatgctggccttcctgcacatagacctgcagttagtaaatcataagcccaaataaacaggttgtttgaatata

SEQ ID NO: 71844 - DNA, 335 bp, Homo sapiens
caggttgcccgctgagttccctgccgcggcaagggccgactctcggtctcagagtgacggcctacccctaccgcaggtgccctctgccctcctgaccttctcgtgggacatggctgtgctggaggacatcaaggccgcgggggccgagccggactccatcctgaaacccgagctcctgtcagccatcgagaagctcttgtgaaataaaagcagggttggcctcagccctgtgggtctgtctcatgctctccctgttcctctccccgccaccccagggcctccaagccacctctggaaatacttggctctgccccatgggcacgggaggggcgcca

SEQ ID NO: 71845 - DNA, 574 bp, Homo sapiens
aacagaagaagccatttagattttacagaaatgtagctcctcatacattatattgttcctatgaagaattagattgaataaagctgctttgaataaagctcgtattaccagctaccacatgtgatggaaagaatccaagttaaacactctcaccagagcatgctccaagacagatgactgagccccaggcttggccaatacaatgcacttctattctctatttatttttgtagttcaaagacctggcagtaacccacttgatgcctgccataaggaccagtacactcctgattactgcccagcgattttatatctgtatgccagctactcagaccacgtataaagactagggggattttttgaaaggaaaagaaaccccggcttccacttatactttgaaatttcagatgatgtactgccaacttacagaccttgctttaatcagcagccacatgaaaaggctgtttctatttactctaggtcatttaggaaacaagcaataagtaggccttgcaaaatttcagcttctcttaaagttggcatgttttcctcaaatagagagttgaatcttgat

SEQ ID NO: 71846 - DNA, 2879 bp, Homo sapiens
tttccgtgttcggggttgtatccgtgttcggggttcccaacaacaatggcaacctccagagctcgcccgacaggcacagccagcaccgcttccaaagagccgctgaccacgagcctggcgccaacactcacgagcgagctgtccacctctcaggccgagaccagcacgcccaggacagagacgacaatgagccccttgactaacaccaccaccagccagggcacgacccgctgtcaaccgaagtgtgagtggacagagtggtttgacgtggacttcccaacctcagggttgcaggcggggacatggaaacttttgaaaacatcagggctgctgggggcaagatgtgctgggcaccaaagagcatagagtgccgggcggagaactaccccgaggtaagcatcgaccaggtcgggcaggtgctgacctgcagcctggagacggggctgacctgcaagaacgaagaccagacaggcaggttcaacatgtgcttcaactacaacgtgcgtgtgctttgctgtgacgactacagccactgccccagtaccccagccaccagctccacggccacgccctcctcaactccggggacgacctggatcctcacaaagccgaccacaacagccactacgactgcgtccactggatccacggccaccccgacctccaccctgagaacagctccccctcccaaagtgctgaccaccacggccaccacacccacagtcaccagctccaaagccactccctcctccagtccagggactgcaaccgcccttccagcactgagaagcacagccaccacacccacagctaccagcgttacacccatcccctcttcctccctgggcaccacctggacccgcctatcacagaccaccacacccacggccaccatgtccacagccacaccctcctccactccagagactgcccacacctccacagtgcttaccaccacggccaccacaactggggccaccggctctgtggccaccccctcctccaccccaggaacagctcacactaccaaagtgccaactaccacaaccacgggcttcacagccaccccctcctccagcccagggacggcactcacgcctccagtgtggatcagcacaaccaccacacccacaaccagaggctccacggtgaccccctcctccatcccggggaccacccacaccgccacagtgctgaccaccaccaccacaactgtggccactggttctatggcaacaccctcctctagcacacagaccagtggtactcccccatcactgaccaccacggccactacgatcacggccaccggctccaccaccaacccctcctcaactcctgggacaactcccatccccccagtgctgaccaccaccgccaccacacctgcagccaccagcaacacagtgactccctcctctgccctagggaccacccacacacccccagtgccgaacaccacggccaccacacacgggcgatccctgccccccagcagtccccacacggtgcgcacagcctggacttcggccacctcgggcatcttgggcaccacccacatcacagagccttccacggtgacttcccacaccctagcagcaaccaccggtaccacccagcactcgactccagccctttccagccctcaccctagcagcagaaccaccgagtcacccccttctccagggacgaccaccccgggccacaccacggccacctccaggaccacagccacggccacacccagcaagacccgcacctcgaccctgctgcccagcagccccacatcggcccccataaccacggtggtgaccatgggctgtgagccccagtgtgcctggtcagagtggctggactacagctaccccatgccggggccctctggcggggactttgacacctactccaacatccgtgcggccggaggggccgtctgtgagcagcccctgggcctcgagtgccgtgcccaggcccagcctggtgtccccctgcgggagttgggccaggtcgtggaatgcagcctggactttggcctggtctgcaggaaccgtgagcaggtggggaagttcaagatgtgcttcaactatgaaatccgtgtgttctgctgcaactacggccactgccccagcaccccggccaccagctctacggccatgccctcctccactccggggacgacctggatcctcacagagctgaccacaacagccactacgactgagtccactggatccacggccaccccgtcctccaccccagggaccacctggatcctcacagagccgagcactacagccaccgtgacggtgcccaccggatccacggccaccgcctcctccacccaggcaactgctggcaccccacatgtgagcaccacggccacgacacccacagtcaccagctccaaagccactcccttctccagtccagggactgcaaccgcccttccagcactgagaagcacagccaccacacccacagctaccagctttacagccatcccctcctcctccctgggcaccacctggacccgcctatcacagaccaccacacccacggccaccatgtccacagccacaccctcctccactccagagactgtccacacctccacagtgcttaccaccacggccaccacaaccggggccaccggctctgtggccaccccctcctccaccccaggaacagctcacactaccaaagtgctgactaccacaaccacgggcttcacagccaccccctcctccagcccagggacggcacgcacgcttccagtgtggatcagcacaaccaccacacccacaaccagaggttccacggtgacccccacagtgctgggactacgggcatgagccaccacacccatcataaattaaaac

SEQ ID NO: 71847 - DNA, 2658 bp, Homo sapiens
cgaggtcgctctgaggatcccctggacgtggacagagtggtttgacgtggacttcccaacctcagggttgcaggcggggacatggaaacttttgaaaacatcagggctgctgggggcaagatgtgctgggcaccaaagagcatagagtgccgggcggagaactaccccgaggtaagcatcgaccaggtcgggcaggtgctgacctgcagcctggagacggggctgacctgcaagaacgaagaccagacaggcaggttcaacatgtgcttcaactacaacgtgcgtgtgctttgctgtgacgactacagccactgccccagtaccccagccaccagctccacggccacgccctcctcaactccggggacgacctggatcctcacaaagccgaccacaacagccactacgactgcgtccactggatccacggccaccccgacctccaccctgagaacagctccccctcccaaagtgctgaccaccacggccaccacacccacagtcaccagctccaaagccactccctcctccagtccagggactgcaaccgcccttccagcactgagaagcacagccaccacacccacagctaccagcgttacacccatcccctcttcctccctgggcaccacctggacccgcctatcacagaccaccacacccacggccaccatgtccacagccacaccctcctccactccagagactgcccacacctccacagtgcttaccaccacggccaccacaactggggccaccggctctgtggccaccccctcctccaccccaggaacagctcacactaccaaagtgccaactaccacaaccacgggcttcacagccaccccctcctccagcccagggacggcactcacgcctccagtgtggatcagcacaaccaccacacccacaaccagaggctccacggtgaccccctcctccatcccggggaccacccacaccgccacagtgctgaccaccaccaccacaactgtggccactggttctatggcaacaccctcctctagcacacagaccagtggtactcccccatcactgaccaccacggccactacgatcacggccaccggctccaccaccaacccctcctcaactcctgggacaactcccatccccccagtgctgaccaccaccgccaccacacctgcagccaccagcaacacagtgactccctcctctgccctagggaccacccacacacccccagtgccgaacaccacggccaccacacacgggcgatccctgccccccagcagtccccacacggtgcgcacagcctggacttcggccacctcgggcatcttgggcaccacccacatcacagagccttccacggtgacttcccacaccctagcagcaaccaccggtaccacccagcactcgactccagccctttccagccctcaccctagcagcagaaccaccgagtcacccccttctccagggacgaccaccccgggccacaccacggccacctccaggaccacagccacggccacacccagcaagacccgcacctcgaccctgctgcccagcagccccacatcggcccccataaccacggtggtgaccatgggctgtgagccccagtgtgcctggtcagagtggctggactacagctaccccatgccggggccctctggcggggactttgacacctactccaacatccgtgcggccggaggggccgtctgtgagcagcccctgggcctcgagtgccgtgcccaggcccagcctggtgtccccctgcgggagttgggccaggtcgtggaatgcagcctggactttggcctggtctgcaggaaccgtgagcaggtggggaagttcaagatgtgcttcaactatgaaatccgtgtgttctgctgcaactacggccactgccccagcaccccggccaccagctctacggccatgccctcctccactccggggacgacctggatcctcacagagctgaccacaacagccactacgactgagtccactggatccacggccaccccgtcctccaccccagggaccacctggatcctcacagagccgagcactacagccaccgtgacggtgcccaccggatccacggccaccgcctcctccacccaggcaactgctggcaccccacatgtgagcaccacggccacgacacccacagtcaccagctccaaagccactcccttctccagtccagggactgcaaccgcccttccagcactgagaagcacagccaccacacccacagctaccagctttacagccatcccctcctcctccctgggcaccacctggacccgcctatcacagaccaccacacccacggccaccatgtccacagccacaccctcctccactccagagactgtccacacctccacagtgcttaccaccacggccaccacaaccggggccaccggctctgtggccaccccctcctccaccccaggaacagctcacactaccaaagtgctgactaccacaaccacgggcttcacagccaccccctcctccagcccagggacggcacgcacgcttccagtgtggatcagcacaaccaccacacccacaaccagaggttccacggtgacccccacagtgctgggactacgggcatgagccaccacacccatcataaattaaaac

SEQ ID NO: 71848 - DNA, 2220 bp, Homo sapiens
gcggcgactctaaggatcccgatcacgtgcattgtgctgaccaccacggccaccacacccacagtcaccagctccaaagccactccctcctccagtccagggactgcaaccgcccttccagcactgagaagcacagccaccacacccacagctaccagcgttacacccatcccctcttcctccctgggcaccacctggacccgcctatcacagaccaccacacccacggccaccatgtccacagccacaccctcctccactccagagactgcccacacctccacagtgcttaccaccacggccaccacaactggggccaccggctctgtggccaccccctcctccaccccaggaacagctcacactaccaaagtgccaactaccacaaccacgggcttcacagccaccccctcctccagcccagggacggcactcacgcctccagtgtggatcagcacaaccaccacacccacaaccagaggctccacggtgaccccctcctccatcccggggaccacccacaccgccacagtgctgaccaccaccaccacaactgtggccactggttctatggcaacaccctcctctagcacacagaccagtggtactcccccatcactgaccaccacggccactacgatcacggccaccggctccaccaccaacccctcctcaactcctgggacaactcccatccccccagtgctgaccaccaccgccaccacacctgcagccaccagcaacacagtgactccctcctctgccctagggaccacccacacacccccagtgccgaacaccacggccaccacacacgggcgatccctgccccccagcagtccccacacggtgcgcacagcctggacttcggccacctcgggcatcttgggcaccacccacatcacagagccttccacggtgacttcccacaccctagcagcaaccaccggtaccacccagcactcgactccagccctttccagccctcaccctagcagcagaaccaccgagtcacccccttctccagggacgaccaccccgggccacaccacggccacctccaggaccacagccacggccacacccagcaagacccgcacctcgaccctgctgcccagcagccccacatcggcccccataaccacggtggtgaccatgggctgtgagccccagtgtgcctggtcagagtggctggactacagctaccccatgccggggccctctggcggggactttgacacctactccaacatccgtgcggccggaggggccgtctgtgagcagcccctgggcctcgagtgccgtgcccaggcccagcctggtgtccccctgcgggagttgggccaggtcgtggaatgcagcctggactttggcctggtctgcaggaaccgtgagcaggtggggaagttcaagatgtgcttcaactatgaaatccgtgtgttctgctgcaactacggccactgccccagcaccccggccaccagctctacggccatgccctcctccactccggggacgacctggatcctcacagagctgaccacaacagccactacgactgagtccactggatccacggccaccccgtcctccaccccagggaccacctggatcctcacagagccgagcactacagccaccgtgacggtgcccaccggatccacggccaccgcctcctccacccaggcaactgctggcaccccacatgtgagcaccacggccacgacacccacagtcaccagctccaaagccactcccttctccagtccagggactgcaaccgcccttccagcactgagaagcacagccaccacacccacagctaccagctttacagccatcccctcctcctccctgggcaccacctggacccgcctatcacagaccaccacacccacggccaccatgtccacagccacaccctcctccactccagagactgtccacacctccacagtgcttaccaccacggccaccacaaccggggccaccggctctgtggccaccccctcctccaccccaggaacagctcacactaccaaagtgctgactaccacaaccacgggcttcacagccaccccctcctccagcccagggacggcacgcacgcttccagtgtggatcagcacaaccaccacacccacaaccagaggttccacggtgacccccacagtgctgggactacgggcatgagccaccacacccatcataaattaaaac

SEQ ID NO: 71849 - DNA, 783 bp, Homo sapiens
acctggcgaccgttacacagagaaaacagctataactctgtcacgagaaaaaccggcaggcctttttcacacagaaaaacgacctggatcctcacagagctgaccacaacagccactacgactgagtccactggatccacggccaccccgtcctccaccccagggaccacctggatcctcacagagccgagcactacagccaccgtgacggtgcccaccggatccacggccaccgcctcctccacccaggcaactgctggcaccccacatgtgagcaccacggccacgacacccacagtcaccagctccaaagccactcccttctccagtccagggactgcaaccgcccttccagcactgagaagcacagccaccacacccacagctaccagctttacagccatcccctcctcctccctgggcaccacctggacccgcctatcacagaccaccacacccacggccaccatgtccacagccacaccctcctccactccagagactgtccacacctccacagtgcttaccaccacggccaccacaaccggggccaccggctctgtggccaccccctcctccaccccaggaacagctcacactaccaaagtgctgactaccacaaccacgggcttcacagccaccccctcctccagcccagggacggcacgcacgcttccagtgtggatcagcacaaccaccacacccacaaccagaggttccacggtgacccccacagtgctgggactacgggcatgagccaccacacccatcataaattaaaac

SEQ ID NO: 71850 - DNA, 2791 bp, Homo sapiens
tttccgtgttcggggttgtatccgtgttcggggttcccaacaacaatggcaacctccagagctcgcccgacaggcacagccagcaccgcttccaaagagccgctgaccacgagcctggcgccaacactcacgagcgagctgtccacctctcaggccgagaccagcacgcccaggacagagacgacaatgagccccttgactaacaccaccaccagccagggcacgacccgctgtcaaccgaagtgtgagtggacagagtggtttgacgtggacttcccaacctcagggttgcaggcggggacatggaaacttttgaaaacatcagggctgctgggggcaagatgtgctgggcaccaaagagcatagagtgccgggcggagaactaccccgaggtaagcatcgaccaggtcgggcaggtgctgacctgcagcctggagacggggctgacctgcaagaacgaagaccagacaggcaggttcaacatgtgcttcaactacaacgtgcgtgtgctttgctgtgacgactacagccactgccccagtaccccagccaccagctccacggccacgccctcctcaactccggggacgacctggatcctcacaaagccgaccacaacagccactacgactgcgtccactggatccacggccaccccgacctccaccctgagaacagctccccctcccaaagtgctgaccaccacggccaccacacccacagtcaccagctccaaagccactccctcctccagtccagggactgcaaccgcccttccagcactgagaagcacagccaccacacccacagctaccagcgttacacccatcccctcttcctccctgggcaccacctggacccgcctatcacagaccaccacacccacggccaccatgtccacagccacaccctcctccactccagagactgcccacacctccacagtgcttaccaccacggccaccacaactggggccaccggctctgtggccaccccctcctccaccccaggaacagctcacactaccaaagtgccaactaccacaaccacgggcttcacagccaccccctcctccagcccagggacggcactcacgcctccagtgtggatcagcacaaccaccacacccacaaccagaggctccacggtgaccccctcctccatcccggggaccacccacaccgccacagtgctgaccaccaccaccacaactgtggccactggttctatggcaacaccctcctctagcacacagaccagtggtactcccccatcactgaccaccacggccactacgatcacggccaccggctccaccaccaacccctcctcaactcctgggacaactcccatccccccagtgctgaccaccaccgccaccacacctgcagccaccagcaacacagtgactccctcctctgccctagggaccacccacacacccccagtgccgaacaccacggccaccacacacgggcgatccctgccccccagcagtccccacacggtgcgcacagcctggacttcggccacctcgggcatcttgggcaccacccacatcacagagccttccacggtgacttcccacaccctagcagcaaccaccggtaccacccagcactcgactccagccctttccagccctcaccctagcagcagaaccaccgagtcacccccttctccagggacgaccaccccgggccacaccacggccacctccaggaccacagccacggccacacccagcaagacccgcacctcgaccctgctgcccagcagccccacatcggcccccataaccacggtggtgaccatgggctgtgagccccagtgtgcctggtcagagtggctggactacagctaccccatgccggggccctctggcggggactttgacacctactccaacatccgtgcggccggaggggccgtctgtgagcagcccctgggcctcgagtgccgtgcccaggcccagcctggtgtccccctgcgggagttgggccaggtcgtggaatgcagcctggactttggcctggtctgcaggaaccgtgagcaggtggggaagttcaagatgtgcttcaactatgaaatccgtgtgttctgctgcaactacggccactgccccagcaccccggccaccagctctacggccatgccctcctccactccggggacgacctggatcctcacagagctgaccacaacagccactacgactgagtccactggatccacggccaccccgtcctccaccccagaactgctggcaccccacatgtgagcaccacggccacgacacccacagtcaccagctccaaagccactcccttctccagtccagggactgcaaccgcccttccagcactgagaagcacagccaccacacccacagctaccagctttacagccatcccctcctcctccctgggcaccacctggacccgcctatcacagaccaccacacccacggccaccatgtccacagccacaccctcctccactccagagactgtccacacctccacagtgcttaccaccacggccaccacaaccggggccaccggctctgtggccaccccctcctccaccccaggaacagctcacactaccaaagtgctgactaccacaaccacgggcttcacagccaccccctcctccagcccagggacggcacgcacgcttccagtgtggatcagcacaaccaccacacccacaaccagaggttccacggtgacccccacagtgctgggactacgggcatgagccaccacacccatcataaattaaaac

SEQ ID NO: 71851 - DNA, 996 bp, Homo sapiens
acagcgatatgacaccttacgtgaaaattcgttcgcgtattcacgccgacatgatagcagcccctgggcctcgagtgccgtgcccaggcccagcctggtgtccccctgcgggagttgggccaggtcgtggaatgcagcctggactttggcctggtctgcaggaaccgtgagcaggtggggaagttcaagatgtgcttcaactatgaaatccgtgtgttctgctgcaactacggccactgccccagcaccccggccaccagctctacggccatgccctcctccactccggggacgacctggatcctcacagagctgaccacaacagccactacgactgagtccactggatccacggccaccccgtcctccaccccagggaccacctggatcctcacagagccgagcactacagccaccgtgacggtgcccaccggatccacggccaccgcctcctccacccaggcaactgctggcaccccacatgtgagcaccacggccacgacacccacagtcaccagctccaaagccactcccttctccagtccagggactgcaaccgcccttccagcactgagaagcacagccaccacacccacagctaccagctttacagccatcccctcctcctccctgggcaccacctggacccgcctatcacagaccaccacacccacggccaccatgtccacagccacaccctcctccactccagagactgtccacacctccacagtgcttaccaccacggccaccacaaccggggccaccggctctgtggccaccccctcctccaccccaggaacagctcacactaccaaagtgctgactaccacaaccacgggcttcacagccaccccctcctccagcccagggacggcacgcacgcttccagtgtggatcagcacaaccaccacacccacaaccagaggttccacggtgacccccacagtgctgggactacgggcatgagccaccacacccatcataaattaaaac

SEQ ID NO: 71852 - DNA, 1460 bp, Homo sapiens
  misc_feature (2)..(2): n is a, c, g, or t
  misc_feature (4)..(4): n is a, c, g, or t
gncnctatgctcccggggacattctaaccgccgccaggtcccgccgcctctcgccccgctattaataccggcggcccgggaggggggcgcagcacgcgccgcgcagccatggggaggctgctggccttagtggtcggcgcggcactggtgtcctcagcctgcgggggctgcgtggaggtggactcggagaccgaggccgtgtatgggatgaccttcaaaattctttgcatctcctgcaagcgccgcagcgagaccaacgctgagaccttcaccgagtggaccttccgccagaagggcactgaggagtttgtcaagatcctgcgctatgagaatgaggtgttgcagctggaggaggatgagcgcttcgagggccgcgtggtgtggaatggcagccggggcaccaaagacctgcaggatctgtctatcttcatcaccaatgtcacctacaaccactcgggcgactacgagtgccacgtctaccgcctgctcttcttcgaaaactacgagcacaacaccagcgtcgtcaagaagatccacattgaggtagtggacaaagccaacagagacatggcatccatcgtgtctgagatcatgatgtatgtgctcattgtggtgttgaccatatggctcgtggcagagatgatttactgctacaagaagatcgctgccgccacggagactgctgcacaggagaatgcctcggaatacctggccatcacctctgaaagcaaagagaactgcacgggcgtccaggtggccgaatagccctggccctgggccccgcctcaaggaagagccagccgtaatggggactctccaggcaccgcctgcccccagcgtgggggtggccactcctgggccccagaaagcctcagagtcctgccgacggagccactggggtgggagggggcagggggcttggctcgcacccccactttcgcctcctccagctcctgccccgccggccgcgcaccgccatgcatgatgggtaaagcaatactgccgctgcccccaccctgcttctgctgcctgtttggggaggggggcggtgaggtgggggcagcggccccgcacccctcctccttgctgatttgcacacattggccgcttcagacacgcacttctggggccagcccctccccgcctcctccctgcctggcggcaggggtcgcgatgatgggctggagcagtttggggcagggggttctgggacccactccgactccccctccccggcatcatttcccctcccgcttcctccggctggacctggggtcccccctccctgtaatgcactcctgccccggcccaacctcgccctctctcaccagccttgaactgtggccacctagaaaggggcccattcagcctcgtctctttacagaagtagttttgttcatgaaataaagactcttggacttgaaaaaagaaaaacatacccatttaaacacatgccttgg

SEQ ID NO: 71853 - DNA, 1394 bp, Homo sapiens
  misc_feature (2)..(2): n is a, c, g, or t
  misc_feature (4)..(4): n is a, c, g, or t
gncnctatgctcccggggacattctaaccgccgccaggtcccgccgcctctcgccccgctattaataccggcggcccgggaggggggcgcagcacgcgccgcgcagccatggggaggctgctggccttagtggtcggcgcggcactggtgtcctcagcctgcgggggctgcgtggaggtggactcggagaccgaggccgtgtatgggatgaccttcaaaattctttgcatctcctgcaagcgccgcagcgagaccaacgctgagaccttcaccgagtggaccttccgccagaagggcactgaggagtttgtcaagatcctgcgctatgagaatgaggtgttgcagctggaggaggatgagcgcttcgagggccgcgtggtgtggaatggcagccggggcaccaaagacctgcaggatctgtctatcttcatcaccaatgtcacctacaaccactcgggcgactacgagtgccacgtctaccgcctgctcttcttcgaaaactacgagcacaacaccagcgtcgtcaagaagatccacattgaggtagtggacaaagccaacagagacatggcatccatcgtgtctgagatcatgatgtatgtgctcattgtggtgttgaccatatggctcgtggcagagatgatttactgctacaagaagatcgctgccgccacggagactgctgcacaggagaatgcctcggaatacctggccatcacctctgaaagcaaagagaactgcacgggcgtccaggtggccgaatagccctggccctgggccccgcctcaaggaagagccagccgtaatggggactctccaggcaccgcctgcccccagcgtgggggtggccactcctgggccccagaaagcctcagagtcctgccgacggagccactggggtgggagggggcagggggcttggctcgcacccccactttcgcctcctccagctcctgccccgccggccgcgcaccgccatgcatgatgggtaaagcagcggccccgcacccctcctccttgctgatttgcacacattggccgcttcagacacgcacttctggggccagcccctccccgcctcctccctgcctggcggcaggggtcgcgatgatgggctggagcagtttggggcagggggttctgggacccactccgactccccctccccggcatcatttcccctcccgcttcctccggctggacctggggtcccccctccctgtaatgcactcctgccccggcccaacctcgccctctctcaccagccttgaactgtggccacctagaaaggggcccattcagcctcgtctctttacagaagtagttttgttcatgaaataaagactcttggacttgaaaaaagaaaaacatacccatttaaacacatgccttgg

SEQ ID NO: 71854 - DNA, 1360 bp, Homo sapiens
  misc_feature (2)..(2): n is a, c, g, or t
  misc_feature (4)..(4): n is a, c, g, or t
gncnctatgctcccggggacattctaaccgccgccaggtcccgccgcctctcgccccgctattaataccggcggcccgggaggggggcgcagcacgcgccgcgcagccatggggaggctgctggccttagtggtcggcgcggcactggtgtcctcagcctgcgggggctgcgtggaggtggactcggagaccgaggccgtgtatgggatgaccttcaaaattctttgcatctcctgcaagcgccgcagcgagaccaacgctgagaccttcaccgagtggaccttccgccagaagggcactgaggagtttgtcaagatcctgcgctatgagaatgaggtgttgcagctggaggaggatgagcgcttcgagggccgcgtggtgtggaatggcagccggggcaccaaagacctgcaggatctgtctatcttcatcaccaatgtcacctacaaccactcgggcgactacgagtgccacgtctaccgcctgctcttcttcgaaaactacgagcacaacaccagcgtcgtcaagaagatccacattgaggtagtggacaaagccaacagagacatggcatccatcgtgtctgagatcatgatgtatgtgctcattgtggtgttgaccatatggctcgtggcagagatgatttactgctacaagaagatcgctgccgccacggagactgctgcacaggagaatgcctcggaatacctggccatcacctctgaaagcaaagagaactgcacgggcgtccaggtggccgaatagccctggccctgggccccgcctcaaggaagagccagccgtaatggggactctccaggcaccgcctgcccccagcgtgggggtggccactcctgggccccagaaagcctcagagtcctgccgacggagccactggggtgggagggggcagggggcttggctcgcacccccactttcgcctcctccagctcctgccccgccggccgcgcaccgccatgcatgatgggtaaagcagcggccccgcacccctcctccttgctgatttgcacacattggccgcttcagacacgcacttctggggccagcccctccccgcctcctccctgcctggcggcaggggtcgcgatgatgggctggagcagtttggggcagggggttctgggacccactccgactccccctccccggcatcatttcccctccctgtaatgcactcctgccccggcccaacctcgccctctctcaccagccttgaactgtggccacctagaaaggggcccattcagcctcgtctctttacagaagtagttttgttcatgaaataaagactcttggacttgaaaaaagaaaaacatacccatttaaacacatgccttgg

SEQ ID NO: 71855 - DNA, 715 bp, Homo sapiens
gcatgtgtgtttgcagtttcctctactttatgggagatttcctcactttatcttgtcacatgtctgtagtgtttcatttcttctatcttgtgtatttataatgtctaaggttttgctgttattattctatgattttttagagtattcttgttccatgggtatactagcttctcttctgcctatgagtatattaacagcttttttttaattgagctgtatggcccagcatgtgatttatcttggtgaattctctccatatgcttgaaaaaaatacaacaatcttgcgcttgttggatcagtgttctagaaatgtcaataggtcaaattagttaatgctgttatttagttctatggctttactgattttttttccacttgttctatcaattactaagacagacggattaagtcttcaactatagtagatttttctgtttctccttgcagttctttcagttttcatgtattttgagggtctttttaaaaatgcatacacatttaagatttttatgccctctttatgaattaatcctttatcattattaaatatcccttattatccctggtaatattttttgtactgaagtctactttgtctgatagtaatataaccattctggctttcttataattagtgtttttatgacacatatttttatatgattttactttttatctatgcctttatgattaaagtgggtttcttgtatacagc

SEQ ID NO: 71856 - DNA, 416 bp, Homo sapiens
gctcaggaagaggccagcaagaaccctgaagccaagggtctgagcagagggagttggcaggcctagctcctgtgccccactccgaccctccctgctcatgcggcagtgggtgggtgaggtgggctggggccctggaggagtgcctttgaggaggtcagtcctggcaggtggacagaggacgcctggcatgggctgcttactgggaccccaggcggccctggccatggccacagtcttccttcttttggcgtgtgggctggtaccagatctggggattttctaaagggactggggggaggggagggcattgtcaatggtggtatctttagcctgagacagaagatttttaaaggcaaaattatatttctggtttgttgtttcagaagaccaataaagactgtattttcctatgtact

SEQ ID NO: 71857 - DNA, 351 bp, Homo sapiens
agaataacaacaggaccaacatgctggggtggctgtggggattaaatggcaagcctcagtttccccatatgtgcctaaagcaagagggccggacccctggtcagccctaaggtgggaataccttagtgtctgcaggctcagtttggccccagttcgaggcgcctcaaaaggtgccacagaggcccctcccaatcgcccatcctgcacctcaccctgtattttgctgcagccacaatcctggaattggccctttcctattttagcctatttttgagttcgtggcagggaacagaggagcagggtcacgccctgcaatttctctccctgagagcccttgaggacatcaggatt

SEQ ID NO: 71858 - DNA, 512 bp, Homo sapiens
ccatatcacccaactcccacttggagtagaacttcacaaaacgacagagggacagctgtttccatcaaacacttccacagcttcacctgagacgagggcatgactctgggaacatcaggaggctgatggactattaagccaaacaattcctacaaaaattccctgcaccttccactgcgtttcagtccttgacagacataagtaagggatcaagtgagaagaggaaggaaaatacaggatccaaggaatcaacaatgctagcactgaagagcaggattacggaggagctgtgctctgggagcatatatggtgatcaatcagatgcatgacttttttttcaaaattttaaatgtcttgagcatgctacttccaaccattctacccacaaataaactgcaataggacttggttagatttcaatgattatgaataaatgttcaccttcataccttctggttacaaagctaaactttaaaatgtccaaataaaatattcactaaaatttaaaattg

SEQ ID NO: 71859 - DNA, 384 bp, Homo sapiens
aacaaatgggagaactcagtaatgtagtctctggattatgtaatcctaatgcttgcaactattagtagaatccaagctaattcctcttgaaaaactaagttgtggccgggtgcagtggctcacgcctgtaatcccagcactttgggaggccaaggtgggcggatcacgaggtcaggagatcaagaacatcctggctaacacggtgaaaccccatctctactaaaaatacaaaaaattagccgggtgtggtggcaggcgcctgtagtcccagctactggggaggctgaggcaggagaatggcatgaacccgggaggcagagctggcagtgagccgagatcacgccactgcactccagcctgggcgacagagtgagactccgtctg

SEQ ID NO: 71860 - DNA, 746 bp, Homo sapiens
attaaatatgaaattacatctgtgtacttgagctgaatgacaggacactggtttataatgactaaagatgtatgattgcattttccacactcgtggcagagagatgagtattccattgtgtgtgacatttccagcaattcatattgaagatgtgttttaaaatcattaacttattactatctaaataaggaatataaattaatacttaccaagcaagtaaaaatagcaaatctttaagcaacttgaaattttgtacggtagcacaaaaactcacaagatattgatcctggctgtactaaagagtgactaggtgatatattaaagagtgcataataatgagtgattaagggtcatttaaattattttacatgcagataattatattgtgtttgaaatgtcaaagacaacttacctgatgtatgtgtatgtaggaaaaacaaaaagcaaaactgtggtattttgtgtatctgtgtctttttctgtctttttgcatctttgttttttttctctctctctctctctgattttctttaaaagaggtcattaattctcctgtgagagaaacttttctttaccagaggaaaactacgcaattgtaaaatatagtttgcaagatgaaagaaatgtttctccaaacacttcaccttctctaagagatttctttgcatcttacctggactgctgaagaagcattttcacagtatcctttgcccacttacgggtggtattatttgctgtattgtttg

SEQ ID NO: 71861 - DNA, 626 bp, Homo sapiens
tatgacatagttgttaaaattcttgtgttttcacgtggatttaagaactaagaactgagtgaattaattttaggagactgtcatgcctgtgtgtgtgtgagagagagagagaaggagggagggaaagagagcgaaagagggaagaaagaggcagggatggaggaaagtaagagagaaggaggaaaggaagaaagagagagcaaaggagggaaggaaggagagagagaagaagagagaaagagaaggagggagggagaagaaatgaaggatggaggaagagagagagagaacacaattggctgattaataaaggaagccattttaaaaggttctaacacttcagtgagagaggcaaaagtcaagcatgaatgattaatgtccctttctatcaatcctgcattgggtctgcaagtggcaggtgctactaaagactctaggaccaagaagctaaaagataactttctcagcatgatgagaatctgcaatctcgggactctgaggaggcaaggtccccacggagggccaacacccggggcgtgggattacagcgcagctcctgactgccgctctcaggaggccagtctcaaagtctaccttcctctccctccaaaaaaagacaagctttg

SEQ ID NO: 71862 - DNA, 270 bp, Homo sapiens
tgagtatctttattcctttattaacttagggcagatataaaataaaggataatatatgacaaattctcacttaccaagaatggttggttgctatttagggtaggctaacagctgtgacagtacactccaaaatgtataattacgtaaacacatattcaattcttgctaacatagcagtactttgctgtgagcaggtcagcaggaacccttttctgcagtcactcagggacccagacttacagagtgggtaggatgcatctgatccagagt

SEQ ID NO: 71863 - DNA, 1112 bp, Homo sapiens
aattcagtctgcagggaggaaagtcagaattagatattcaagatggccgcctctgatggagtccctggcactcactcaagcttgcatttggtagatggtgacacaagaatccatgctgaaggctgccttgcctctctttaccagattcatcatcagcaatggactgcggaccgagcacggggtgtttgagatcacactggagactgtggacagagccctgcctgtggtaaccaggaacaaggggttgagactggcccaaggggccgtgggcctgctttcccctgacctccttcagctgaccgaccctgatacacctgcggagaacctcaccttcctcttggttcagctcccccagcatggccagctctacctgtgggggacagggctacttcaacacaatttcacccagcaggatgtggacagcaagaatgtggcctatcggcactcaggaggggactcccagactgactgctttactttcatggccacagacgggacaaaccaaggctttattgtgaatgggagagtgtgggaagaacctgttttattcaccattcaggtagaccaattggacaaaacagctcctcgtatcacactcttgcattccccttctcaagtggggctcctgaaaaatggctgctacgggatttacatcacttcccgcgtgttgaaggcatcagaccctgacactgaggacgatcagatcatctttaaaattctacaaggcccaaaacatggacatctggagaacacaacaacaggtgaatttatccatgagaaatttagccaaaaggacttaaacagtaagactattctttacatcataaacccatctttggaagtaaattcagataccgtggaatttcaaatcatggaccccacagggaactcggccactcctcaaattttggaactgaagtggtctcatattgaatggtcacagaccgaatatgaagtctgtgcagaactgtcgcggtttgttgcccttggaaattatcagaaggggatattccatggactcggcctttgtgggtataaagttcctccaagtctcaactgtcacttgcgcaagattttcaccgtgagttccagctcaagcgctgatgtttgac

SEQ ID NO: 71864 - DNA, 1230 bp, Homo sapiens
aattcagtctgcagggaggaaagtcagaattagatattcaagatggccgcctctgatggagtccctggcactcactcaagcttgcatttggtagatggtgacacaagaatccatgctgaaggctgccttgcctctctttaccagattcatcatcagcaatggactgcggaccgagcacggggtgtttgagatcacactggagactgtggacagagccctgcctgtggtaaccaggaacaaggggttgagactggcccaaggggccgtgggcctgctttcccctgacctccttcagctgaccgaccctgatacacctgcggagaacctcaccttcctcttggttcagctcccccagcatggccagctctacctgtgggggacagggctacttcaacacaatttcacccagcaggatgtggacagcaagaatgtggcctatcggcactcaggaggggactcccagactgactgctttactttcatggccacagacgggacaaaccaaggctttattgtgaatgggagagtgtgggaagaacctgttttattcaccattcaggtagaccaattggacaaaacagctcctcgtatcacactcttgcattccccttctcaagtggggctcctgaaaaatggctgctacgggatttacatcacttcccgcgtgttgaaggcatcagaccctgacactgaggacgatcagatcatctttaaaattctacaaggcccaaaacatggacatctggagaacacaacaacaggtgaatttatccatgagaaatttagccaaaaggacttaaacagtaagactattctttacatcataaacccatctttggaagtaaattcagataccgtggaatttcaaatcatggaccccacagggaactcggccactcctcaaattttggaactgaagtggtctcatattgaatggtcacagaccgaatatgaagtctgtgcagaactgtcgcggtttgttgcccttggaaattatcagaaggggatattccatggactcggcctttgtgggtataaaggtcaaccaagtgtcagctgcagttggaaaagatttcaccgtgattccatctaaactgattcagtttgacccaggaatgtcaactaagatgtggaatatagcaattacctatgacggattagaggaagatgatgaggtctttgaagtaattctgaactcccctgtgaatgcagttcttggcacaaagacaa

SEQ ID NO: 71865 - DNA, 1006 bp, Homo sapiens
cacaagagcaaggtgactgtctccagtgacagattcagattcatcatcagcaatggactgcggaccgagcacggggtgtttgagatcacactggagactgtggacagagccctgcctgtggtaaccaggaacaaggggttgagactggcccaaggggccgtgggcctgctttcccctgacctccttcagctgaccgaccctgatacacctgcggagaacctcaccttcctcttggttcagctcccccagcatggccagctctacctgtgggggacagggctacttcaacacaatttcacccagcaggatgtggacagcaagaatgtggcctatcggcactcaggaggggactcccagactgactgctttactttcatggccacagacgggacaaaccaaggctttattgtgaatgggagagtgtgggaagaacctgttttattcaccattcaggtagaccaattggacaaaacagctcctcgtatcacactcttgcattccccttctcaagtggggctcctgaaaaatggctgctacgggatttacatcacttcccgcgtgttgaaggcatcagaccctgacactgaggacgatcagatcatctttaaaattctacaaggcccaaaacatggacatctggagaacacaacaacaggtgaatttatccatgagaaatttagccaaaaggacttaaacagtaagactattctttacatcataaacccatctttggaagtaaattcagataccgtggaatttcaaatcatggaccccacagggaactcggccactcctcaaattttggaactgaagtggtctcatattgaatggtcacagaccgaatatgaagtctgtgcagaactgtcgcggtttgttgcccttggaaattatcagaaggggatattccatggactcggcctttgtgggtataaagttcctccaagtctcaactgtcacttgcgcaagattttcaccgtgagttccagctcaagcgctgatgtttgac

SEQ ID NO: 71866 - DNA, 555 bp, Homo sapiens
ggaaaagatttcaccgtgattccatctaaactgattcagtttgacccaggtacattttgtgtctgcagtttgttttatgtgttttgttttttgtttttttttgtaggcatgtctggagattgtagagaagatagaatgttacacaactttagccaactagaaactcctcagggagccataccacctcactctaaaagagaggtgtttggatttgaggttttgcccttatttttttttagtaacaaatgaattttgatttcaaatgagaagaaagattataataaatatgagatatcaaagcaaacatccaagacaatccagaaaaaaatacagtcacttagaaattatttgaagttctaacacaaagctgttatagtttaattgcctcagatattttatgaaaattttcagaatgttatgtttatatggattcctaaagggcatttctaaatgatccctcatggaataggttgatattaggagattccaggggaaattattatttagttaagtagcacttactttgttttaaatttgtggaaaaattttgctagg

SEQ ID NO: 71867 - DNA, 881 bp, Homo sapiens
ccaagatttcatgatggttagctctctctgttcaaaacctcgttcagtagagataacttgagaatgtgtttttgcccaatgtctcttccctgtcttttttccacttcccatttgattcttcttttcctgtctcctatgttttctgtctcactggtggatctgagaattgagggaggaacaagggaagacgaggtgagaacggagtgaaggtgctatgttcacataccctggggtagaaatggaaaccatctcagtgtttaacttttgcttaaaaaaaaaatcaatcttatttttagaacagttttaggttcaaacaaaagtgagctgaggccatgtgcattggttcatgcctgtaatcccaacactttgagaggctgagttgggccgattgctcgagcccaggagttcaagaccagcctgggcaacatggtgaaaccctgtctctaccaaaaaaaaaaaaaagaaaaaaagaatttgctgggcatggtggtgcatgcctgtagttccagctgctcaggaggctgaggtaggaggattgcttgagcctggggggttggaggctgcagtgagctgtgatcaaccactgcactccaacctgggtgatggagtgagaccctgtctcaaaacaaaacaaaacaaaaagaacaaaatggaactttaagtgtggagagttcccatatacttcctggcccatatgtacacaacctcccccattgttgccatccctcaccacagtgacacatttattacaatcagtgaacccacactgacacatcattgtcactcaaaatttagaatttaccttagggttcactcttggtgttgtacagtctatgaattttgacaaatgtataaagatgtagtccatcattataacatca

SEQ ID NO: 71868 - DNA, 277 bp, Homo sapiens
tccatttgttgcaacctgtgttttaggtgttatatatcgaaacattgccagatccagtgtcatgaaactttttaattattttgccttaagcctttcttctatgagttgttataaatttggcccttacatttaggtttttgttcaattttgagttaatttttgtatgtggtgttaggtaagggaccaactttattcttttgcatgttgatgtccagatatcccaaaaccatttgttgaaaagattgtctgctctccattgtgtggacttggtaccttt

SEQ ID NO: 71869 - DNA, 915 bp, Homo sapiens
tcttgctatgtctgctaaagaacgagcatcagcctttcaagcttgacaggcagtgtgatgtgttctgaaagtgtccagggcaaagcgtagggagagggtggatttgtgcagggtgcagctctggagaagaagctggatcactcttggtcccattccctaggccctgagcaagtcaggctcctggctctgggtgtggctcccccaaacgaagtactgacttcagcctgtgaggggagggttgagggaggctctggaaagcccagccacacctgagtccctggcagtagccttggggcagagggcacccgcagagtcccagagatgatgtgggcagtgggcagagagagccttggcgcctctgtttgccaccacttccccaggaaggagggacagcatttctctggctggttccactaaatgtgccagcccaaatgcagggcatgggctctggttctgccaggagcctgtgacacccccaggaagggggtggaactgaggaagagcgaggatatgcaggcactcatgcttaccgggactggggcagctcactaggattctatcctttccaatcggcatcagccagctcttgtcccctgataagtgaggacagcctgaccctggcctcaaatgcagccatccctgagttcatgcgatgctgacgggaccccagcacacttccctgcctcctttgagatctgcgagcccttgctgcagttcagattcaacaaggccctctgcccaccctctcactaggcctcacccaacaccagtggaactggagcctctggctgggcacagtggctcactttgggaggctgaggcaggaaggctgctggaaactgagagttcaagaccagcctgggcaacatagtgagaccctgtctctacaaatacaaaataaaataattagctggg

SEQ ID NO: 71870 - DNA, 1055 bp, Homo sapiens
tcttgctatgtctgctaaagaacgagcatcagcctttcaagcttgacaggcagtgtgatgtgttctgaaagtgtccagggcaaagcgtagggagagggtggatttgtgcagggtgcagctctggagaagaagctggatcactcttggtcccattccctaggccctgagcaagtcaggctcctggctctgggtgtggctcccccaaacgaagtactgacttcagcctgtgaggggagggttgagggaggctctggaaagcccagccacacctgagtccctggcagtagccttggggcagagggcacccgcagagtcccagagatgatgtgggcagtgggcagagagagccttggcgcctctgtttgccaccacttccccaggaaggagggacagcatttctctggctggttccactaaatgtgccagcccaaatgcagggcatgggctctggttctgccaggagcctgtgacacccccaggaagggggtggaactgaggaagagcgaggatatgcaggcactcatgcttaccgggactggggcagctcactaggattctatcctttccaatcggcatcagccagctcttgtcccctgataagtgaggacagcctgaccctggcctcaaatgcagccatccctgagttcatgcgatgctgacgggaccccagcacacttccctgcctcctttgagatctgcgagcccttgctgcagttcagattcaacaaggccctctgcccaccctctcactaggcctcacccaacaccagtggaactggagcctctggctgggcacagtggctcactttgggaggctgaggcaggaaggctgctggaaactgagagttcaagaccagcctgggcaacatagtgagaccctgtctctacaaatacaaaataaaataattagctgggtgtgttggtgtgtgcctgtggtcccagctactcgggaggctgaggtgggaagatccctgagcctggagggtcgaggttgcagtgagcggagatcgcacctctgcactcaatcctgggtgacaaaatgaaaccctgcctca

SEQ ID NO: 71871 - DNA, 676 bp, Homo sapiens
tcttgctatgtctgctaaagaacgagcatcagcctttcaagcttgacaggcagtgtgatgtgttctgaaagtgtccagggcaaagcgtagggagagggtggatttgtgcagggtgcagctctggagaagaagctggatcactcttgcttaccgggactggggcagctcactaggattctatcctttccaatcggcatcagccagctcttgtcccctgataagtgaggacagcctgaccctggcctcaaatgcagccatccctgagttcatgcgatgctgacgggaccccagcacacttccctgcctcctttgagatctgcgagcccttgctgcagttcagattcaacaaggccctctgcccaccctctcactaggcctcacccaacaccagtggaactggagcctctggctgggcacagtggctcactttgggaggctgaggcaggaaggctgctggaaactgagagttcaagaccagcctgggcaacatagtgagaccctgtctctacaaatacaaaataaaataattagctgggtgtgttggtgtgtgcctgtggtcccagctactcgggaggctgaggtgggaagatccctgagcctggagggtcgaggttgcagtgagcggagatcgcacctctgcactcaatcctgggtgacaaaatgaaaccctgcctca

SEQ ID NO: 71872 - DNA, 458 bp, Homo sapiens
cccgttcaccagcttgggttcagatgaagctcccccgacagccactactcctgtgctgttgcaggctattgtaacgggggttccacgtcatccaggccacaggccaagccttggatgcacctgctctttgcccagctgccccagggcagagctctgcacagatcacagtgccttaagacaggatgataacacccctcagtgttttccttagagtgctccatgcaccacagccatttttcaaagcatcccccaggccagggttaaggcagaacaggttttccagtcatagcctcccacttagctgagtaacatttcttgagtgatcttgtaaatgaatagtttgaaagaaaaacaggcaactaaggcagtgcggtcacattgtttgagaatacagatgcaaaattacttgtgaatttacttgctcatttttccaaaggatgtaatctgtacacttagaa

SEQ ID NO: 71873 - DNA, 553 bp, Homo sapiens
acttggagtgagccaggcggagggggcagcaggacggagccttccagtcaggaggtgcccggagtgtcacggggagaggccattgtgagcaaaacagcaaggagggggatgcaggagaaggaaccagtgccccccagctgggggccacccaggaaggacgtgggcttctctcaggagagagggaatcgcggaagttacagcaagaaggtctataacccgactcaggttgtcttccgtgttggggtagactgtggaggcgagacgctgtgagagcagtcaggaaggagatgcttcagctgggtcacagctcggtgcagccaggggcagcggggtggagtcagcgacagaccagagaaggatcaagtacgaatccagggtttgagtcctgaacagctggaaaggcagagttgctgtcagttgagctgggtgaggttctggcttgcgggttaggggcacatccgttagaaaacagcattgctgaggaagcacagtgagctccgaggcaaaccctttttctttcaacctgcggtttgcatcccagagccagcctaac

SEQ ID NO: 71874 - DNA, 752 bp, Homo sapiens
actgtggttctgcgcttgtcatcatggcgacgcggggccatgtgcaggaccctaacgacaggcgcctccggcccatttacgattatcttgacaatggtaataataaaatggcaattcagcaagcagataaactgttgaagaaacataaggatcttcattgtgctaaggttttaaaggcaattggtttacagagaactggaaagcaagaggaagcctttactcttgcacaggaggtggcagcccttgaacccacagatgacaactcactgcaggcactgactatcctttaccgggagatgcaccgaccggagttagttacaaaactttatgaggcagctgtgaagaaagttcccaatagtgaggagtatcactctcacctcttcatggcctatgccagagtgggtgaatacaagaaaatgcaacaggctggcatggctctatataagattgtccccaaaaatccctactacttttggtctgtgatgagcttaattatgcaatctatatcggcacaggatgaaaacctctcaaaaacaatgtttctgccccttgctgagagaatggtcgaaaaaatggtgaaagaggacaagatagaagctgaggctgaatttgatagctgggtcctcacttttggcctttgggtaaatctgaagccctcagcgtaggtctaatcactgacctgtttccagcaagtactctaggctgagatgtgtatagacgggagagatatagatggagaagatcctgttacc

SEQ ID NO: 71875 - DNA, 807 bp, Homo sapiens
atggctttttaaagaacttacaatggatagtctatcctttggagtttggttcattatggaaaatgaaaaacaaatagctttctaaattaaatttttatttgcttattctttatttgtgtgttgtgttccttaaaatagcattgaaacaaaagctgaataaaactaaaatgttttttgttttcagatgtcttcagtaaatgtaaaggtgacctcttagaagttaaagatggtaacttgaaaacacatcctactcttttagaaaatctagttttctttgttgaggtaagtttttgttctcttcctaaaagacattgttgttcttaatggtctacaggattcatttttcaacagtgaacaggtaataggcaccttatacctgtaacttaaccctccatccctgtttttgttaattgaaaagcaatttaaatcattttctaaaccaatttcttccaagaattctaagatgatttcattcataatacttaggtaaaacttcttgaaatttgctgtactcatctctaaacttccccagattcacctcaaatctagctgttttcattctcctttctgactcactctttattatgtagtttaattcctccagcttcttttatttgttgtcatttattaattgctaagatattatgcattgtgatagtgtccagcaactgatacagcaaaactccctcctctttttttgccagagggaagagaaggaagattgcaaacactcataatctattatcttttcttttatttctgtcacatatttgttgactgttctccccttactactctgtgtgggga

SEQ ID NO: 71876 - DNA, 631 bp, Homo sapiens
tccttctttccttctgatctagttatcttttgacccgatatgctgaatctctaggtcagtatgctgctgcgtcccaatcctgtaacttcgcactcaggttttttcactccaaccagaaagatgtaagtgaaaaactattttttaactgtgatcttgtctgctgactgcacactattgaggagcacgtcaccacatgtcacaagtacacatgttaaggtgcaccatgctgaactagcaagtgcccttagaccaaagcttactgtccaaggctggtagggagaggtagagagttatttgtgtttgttagaatgggcgtgtttaatagaatccttggaaagttgcatttaaaaactggtatttactgactaggaagtgttagtcctcttagacctggcttttaatctctaagagacttttccaagggtataagaaacagtccataagcgttcatagcctgggatgccgtgtaacatcctgcaatagcagctgctctctgttacttttatttaactctgaaatgtatgtccattgtgctctttgccaaaggtgaatgtacttgtattttcttagaaaattaaaaggcattccgagaaacctaggtgaataatatgttttttaaagtagcaataaa

SEQ ID NO: 71877 - DNA, 509 bp, Homo sapiens
cacgcccagctaatttttgtatttttagtagagatggggtttctccatgttggctcagctagtctcgaactcctgacctcagatgatctgccagcctcggcctcccaaagtgatgggattacaggcatgagccattgcgcctggcccaggacatttatttttatttggataatgctgtattttggttctaggtgatgagaccactgtgtggcaggccctgactttgctggaagagggattaacccatagcccttccaatgctcagttcaaattgctgcttgttcgaatctactgtatgctgggtgcatttgaaccagtggtggatctttactccagcctcgatgctaagcatatccagcatgataccattgggttggtagtatatactctgaataatgagcagccagctataccagtgtggggtacacaggactctaacttagattttaaagttgattgtgacattaagcctttctgattaaataataacctgttatgatccattgcaa

SEQ ID NO: 71878 - DNA, 5634 bp, Homo sapiens
actgtggttctgcgcttgtcatcatggcgacgcggggccatgtgcaggaccctaacgacaggcgcctccggcccatttacgattatcttgacaatggtaataataaaatggcaattcagcaagcagataaactgttgaagaaacataaggatcttcattgtgctaaggttttaaaggcaattggtttacagagaactggaaagcaagaggaagcctttactcttgcacaggaggtggcagcccttgaacccacagatgacaactcactgcaggcactgactatcctttaccgggagatgcaccgaccggagttagttacaaaactttatgaggcagctgtgaagaaagttcccaatagtgaggagtatcactctcacctcttcatggcctatgccagagtgggtgaatacaagaaaatgcaacaggctggcatggctctatataagattgtccccaaaaatccctactacttttggtctgtgatgagcttaattatgcaatctatatcggcacaggatgaaaacctctcaaaaacaatgtttctgccccttgctgagagaatggtcgaaaaaatggtgaaagaggacaagatagaagctgaggctgaagttgaactttattatatgatcctggaacgtttgggaaagtaccaggaggccttggatgtcatcagagggaaattaggagagaagttgacaagtgagattcagagtcgggaaaataaatgcatggctatgtacaagaagctgagcaggtggccagagtgcaatgccctttcccggcgcctcttactaaaaaactcagatgactggcagttctatctgacttatttcgattctgtctttcgactgattgaagaggcctggagtcctcctgctgaaggtgaacactctttagaaggagaagtacattattctgcagaaaaagctgtgaagtttatagaagatcggataacggaagaatctaaaagttctcgccatctccgaggaccacatctagctaaattggagctgattaggcgtttacgaagtcaaggttgtaacgatgagtacaaactgggtgatccagaagaattaatgttccagtattttaaaaagtttggcgataaaccttgttgttttacagaccttaaggtgtttgttgacctcttacctgctacacagtgtacaaaatttattaatcagttacttggagttgttcctttgtcgacaccaacagaggataagctggcactgcctgctgacatcagagctctgcagcaacatttgtgtgtggtgcagctgacgaggttacttggcttgtaccacaccatggataaaaatcagaaattgagtgtggtcagagaattgatgttaaggtaccagcatggactggaatttgggaaaacctgtttgaaaacagaattgcaattttctgactattactgtctccttgctgtccatgcgcttattgatgtatggagggaaacaggtgatgagaccactgtgtggcaggccctgactttgctggaagagggattaacccatagcccttccaatgctcagttcaaattgctgcttgttcgaatctactgtatgctgggtgcatttgaaccagtggtggatctttactccagcctcgatgctaagcatatccagcatgataccattggttatcttttgacccgatatgctgaatctctaggtcagtatgctgctgcgtcccaatcctgtaacttcgcactcaggttttttcactccaaccagaaagatacctcagaatatattattcaagcttacaaatatggtgcatttgagaagatcccagagtttatcgcttttaggaacaggctgaataattctcttcattttgcacaagtccgtactgaacggatgctgttagaccttctacttgaagcaaatatatcaaccagtttagcagaaagtataaagtcaatgaaccttaggccagaagaagatgacattccatgggaagatttgcgagacaacagagacttaaatgtttttttcagctgggatccaaaagacagggacgtttctgaagaacataagaaactttccttagaggaggagaccttgtggttaagaatccgatccttaacattgaggctgataagtggacttccaagtctcaaccaccctgtggagccaaagaactcggagaagactgccgagaatggggtatcctcccggattgatattcttcgtttgctccttcaacagctggaggcaaccctggagacaggaaagcgatttattgagaaggatattcagtatcctttccttggtcctgtacctaccagaatgggtggattctttaattctggctgttctcagtgccagataagctctttttatcttgtcaatgatatttatgagctggataccagtggtttagaggatacaatggagattcaggaacgaatagaaaatagttttaagtctttactagaccagttaaaagatgtcttcagtaaatgtaaaggtgacctcttagaagttaaagatggtaacttgaaaacacatcctactcttttagaaaatctagttttctttgttgagactatttctgttatcctttgggtatccagttactgtgagagtgtcctacgaccatacaaactaaatttacagaaaaagaaaaagaagaaaaaagaaaccagcatcatcatgccacctgtctttaccagtttccaagactatgttactgggcttcagactttaatttccaatgttgtggatcatattaaagggcttgaaacacatctaattgcacttaaacttgaagaacttattttagaagacacttctctctcaccggaagagagaaaattttcaaagactgtgcaagggaaggtgcagagcagttatctgcactcacttctggaaatgggggagctgctgaaaaaaagacttgagaccacaaagaaactaaaaatttaaggaagtatctatcatgggcactgatgactctgcaacagaatatgacaccatcttcccaggcaaaagcaacatctggttgaccatgattttaatccagaacttcctcataaaatgcatgaaggactttgatcgtgaatttttttaggtgttaaatatatacaactgattaaattattgtatataaaccagaagcgggaccctcatctgggtttgaccactttttatacatgttcatatgcatatggcagcaacaagagaaccctacttttcttcttcccatcaccagaaacatcttttcaggggagcggggggtctataaaaacagcaatagaaattaagcataaagcatcaacctcatagcaactgaatagcccttccattataaataacattgagagtttttggtctggtccttgagccacaagaagtggaggggagaccatgcctgggaacagacccccttttcacagcagtaagtttgttttgaggctttctcagctacttggctcccacagaacccaaggcaggtacacaaaggaccttagatgagatctggcatatgcacccgcaatagaagggcaccacttggatgaccacaggcacttagtttttggctagtttttgtctgatagttaagacatccccatcctagcttctgtgagagttaaaaatctcaggtaagaaggcaaggaaggctctgttaatttatagctgtttagaggggaaagcagtgcagaccacttattaagcccgctgaggactagctttctgtctttcatacatttgggaaagataggaatgactgtttcaaagaagagaggtgcacataatttatgcaggcaagtatgatacttatttcattggttttgtgagtcatatatatacatatatatatatacacatatatatatgacttgaaaattaagatttaatactttaatgttttaagtgtggggggtttgggaaggaaggaatgtaatattatggatttagccttaggctttaagttttaggctggcaaaagaaatgttattcagtgggtttgaggtttggactactttcttcaaacttagagaattataacaggatggtgtttactttgttcacctggatgtccccaagactctagcttcttctatcagtggttggtctgatagaagaggtaaaaattgctcttgaaaatgtcctacaatttatgcagtttctttgataatatttttctgtttaaatccctgcttctgtttttggtctgttacctaaatatagttcaagtttaattctgtaagagcaaagaaatgaatttgatgaggaaattaagcatccaatggaggattggtcttgaagaccttaaaggtgctttccaacctgcactgctccagtgaaatgtggtacttttttcttttaaaagcaaccaagagagctgggaatatctgtgtacgcaaagtaattgcattttgtcccttcattttgactttcttagattcataatttgatacagtgcttaaacttccaaggaaattttaaacaattactacattacctgttcaaaataaggcttgttggaaatcctagtccatcaactaatttcaaaaatttatttttgatatgagtagcaacagctggtcatataccctatcccaaaaggaagaactgtcttgaacaagatgaatggaaaattgtggttaattctgaatttcatgtaatgacaacatattctttcataaaactatggcctgtttaagatggaactttgtgtgtgtctgctggggagggtggggtacatgtgtatggcgtgtgttcttgaaatgatgtctctctgaatatccaaaaaagtactgtactgtagaaatgctctttgaaaaagtctatcgactgaccatgatcaatctagcatatgtatgttcagtgggctagccttggtcctcagggacagtgtgtgactctagtggtcttcctaaccagtctcttgcctaaagatatctgggacctctactggctttaatgacaaataatgttatgttgaggttatgcttcctttgttatttgctgattttcctactaaatgtagcatttcaattagatccagctttcacattttgagataattgtaaaaagaatgaaattatgcagaaatggccaatatctcttatcaatctgttcttttggaaaccctcatgtactataaattgtgtacagttaaaaaaatatatatatatatatattcttacatgagtaaaaagcaccctctcccagcaatcgtatgccattggtatttgaagagaattcccaaataacccattgctgctgctgctgtttttgatttgtatgggtttttttgttttgtttgtttttgtgtggtaaactgatatttaaaaaaggaaaggagaaaaatcacgactactgtttacagactgaaaaattattgctttttatactactgagatcctaagttaagactctccaaagcaaacatttggtttaaatcatttatctgatgtagataaaaggtagagaaacttgtagtgttctccacataatggaaaatgtacaaatgcctagttgtgttgcccatcaattttgtatattttcataattttaattgttgaaaattgcattatattttgcaatcactatgttcaatctggatttgtctttcattttaacttttaatataaaaaggggtttcaatgta

SEQ ID NO: 71879 - DNA, 5790 bp, Homo sapiens
actgtggttctgcgcttgtcatcatggcgacgcggggccatgtgcaggaccctaacgacaggcgcctccggcccatttacgattatcttgacaatggtaataataaaatggcaattcagcaagcagataaactgttgaagaaacataaggatcttcattgtgctaaggttttaaaggcaattggtttacagagaactggaaagcaagaggaagcctttactcttgcacaggaggtggcagcccttgaacccacagatgacaactcactgcaggcactgactatcctttaccgggagatgcaccgaccggagttagttacaaaactttatgaggcagctgtgaagaaagttcccaatagtgaggagtatcactctcacctcttcatggcctatgccagagtgggtgaatacaagaaaatgcaacaggctggcatggctctatataagattgtccccaaaaatccctactacttttggtctgtgatgagcttaattatgcaatctatatcggcacaggatgaaaacctctcaaaaacaatgtttctgccccttgctgagagaatggtcgaaaaaatggtgaaagaggacaagatagaagctgaggctgaagttgaactttattatatgatcctggaacgtttgggaaagtaccaggaggccttggatgtcatcagagggaaattaggagagaagttgacaagtgagattcagagtcgggaaaataaatgcatggctatgtacaagaagctgagcaggtggccagagtgcaatgccctttcccggcgcctcttactaaaaaactcagatgactggcagttctatctgacttatttcgattctgtctttcgactgattgaagaggcctggagtcctcctgctgaaggtgaacactctttagaaggagaagtacattattctgcagaaaaagctgtgaagtttatagaagatcggataacggaagaatctaaaagttctcgccatctccgaggaccacatctagctaaattggagctgattaggcgtttacgaagtcaaggttgtaacgatgagtacaaactgggtgatccagaagaattaatgttccagtattttaaaaagtttggcgataaaccttgttgttttacagaccttaaggtgtttgttgacctcttacctgctacacagtgtacaaaatttattaatcagttacttggagttgttcctttgtcgacaccaacagaggataagctggcactgcctgctgacatcagagctctgcagcaacatttgtgtgtggtgcagctgacgaggttacttggcttgtaccacaccatggataaaaatcagaaattgagtgtggtcagagaattgatgttaaggtaccagcatggactggaatttgggaaaacctgtttgaaaacagaattgcaattttctgactattactgtctccttgctgtccatgcgcttattgatgtatggagggaaacaggtgatgagaccactgtgtggcaggccctgactttgctggaagagggattaacccatagcccttccaatgctcagttcaaattgctgcttgttcgaatctactgtatgctgggtgcatttgaaccagtggtggatctttactccagcctcgatgctaagcatatccagcatgataccattggttatcttttgacccgatatgctgaatctctaggtcagtatgctgctgcgtcccaatcctgtaacttcgcactcaggttttttcactccaaccagaaagatacctcagaatatattattcaagcttacaaatatggtgcatttgagaagatcccagagtttatcgcttttaggaacaggctgaataattctcttcattttgcacaagtccgtactgaacggatgctgttagaccttctacttgaagcaaatatatcaaccagtttagcagaaagtataaagtcaatgaaccttaggccagaagaagatgacattccatgggaagatttgcgagacaacagagacttaaatgtttttttcagctgggatccaaaagacagggacgtttctgaagaacataagaaactttccttagaggaggagaccttgtggttaagaatccgatccttaacattgaggctgataagtggacttccaagtctcaaccaccctgtggagccaaagaactcggagaagactgccgagaatggggtatcctcccggattgatattcttcgtttgctccttcaacagctggaggcaaccctggagacaggaaagcgatttattgagaaggatattcagtatcctttccttggtcctgtacctaccagaatgggtggattctttaattctggctgttctcagtgccagataagctctttttatcttgtcaatgatatttatgagctggataccagtggtttagaggatacaatggagattcaggaacgaatagaaaatagttttaagtctttactagaccagttaaaagatgtcttcagtaaatgtaaaggtgacctcttagaagttaaagatggtaacttgaaaacacatcctactcttttagaaaatctagttttctttgttgagactatttctgttatcctttgggtatccagttactgtgagagtgtcctacgaccatacaaactaaatttacagaaaaagaaaaagaagaaaaaagaaaccagcatcatcatgccacctgtctttaccagtttccaagactatgttactgggcttcagactttaatttccaatgttgtggatcatattaaagggcttgaaacacatctaattgcacttaaacttgaagaacttattttagaagacacttctctctcaccggaagagagaaaattttcaaagactgtgcaagggaaggtgcagagcagttatctgcactcacttctggaaatgggggagctgctgaaaaaaagacttgagaccacaaagaaactaaaaatttaaggaagtatctatcatgggcactgatgactctgcaacagaatatgacaccatcttcccaggcaaaagcaacatctggttgaccatgattttaatccagaacttcctcataaaatgcatgaaggactttgatcgtgaatttttttaggtgttaaatatatacaactgattaaattattgtatataaaccagaagcgggaccctcatctgggtttgaccactttttatacatgttcatatgcatatggcagcaacaagagaaccctacttttcttcttcccatcaccagaaacatcttttcaggggagcggggggtctataaaaacagcaatagaaattaagcataaagcatcaacctcatagcaactgaatagcccttccattataaataacattgagagtttttggtctggtccttgagccacaagaagtggaggggagaccatgcctgggaacagacccccttttcacagcagtaagtttgttttgaggctttctcagctacttggctcccacagaacccaaggcaggtacacaaaggaccttagatgagatctggcatatgcacccgcaatagaagggcaccacttggatgaccacaggcacttagtttttggctagtttttgtctgatagttaagacatccccatcctagcttctgtgagagttaaaaatctcaggtaagaaggcaaggaaggctctgttaatttatagctgtttagaggggaaagcagtgcagaccacttattaagcccgctgaggactagctttctgtctttcatacatttgggaaagataggaatgactgtttcaaagaagagaggtgcacataatttatgcaggcaagtatgatacttatttcattggttttgtgagtcatatatatacatatatatatatacacatatatatatgacttgaaaattaagatttaatactttaatgttttaagtgtggggggtttgggaaggaaggaatgtaatattatggatttagccttaggctttaagttttaggctggcaaaagaaatgttattcagtgggtttgaggtttggactactttcttcaaacttagagaattataacaggatggtgtttactttgttcacctggatgtccccaagactctagcttcttctatcagtggttggtctgatagaagaggtaaaaattgctcttgaaaatgtcctacaatttatgcagtttctttgataatatttttctgtttaaatccctgcttctgtttttggtctgttacctaaatatagttcaagtttaattctgtaagagcaaagaaatgaatttgatgaggaaattaagcatccaatggaggattggtcttgaagaccttaaaggtgctttccaacctgcactgctccagtgaaatgtggtacttttttcttttaaaagcaaccaagagagctgggaatatctgtgtacgcaaagtaattgcattttgtcccttcattttgactttcttagattcataatttgatacagtgcttaaacttccaaggaaattttaaacaattactacattacctgttcaaaataaggcttgttggaaatcctagtccatcaactaatttcaaaaatttatttttgatatgagtagcaacagctggtcatataccctatcccaaaaggaagaactgtcttgaacaagatgaatggaaaattgtggttaattctgaatttcatgtaatgacaacatattctttcataaaactatggcctgtttaagatggaactttgtgtgtgtctgctggggagggtggggtacatgtgtatggcgtgtgttcttgaaatgatgtctctctgaatatccaaaaaagtactgtactgtagaaatgctctttgaaaaagtctatcgactgaccatgatcaatctagcatatgtatgttcagtgggctagccttggtcctcagggacagtgtgtgactctagtggtcttcctaaccagtctcttgcctaaagatatctgggacctctactggctttaatgacaaataatgttatgttgaggttatgcttcctttgttatttgctgattttcctactaaatgtagcatttcaattagatccagctttcacattttgagataattgtaaaaagaatgaaattatgcagaaatggccaatatctcttatcaatctgttcttttggaaaccctcatgtactataaattgtgtacagttaaaaaaatatatatatatatatattcttacatgagtaaaaagcaccctctcccagcaatcgtatgccattggtatttgaagagaattcccaaataacccattgctgctgctgctgtttttgatttgtatgggtttttttgttttgtttgtttttgtgtggtaaactgatatttaaaaaaggaaaggagaaaaatcacgactactgtttacagactgaaaaattattgctttttatactactgagatcctaagttaagactctccaaagcaaacatttggtttaaatcatttatctgatgtagataaaaggtagagaaacttgtagtgttctccacataatggaaaatgtacaaatgcctagttgtgttgcccatcaattttgtatattttcataattttaattgttgaaaattgcattatattttgcaatcactatgttcaatctggatttgtctttcattttaacttttaatataaaaaggggtttcaatgtatctacaggcttgttattgaaacttcctacttatttgatgtgatttattaatataggaagtatatattcttccttaagtaagtgaagcatagcaaatctactttaaactggatgggttaatttatataaacattttcattttaagttggcatttctg

SEQ ID NO: 71880 - DNA, 5580 bp, Homo sapiens
actgtggttctgcgcttgtcatcatggcgacgcggggccatgtgcaggaccctaacgacaggcgcctccggcccatttacgattatcttgacaatggtaataataaaatggcaattcagcaagcagataaactgttgaagaaacataaggatcttcattgtgctaaggttttaaaggcaattggtttacagagaactggaaagcaagaggaagcctttactcttgcacaggaggtggcagcccttgaacccacagatgacaactcactgcaggcactgactatcctttaccgggagatgcaccgaccggagttagttacaaaactttatgaggcagctgtgaagaaagttcccaatagtgaggagtatcactctcacctcttcatggcctatgccagagtgggtgaatacaagaaaatgcaacaggctggcatggctctatataagattgtccccaaaaatccctactacttttggtctgtgatgagcttaattatgcaatctatatcggcacaggatgaaaacctctcaaaaacaatgtttctgccccttgctgagagaatggtcgaaaaaatggtgaaagaggacaagatagaagctgaggctgaagttgaactttattatatgatcctggaacgtttgggaaagtaccaggaggccttggatgtcatcagagggaaattaggagagaagttgacaagtgagattcagagtcgggaaaataaatgcatggctatgtacaagaagctgagcaggtggccagagtgcaatgccctttcccggcgcctcttactaaaaaactcagatgactggcagttctatctgacttatttcgattctgtctttcgactgattgaagaggcctggagtcctcctgctgaaggtgaacactctttagaaggagaagtacattattctgcagaaaaagctgtgaagtttatagaagatcggataacggaagaatctaaaagttctcgccatctccgaggaccacatctagctaaattggagctgattaggcgtttacgaagtcaaggttgtaacgatgagtacaaactgggtgatccagaagaattaatgttccagtattttaaaaagtttggcgataaaccttgttgttttacagaccttaaggtgtttgttgacctcttacctgctacacagtgtacaaaatttattaatcagttacttggagttgttcctttgtcgacaccaacagaggataagctggcactgcctgctgacatcagagctctgcagcaacatttgtgtgtggtgcagctgacgaggttacttggcttgtaccacaccatggataaaaatcagaaattgagtgtggtcagagaattgatgttaaggtaccagcatggactggaatttgggaaaacctgtttgaaaacagaattgcaattttctgactattactgtctccttgctgtccatgcgcttattgatgtatggagggaaacaggtgatgagaccactgtgtggcaggccctgactttgctggaagagggattaacccatagcccttccaatgctcagttcaaattgctgcttgttcgaatctactgtatgctgggtgcatttgaaccagtggtggatctttactccagcctcgatgctaagcatatccagcatgataccattggttatcttttgacccgatatgctgaatctctaggtcagtatgctgctgcgtcccaatcctgtaacttcgcactcaggttttttcactccaaccagaaagatacctcagaatatattattcaagcttacaaatatggtgcatttgagaagatcccagagtttatcgcttttaggaacaggctgaataattctcttcattttgcacaagtccgtactgaacggatgctgttagaccttctacttgaagcaaatatatcaaccagtttagcagaaagtataaagtcaatgaaccttaggccagaagaagatgacattccatgggaagatttgcgagacaacagagacttaaatgtttttttcagctgggatccaaaagacagggacgtttctgaagaacataagaaactttccttagaggaggagaccttgtggttaagaatccgatccttaacattgaggctgataagtggacttccaagtctcaaccaccctgtggagccaaagaactcggagaagactgccgagaatggggtatcctcccggattgatattcttcgtttgctccttcaacagctggaggcaaccctggagacaggaaagcgatttattgagaaggatattcagtatcctttccttggtcctgtacctaccagaatgggtggattctttaattctggctgttctcagtgccagataagctctttttatcttgtcaatgatatttatgagctggataccagtggtttagaggatacaatggagattcaggaacgaatagaaaatagttttaagtctttactagaccagttaaaagatgtcttcagtaaatgtaaaggtgacctcttagaagttaaagatggtaacttgaaaacacatcctactcttttagaaaatctagttttctttgttgagactatttctgttatcctttgggtatccagttactgtgagagtgtcctacgaccatacaaactaaatttacagaaaaagaaaaagaagaaaaaagaaaccagcatcatcatgccacctgtctttaccagtttccaagactatgttactgggcttcagactttaatttccaatgttgtggatcatattaaagggcttgaaacacatctaattgcacttaaacttgaagaacttattttagaagacacttctctctcaccggaagagagaaaattttcaaagactgtgcaagggaaggtgcagagcagttatctgcactcacttctggaaatgggggagctgctgaaaaaaagacttgagaccacaaagaaactaaaaatttaaggaagtatctatcatgggcactgatgactctgcaacagaatatgacaccatcttcccaggcaaaagcaacatctggttgaccatgattttaatccagaacttcctcataaaatgcatgaaggactttgatcgtgaatttttttaggtgttaaatatatacaactgattaaattattgtatataaaccagaagcgggaccctcatctgggtttgaccactttttatacatgttcatatgcatatggcagcaacaagagaaccctacttttcttcttcccatcaccagaaacatcttttcaggggagcggggggtctataaaaacagcaatagaaattaagcataaagcatcaacctcatagcaactgaatagcccttccattataaataacattgagagtttttggtctggtccttgagccacaagaagtggaggggagaccatgcctgggaacagacccccttttcacagcagtaagtttgttttgaggctttctcagctacttggctcccacagaacccaaggcaggtacacaaaggaccttagatgagatctggcatatgcacccgcaatagaagggcaccacttggatgaccacaggcacttagtttttggctagtttttgtctgatagttaagacatccccatcctagcttctgtgagagttaaaaatctcaggtaagaaggcaaggaaggctctgttaatttatagctgtttagaggggaaagcagtgcagaccacttattaagcccgctgaggactagctttctgtctttcatacatttgggaaagataggaatgactgtttcaaagaagagaggtgcacataatttatgcaggcaagtatgatacttatttcattggttttgtgagtcatatatatacatatatatatatacacatatatatatgacttgaaaattaagatttaatactttaatgttttaagtgtggggggtttgggaaggaaggaatgtaatattatggatttagccttaggctttaagttttaggctggcagaattataacaggatggtgtttactttgttcacctggatgtccccaagactctagcttcttctatcagtggttggtctgatagaagaggtaaaaattgctcttgaaaatgtcctacaatttatgcagtttctttgataatatttttctgtttaaatccctgcttctgtttttggtctgttacctaaatatagttcaagtttaattctgtaagagcaaagaaatgaatttgatgaggaaattaagcatccaatggaggattggtcttgaagaccttaaaggtgctttccaacctgcactgctccagtgaaatgtggtacttttttcttttaaaagcaaccaagagagctgggaatatctgtgtacgcaaagtaattgcattttgtcccttcattttgactttcttagattcataatttgatacagtgcttaaacttccaaggaaattttaaacaattactacattacctgttcaaaataaggcttgttggaaatcctagtccatcaactaatttcaaaaatttatttttgatatgagtagcaacagctggtcatataccctatcccaaaaggaagaactgtcttgaacaagatgaatggaaaattgtggttaattctgaatttcatgtaatgacaacatattctttcataaaactatggcctgtttaagatggaactttgtgtgtgtctgctggggagggtggggtacatgtgtatggcgtgtgttcttgaaatgatgtctctctgaatatccaaaaaagtactgtactgtagaaatgctctttgaaaaagtctatcgactgaccatgatcaatctagcatatgtatgttcagtgggctagccttggtcctcagggacagtgtgtgactctagtggtcttcctaaccagtctcttgcctaaagatatctgggacctctactggctttaatgacaaataatgttatgttgaggttatgcttcctttgttatttgctgattttcctactaaatgtagcatttcaattagatccagctttcacattttgagataattgtaaaaagaatgaaattatgcagaaatggccaatatctcttatcaatctgttcttttggaaaccctcatgtactataaattgtgtacagttaaaaaaatatatatatatatatattcttacatgagtaaaaagcaccctctcccagcaatcgtatgccattggtatttgaagagaattcccaaataacccattgctgctgctgctgtttttgatttgtatgggtttttttgttttgtttgtttttgtgtggtaaactgatatttaaaaaaggaaaggagaaaaatcacgactactgtttacagactgaaaaattattgctttttatactactgagatcctaagttaagactctccaaagcaaacatttggtttaaatcatttatctgatgtagataaaaggtagagaaacttgtagtgttctccacataatggaaaatgtacaaatgcctagttgtgttgcccatcaattttgtatattttcataattttaattgttgaaaattgcattatattttgcaatcactatgttcaatctggatttgtctttcattttaacttttaatataaaaaggggtttcaatgta

SEQ ID NO: 71881 - DNA, 5197 bp, Homo sapiens
actgtggttctgcgcttgtcatcatggcgacgcggggccatgtgcaggaccctaacgacaggcgcctccggcccatttacgattatcttgacaatggtaataataaaatggcaattcagcaagcagataaactgttgaagaaacataaggatcttcattgtgctaaggttttaaaggcaattggtttacagagaactggaaagcaagaggaagcctttactcttgcacaggaggtggcagcccttgaacccacagatgacaactcactgcaggcactgactatcctttaccgggagatgcaccgaccggagttagttacaaaactttatgaggcagctgtgaagaaagttcccaatagtgaggagtatcactctcacctcttcatggcctatgccagagtgggtgaatacaagaaaatgcaacaggctggcatggctctatataagattgtccccaaaaatccctactacttttggtctgtgatgagcttaattatgcaatctatatcggcacaggatgaaaacctctcaaaaacaatgtttctgccccttgctgagagaatggtcgaaaaaatggtgaaagaggacaagatagaagctgaggctgaagttgaactttattatatgatcctggaacgtttgggaaagtaccaggaggccttggatgtcatcagagggaaattaggagagaagttgacaagtgagattcagagtcgggaaaataaatgcatggctatgtacaagaagctgagcaggtggccagagtgcaatgccctttcccggcgcctcttactaaaaaactcagatgactggcagttctatctgacttatttcgattctgtctttcgactgattgaagaggcctggagtcctcctgctgaaggtgaacactctttagaaggagaagtacattattctgcagaaaaagctgtgaagtttatagaagatcggataacggaagaatctaaaagttctcgccatctccgaggaccacatctagctaaattggagctgattaggcgtttacgaagtcaaggttgtaacgatgagtacaaactgggtgatccagaagaattaatgttccagtattttaaaaagtttggcgataaaccttgttgttttacagaccttaaggtgtttgttgacctcttacctgctacacagtgtacaaaatttattaatcagttacttggagttgttcctttgtcgacaccaacagaggataagctggcactgcctgctgacatcagagctctgcagcaacatttgtgtgtggtgcagctgacgaggttacttggcttgtaccacaccatggataaaaatcagaaattgagtgtggtcagagaattgatgttaaggtaccagcatggactggaatttgggaaaacctgtttgaaaacagaattgcaattttctgactattactgtctccttgctgtccatgcgcttattgatgtatggagggaaacaggtgatgagaccactgtgtggcaggccctgactttgctggaagagggattaacccatagcccttccaatgctcagttcaaattgctgcttgttcgaatctactgtatgctgggtgcatttgaaccagtggtggatctttactccagcctcgatgctaagcatatccagcatgataccattggttatcttttgacccgatatgctgaatctctaggtcagtatgctgctgcgtcccaatcctgtaacttcgcactcaggttttttcactccaaccagaaagatacctcagaatatattattcaagcttacaaatatggtgcatttgagaagatcccagagtttatcgcttttaggaacaggctgaataattctcttcattttgcacaagtccgtactgaacggatgctgttagaccttctacttgaagcaaatatatcaaccagtttagcagaaagtataaagtcaatgaaccttaggccagaagaagatgacattccatgggaagatttgcgagacaacagagacttaaatgtttttttcagctgggatccaaaagacagggacgtttctgaagaacataagaaactttccttagaggaggagaccttgtggttaagaatccgatccttaacattgaggctgataagtggacttccaagtctcaaccaccctgtggagccaaagaactcggagaagactgccgagaatggggtatcctcccggattgatattcttcgtttgctccttcaacagctggaggcaaccctggagacaggaaagcgatttattgagaaggatattcagtatcctttccttggtcctgtacctaccagaatgggtggattctttaattctggctgttctcagtgccagataagctctttttatcttgtcaatgatatttatgagctggataccagtggtttagaggatacaatggagattcaggaacgaatagaaaatagttttaagtctttactagaccagttaaaagatgtcttcagtaaatgtaaaggtgacctcttagaagttaaagatggtaacttgaaaacacatcctactcttttagaaaatctagttttctttgttgagactatttctgttatcctttgggtatccagttactgtgagagtgtcctacgaccatacaaactaaatttacagaaaaagaaaaagaagaaaaaagaaaccagcatcatcatgccacctgtctttaccagtttccaagactatgttactgggcttcagactttaatttccaatgttgtggatcatattaaagggcttgaaacacatctaattgcacttaaacttgaagaacttattttagaagacacttctctctcaccggaagagagaaaattttcaaagactgtgcaagggaaggtgcagagcagttatctgcactcacttctggaaatgggggagctgctgaaaaaaagacttgagaccacaaagaaactaaaaatttaaggaagtatctatcatgggcactgatgactctgcaacagaatatgacaccatcttcccaggcaaaagcaacatctggttgaccatgattttaatccagaacttcctcataaaatgcatgaaggactttgatcgtgaatttttttaggtgttaaatatatacaactgattaaattattgtatataaaccagaagcgggaccctcatctgggtttgaccactttttatacatgttcatatgcatatggcagcaacaagagaaccctacttttcttcttcccatcaccagaaacatcttttcaggggagcggggggtctataaaaacagcaatagaaattaagcataaagcatcaacctcatagcaactgaatagcccttccattataaataacattgagagtttttggtctggtccttgagccacaagaagtggaggggagaccatgcctgggaacagacccccttttcacagcagtaagtttgttttgaggctttctcagctacttggctcccacagaacccaaggcaggtacacaaaggaccttagatgagatctggcatatgcacccgcaatagaagggcaccacttggatgaccacaggcacttagtttttggctagtttttgtctgatagttaagacatccccatcctagcttctgtgagagttaaaaatctcaggtaagaaggcaaggaaggctctgttaatttatagctgtttagaggggaaagcagtgcagaccacttattaagcccgctgaggactagctttctgtctttcatacatttgggaaagataggaatgactgtttcaaagaagagaggtgcacataatttatgcaggcaagtatgatacttatttcattggttttgtgagtcatatatatacatatatatatatacacatatatatatgacttgaaaattaagatttaatactttaatgttttaagtgtggggggtttgggaaggaaggaatgtaatattatggatttagccttaggctttaagttttaggctggcaaaagaaatgttattcagtgggtttgaggtttggactactttcttcaaacttagagaattataacaggatggtgtttactttgttcacctggatgtccccaagactctagcttcttctatcagtggttggtctgatagaagaggtaaaaattgctcttgaaaatgtcctacaatttatgcagtttctttgataatatttttctgtttaaatccctgcttctgtttttggtctgttacctaaatatagttcaagtttaattctgtaagagcaaagaaatgaatttgatgaggaaattaagcatccaatggaggattggtcttgaagaccttaaaggtgctttccaacctgcactgctccagtgaaatgtggtacttttttcttttaaaagcaaccaagagagctgggaatatctgtgtacgcaaagtaattgcattttgtcccttcattttgactttcttagattcataatttgatacagtgcttaaacttccaaggaaattttaaacaattactacattacctgttcaaaataaggcttgttggaaatcctagtccatcaactaatttcaaaaatttatttttgatatgagtagcaacagctggtcatataccctatcccaaaaggaagaactgtcttgaacaagatgaatggaaaattgtggttaattctgaatttcatgtaatgacaacatattctttcataaaactatggcctgtttaagatggaactttgtgtgtgtctgctggggagggtggggtacatgtgtatggcgtgtgttcttgaaatgatgtctctctgaatatccaaaaaagtactgtactgtagaaatgctctttgaaaaagtctatcgactgaccatgatcaatctagcatatgtatgttcagtgggctagccttggtcctcagggacagtgtgtgactctagtggtcttcctaaccagtctcttgcctaaagatatctgggacctctactggctttaatgacaaataatgttatgttgaggttatgcttcctttgttatttgctgattttcctactaaatgtagcatttcaattagatccagctttcacattttgagataattgtaaaaagaatgaaattatgcagaaatggccaatatctcttatcaatctgttcttttggaaaccctcatgtactataaattgtgtacagttaaaaaaatatatatatatatatattcttacatgagtaaaaagcaccctctcccagca

SEQ ID NO: 71882 - DNA, 5515 bp, Homo sapiens
actgtggttctgcgcttgtcatcatggcgacgcggggccatgtgcaggaccctaacgacaggcgcctccggcccatttacgattatcttgacaatggtaataataaaatggcaattcagcaagcagataaactgttgaagaaacataaggatcttcattgtgctaaggttttaaaggcaattggtttacagagaactggaaagcaagaggaagcctttactcttgcacaggaggtggcagcccttgaacccacagatgacaactcactgcaggcactgactatcctttaccgggagatgcaccgacgctggcatggctctatataagattgtccccaaaaatccctactacttttggtctgtgatgagcttaattatgcaatctatatcggcacaggatgaaaacctctcaaaaacaatgtttctgccccttgctgagagaatggtcgaaaaaatggtgaaagaggacaagatagaagctgaggctgaagttgaactttattatatgatcctggaacgtttgggaaagtaccaggaggccttggatgtcatcagagggaaattaggagagaagttgacaagtgagattcagagtcgggaaaataaatgcatggctatgtacaagaagctgagcaggtggccagagtgcaatgccctttcccggcgcctcttactaaaaaactcagatgactggcagttctatctgacttatttcgattctgtctttcgactgattgaagaggcctggagtcctcctgctgaaggtgaacactctttagaaggagaagtacattattctgcagaaaaagctgtgaagtttatagaagatcggataacggaagaatctaaaagttctcgccatctccgaggaccacatctagctaaattggagctgattaggcgtttacgaagtcaaggttgtaacgatgagtacaaactgggtgatccagaagaattaatgttccagtattttaaaaagtttggcgataaaccttgttgttttacagaccttaaggtgtttgttgacctcttacctgctacacagtgtacaaaatttattaatcagttacttggagttgttcctttgtcgacaccaacagaggataagctggcactgcctgctgacatcagagctctgcagcaacatttgtgtgtggtgcagctgacgaggttacttggcttgtaccacaccatggataaaaatcagaaattgagtgtggtcagagaattgatgttaaggtaccagcatggactggaatttgggaaaacctgtttgaaaacagaattgcaattttctgactattactgtctccttgctgtccatgcgcttattgatgtatggagggaaacaggtgatgagaccactgtgtggcaggccctgactttgctggaagagggattaacccatagcccttccaatgctcagttcaaattgctgcttgttcgaatctactgtatgctgggtgcatttgaaccagtggtggatctttactccagcctcgatgctaagcatatccagcatgataccattggttatcttttgacccgatatgctgaatctctaggtcagtatgctgctgcgtcccaatcctgtaacttcgcactcaggttttttcactccaaccagaaagatacctcagaatatattattcaagcttacaaatatggtgcatttgagaagatcccagagtttatcgcttttaggaacaggctgaataattctcttcattttgcacaagtccgtactgaacggatgctgttagaccttctacttgaagcaaatatatcaaccagtttagcagaaagtataaagtcaatgaaccttaggccagaagaagatgacattccatgggaagatttgcgagacaacagagacttaaatgtttttttcagctgggatccaaaagacagggacgtttctgaagaacataagaaactttccttagaggaggagaccttgtggttaagaatccgatccttaacattgaggctgataagtggacttccaagtctcaaccaccctgtggagccaaagaactcggagaagactgccgagaatggggtatcctcccggattgatattcttcgtttgctccttcaacagctggaggcaaccctggagacaggaaagcgatttattgagaaggatattcagtatcctttccttggtcctgtacctaccagaatgggtggattctttaattctggctgttctcagtgccagataagctctttttatcttgtcaatgatatttatgagctggataccagtggtttagaggatacaatggagattcaggaacgaatagaaaatagttttaagtctttactagaccagttaaaagatgtcttcagtaaatgtaaaggtgacctcttagaagttaaagatggtaacttgaaaacacatcctactcttttagaaaatctagttttctttgttgagactatttctgttatcctttgggtatccagttactgtgagagtgtcctacgaccatacaaactaaatttacagaaaaagaaaaagaagaaaaaagaaaccagcatcatcatgccacctgtctttaccagtttccaagactatgttactgggcttcagactttaatttccaatgttgtggatcatattaaagggcttgaaacacatctaattgcacttaaacttgaagaacttattttagaagacacttctctctcaccggaagagagaaaattttcaaagactgtgcaagggaaggtgcagagcagttatctgcactcacttctggaaatgggggagctgctgaaaaaaagacttgagaccacaaagaaactaaaaatttaaggaagtatctatcatgggcactgatgactctgcaacagaatatgacaccatcttcccaggcaaaagcaacatctggttgaccatgattttaatccagaacttcctcataaaatgcatgaaggactttgatcgtgaatttttttaggtgttaaatatatacaactgattaaattattgtatataaaccagaagcgggaccctcatctgggtttgaccactttttatacatgttcatatgcatatggcagcaacaagagaaccctacttttcttcttcccatcaccagaaacatcttttcaggggagcggggggtctataaaaacagcaatagaaattaagcataaagcatcaacctcatagcaactgaatagcccttccattataaataacattgagagtttttggtctggtccttgagccacaagaagtggaggggagaccatgcctgggaacagacccccttttcacagcagtaagtttgttttgaggctttctcagctacttggctcccacagaacccaaggcaggtacacaaaggaccttagatgagatctggcatatgcacccgcaatagaagggcaccacttggatgaccacaggcacttagtttttggctagtttttgtctgatagttaagacatccccatcctagcttctgtgagagttaaaaatctcaggtaagaaggcaaggaaggctctgttaatttatagctgtttagaggggaaagcagtgcagaccacttattaagcccgctgaggactagctttctgtctttcatacatttgggaaagataggaatgactgtttcaaagaagagaggtgcacataatttatgcaggcaagtatgatacttatttcattggttttgtgagtcatatatatacatatatatatatacacatatatatatgacttgaaaattaagatttaatactttaatgttttaagtgtggggggtttgggaaggaaggaatgtaatattatggatttagccttaggctttaagttttaggctggcaaaagaaatgttattcagtgggtttgaggtttggactactttcttcaaacttagagaattataacaggatggtgtttactttgttcacctggatgtccccaagactctagcttcttctatcagtggttggtctgatagaagaggtaaaaattgctcttgaaaatgtcctacaatttatgcagtttctttgataatatttttctgtttaaatccctgcttctgtttttggtctgttacctaaatatagttcaagtttaattctgtaagagcaaagaaatgaatttgatgaggaaattaagcatccaatggaggattggtcttgaagaccttaaaggtgctttccaacctgcactgctccagtgaaatgtggtacttttttcttttaaaagcaaccaagagagctgggaatatctgtgtacgcaaagtaattgcattttgtcccttcattttgactttcttagattcataatttgatacagtgcttaaacttccaaggaaattttaaacaattactacattacctgttcaaaataaggcttgttggaaatcctagtccatcaactaatttcaaaaatttatttttgatatgagtagcaacagctggtcatataccctatcccaaaaggaagaactgtcttgaacaagatgaatggaaaattgtggttaattctgaatttcatgtaatgacaacatattctttcataaaactatggcctgtttaagatggaactttgtgtgtgtctgctggggagggtggggtacatgtgtatggcgtgtgttcttgaaatgatgtctctctgaatatccaaaaaagtactgtactgtagaaatgctctttgaaaaagtctatcgactgaccatgatcaatctagcatatgtatgttcagtgggctagccttggtcctcagggacagtgtgtgactctagtggtcttcctaaccagtctcttgcctaaagatatctgggacctctactggctttaatgacaaataatgttatgttgaggttatgcttcctttgttatttgctgattttcctactaaatgtagcatttcaattagatccagctttcacattttgagataattgtaaaaagaatgaaattatgcagaaatggccaatatctcttatcaatctgttcttttggaaaccctcatgtactataaattgtgtacagttaaaaaaatatatatatatatatattcttacatgagtaaaaagcaccctctcccagcaatcgtatgccattggtatttgaagagaattcccaaataacccattgctgctgctgctgtttttgatttgtatgggtttttttgttttgtttgtttttgtgtggtaaactgatatttaaaaaaggaaaggagaaaaatcacgactactgtttacagactgaaaaattattgctttttatactactgagatcctaagttaagactctccaaagcaaacatttggtttaaatcatttatctgatgtagataaaaggtagagaaacttgtagtgttctccacataatggaaaatgtacaaatgcctagttgtgttgcccatcaattttgtatattttcataattttaattgttgaaaattgcattatattttgcaatcactatgttcaatctggatttgtctttcattttaacttttaatataaaaaggggtttcaatgta

SEQ ID NO: 71883 - DNA, 4867 bp, Homo sapiens
taacgctagtacgagccggcggtgaaattcggctcagatgactggcagttctatctgacttatttcgattctgtctttcgactgattgaagaggcctggagtcctcctgctgaaggtgaacactctttagaaggagaagtacattattctgcagaaaaagctgtgaagtttatagaagatcggataacggaagaatctaaaagttctcgccatctccgaggaccacatctagctaaattggagctgattaggcgtttacgaagtcaaggttgtaacgatgagtacaaactgggtgatccagaagaattaatgttccagtattttaaaaagtttggcgataaaccttgttgttttacagaccttaaggtgtttgttgacctcttacctgctacacagtgtacaaaatttattaatcagttacttggagttgttcctttgtcgacaccaacagaggataagctggcactgcctgctgacatcagagctctgcagcaacatttgtgtgtggtgcagctgacgaggttacttggcttgtaccacaccatggataaaaatcagaaattgagtgtggtcagagaattgatgttaaggtaccagcatggactggaatttgggaaaacctgtttgaaaacagaattgcaattttctgactattactgtctccttgctgtccatgcgcttattgatgtatggagggaaacaggtgatgagaccactgtgtggcaggccctgactttgctggaagagggattaacccatagcccttccaatgctcagttcaaattgctgcttgttcgaatctactgtatgctgggtgcatttgaaccagtggtggatctttactccagcctcgatgctaagcatatccagcatgataccattggttatcttttgacccgatatgctgaatctctaggtcagtatgctgctgcgtcccaatcctgtaacttcgcactcaggttttttcactccaaccagaaagatacctcagaatatattattcaagcttacaaatatggtgcatttgagaagatcccagagtttatcgcttttaggaacaggctgaataattctcttcattttgcacaagtccgtactgaacggatgctgttagaccttctacttgaagcaaatatatcaaccagtttagcagaaagtataaagtcaatgaaccttaggccagaagaagatgacattccatgggaagatttgcgagacaacagagacttaaatgtttttttcagctgggatccaaaagacagggacgtttctgaagaacataagaaactttccttagaggaggagaccttgtggttaagaatccgatccttaacattgaggctgataagtggacttccaagtctcaaccaccctgtggagccaaagaactcggagaagactgccgagaatggggtatcctcccggattgatattcttcgtttgctccttcaacagctggaggcaaccctggagacaggaaagcgatttattgagaaggatattcagtatcctttccttggtcctgtacctaccagaatgggtggattctttaattctggctgttctcagtgccagataagctctttttatcttgtcaatgatatttatgagctggataccagtggtttagaggatacaatggagattcaggaacgaatagaaaatagttttaagtctttactagaccagttaaaagatgtcttcagtaaatgtaaaggtgacctcttagaagttaaagatggtaacttgaaaacacatcctactcttttagaaaatctagttttctttgttgagactatttctgttatcctttgggtatccagttactgtgagagtgtcctacgaccatacaaactaaatttacagaaaaagaaaaagaagaaaaaagaaaccagcatcatcatgccacctgtctttaccagtttccaagactatgttactgggcttcagactttaatttccaatgttgtggatcatattaaagggcttgaaacacatctaattgcacttaaacttgaagaacttattttagaagacacttctctctcaccggaagagagaaaattttcaaagactgtgcaagggaaggtgcagagcagttatctgcactcacttctggaaatgggggagctgctgaaaaaaagacttgagaccacaaagaaactaaaaatttaaggaagtatctatcatgggcactgatgactctgcaacagaatatgacaccatcttcccaggcaaaagcaacatctggttgaccatgattttaatccagaacttcctcataaaatgcatgaaggactttgatcgtgaatttttttaggtgttaaatatatacaactgattaaattattgtatataaaccagaagcgggaccctcatctgggtttgaccactttttatacatgttcatatgcatatggcagcaacaagagaaccctacttttcttcttcccatcaccagaaacatcttttcaggggagcggggggtctataaaaacagcaatagaaattaagcataaagcatcaacctcatagcaactgaatagcccttccattataaataacattgagagtttttggtctggtccttgagccacaagaagtggaggggagaccatgcctgggaacagacccccttttcacagcagtaagtttgttttgaggctttctcagctacttggctcccacagaacccaaggcaggtacacaaaggaccttagatgagatctggcatatgcacccgcaatagaagggcaccacttggatgaccacaggcacttagtttttggctagtttttgtctgatagttaagacatccccatcctagcttctgtgagagttaaaaatctcaggtaagaaggcaaggaaggctctgttaatttatagctgtttagaggggaaagcagtgcagaccacttattaagcccgctgaggactagctttctgtctttcatacatttgggaaagataggaatgactgtttcaaagaagagaggtgcacataatttatgcaggcaagtatgatacttatttcattggttttgtgagtcatatatatacatatatatatatacacatatatatatgacttgaaaattaagatttaatactttaatgttttaagtgtggggggtttgggaaggaaggaatgtaatattatggatttagccttaggctttaagttttaggctggcaaaagaaatgttattcagtgggtttgaggtttggactactttcttcaaacttagagaattataacaggatggtgtttactttgttcacctggatgtccccaagactctagcttcttctatcagtggttggtctgatagaagaggtaaaaattgctcttgaaaatgtcctacaatttatgcagtttctttgataatatttttctgtttaaatccctgcttctgtttttggtctgttacctaaatatagttcaagtttaattctgtaagagcaaagaaatgaatttgatgaggaaattaagcatccaatggaggattggtcttgaagaccttaaaggtgctttccaacctgcactgctccagtgaaatgtggtacttttttcttttaaaagcaaccaagagagctgggaatatctgtgtacgcaaagtaattgcattttgtcccttcattttgactttcttagattcataatttgatacagtgcttaaacttccaaggaaattttaaacaattactacattacctgttcaaaataaggcttgttggaaatcctagtccatcaactaatttcaaaaatttatttttgatatgagtagcaacagctggtcatataccctatcccaaaaggaagaactgtcttgaacaagatgaatggaaaattgtggttaattctgaatttcatgtaatgacaacatattctttcataaaactatggcctgtttaagatggaactttgtgtgtgtctgctggggagggtggggtacatgtgtatggcgtgtgttcttgaaatgatgtctctctgaatatccaaaaaagtactgtactgtagaaatgctctttgaaaaagtctatcgactgaccatgatcaatctagcatatgtatgttcagtgggctagccttggtcctcagggacagtgtgtgactctagtggtcttcctaaccagtctcttgcctaaagatatctgggacctctactggctttaatgacaaataatgttatgttgaggttatgcttcctttgttatttgctgattttcctactaaatgtagcatttcaattagatccagctttcacattttgagataattgtaaaaagaatgaaattatgcagaaatggccaatatctcttatcaatctgttcttttggaaaccctcatgtactataaattgtgtacagttaaaaaaatatatatatatatatattcttacatgagtaaaaagcaccctctcccagcaatcgtatgccattggtatttgaagagaattcccaaataacccattgctgctgctgctgtttttgatttgtatgggtttttttgttttgtttgtttttgtgtggtaaactgatatttaaaaaaggaaaggagaaaaatcacgactactgtttacagactgaaaaattattgctttttatactactgagatcctaagttaagactctccaaagcaaacatttggtttaaatcatttatctgatgtagataaaaggtagagaaacttgtagtgttctccacataatggaaaatgtacaaatgcctagttgtgttgcccatcaattttgtatattttcataattttaattgttgaaaattgcattatattttgcaatcactatgttcaatctggatttgtctttcattttaacttttaatataaaaaggggtttcaatgta

SEQ ID NO: 71884 - DNA, 3637 bp, Homo sapiens
taagtgaatgagtaataagcggacatatatgtacatgcacacactgtagtataggagaagacatataaacagctaatttgatacagtgcaggatatgtactgatcaactgggtagattttgccatacatatgtaagttaagatttgcaggtaaggtggtatcttacctgcttggagagatgtgacgggagaggcatattgtaaagaacctttggattccatgcctaggaatttggactcttctctgagtgaaaaggatgttaaatcagtccccacttcttcagggaagtgacagaaaattggagtgaagtggaggatggattttgagctaggagagccagaagaaatgctgaagagttaggccattgtagtattctgagcaggagatgatgaaggcctggatcagtagagtgattgcagaaagtagagtggagattcacatgagaaattgaagggatttacatagaagaactgcgttagaatttgttgaatccattgcctctaatttcctgatagatatttttagtgtaatccttattggtgaatttgcaatttttcctttcagactatttctgttatcctttgggtatccagttactgtgagagtgtcctacgaccatacaaactaaatttacagaaaaagaaaaagaagaaaaaagaaaccagcatcatcatgccacctgtctttaccagtttccaagactatgttactgggcttcagactttaatttccaatgttgtggatcatattaaagggcttgaaacacatctaattgcacttaaacttgaagaacttattttagaagacacttctctctcaccggaagagagaaaattttcaaagactgtgcaagggaaggtgcagagcagttatctgcactcacttctggaaatgggggagctgctgaaaaaaagacttgagaccacaaagaaactaaaaatttaaggaagtatctatcatgggcactgatgactctgcaacagaatatgacaccatcttcccaggcaaaagcaacatctggttgaccatgattttaatccagaacttcctcataaaatgcatgaaggactttgatcgtgaatttttttaggtgttaaatatatacaactgattaaattattgtatataaaccagaagcgggaccctcatctgggtttgaccactttttatacatgttcatatgcatatggcagcaacaagagaaccctacttttcttcttcccatcaccagaaacatcttttcaggggagcggggggtctataaaaacagcaatagaaattaagcataaagcatcaacctcatagcaactgaatagcccttccattataaataacattgagagtttttggtctggtccttgagccacaagaagtggaggggagaccatgcctgggaacagacccccttttcacagcagtaagtttgttttgaggctttctcagctacttggctcccacagaacccaaggcaggtacacaaaggaccttagatgagatctggcatatgcacccgcaatagaagggcaccacttggatgaccacaggcacttagtttttggctagtttttgtctgatagttaagacatccccatcctagcttctgtgagagttaaaaatctcaggtaagaaggcaaggaaggctctgttaatttatagctgtttagaggggaaagcagtgcagaccacttattaagcccgctgaggactagctttctgtctttcatacatttgggaaagataggaatgactgtttcaaagaagagaggtgcacataatttatgcaggcaagtatgatacttatttcattggttttgtgagtcatatatatacatatatatatatacacatatatatatgacttgaaaattaagatttaatactttaatgttttaagtgtggggggtttgggaaggaaggaatgtaatattatggatttagccttaggctttaagttttaggctggcaaaagaaatgttattcagtgggtttgaggtttggactactttcttcaaacttagagaattataacaggatggtgtttactttgttcacctggatgtccccaagactctagcttcttctatcagtggttggtctgatagaagaggtaaaaattgctcttgaaaatgtcctacaatttatgcagtttctttgataatatttttctgtttaaatccctgcttctgtttttggtctgttacctaaatatagttcaagtttaattctgtaagagcaaagaaatgaatttgatgaggaaattaagcatccaatggaggattggtcttgaagaccttaaaggtgctttccaacctgcactgctccagtgaaatgtggtacttttttcttttaaaagcaaccaagagagctgggaatatctgtgtacgcaaagtaattgcattttgtcccttcattttgactttcttagattcataatttgatacagtgcttaaacttccaaggaaattttaaacaattactacattacctgttcaaaataaggcttgttggaaatcctagtccatcaactaatttcaaaaatttatttttgatatgagtagcaacagctggtcatataccctatcccaaaaggaagaactgtcttgaacaagatgaatggaaaattgtggttaattctgaatttcatgtaatgacaacatattctttcataaaactatggcctgtttaagatggaactttgtgtgtgtctgctggggagggtggggtacatgtgtatggcgtgtgttcttgaaatgatgtctctctgaatatccaaaaaagtactgtactgtagaaatgctctttgaaaaagtctatcgactgaccatgatcaatctagcatatgtatgttcagtgggctagccttggtcctcagggacagtgtgtgactctagtggtcttcctaaccagtctcttgcctaaagatatctgggacctctactggctttaatgacaaataatgttatgttgaggttatgcttcctttgttatttgctgattttcctactaaatgtagcatttcaattagatccagctttcacattttgagataattgtaaaaagaatgaaattatgcagaaatggccaatatctcttatcaatctgttcttttggaaaccctcatgtactataaattgtgtacagttaaaaaaatatatatatatatatattcttacatgagtaaaaagcaccctctcccagcaatcgtatgccattggtatttgaagagaattcccaaataacccattgctgctgctgctgtttttgatttgtatgggtttttttgttttgtttgtttttgtgtggtaaactgatatttaaaaaaggaaaggagaaaaatcacgactactgtttacagactgaaaaattattgctttttatactactgagatcctaagttaagactctccaaagcaaacatttggtttaaatcatttatctgatgtagataaaaggtagagaaacttgtagtgttctccacataatggaaaatgtacaaatgcctagttgtgttgcccatcaattttgtatattttcataattttaattgttgaaaattgcattatattttgcaatcactatgttcaatctggatttgtctttcattttaacttttaatataaaaaggggtttcaatgta

SEQ ID NO: 71885 - DNA, 3355 bp, Homo sapiens
atggctttttaaagaacttacaatggatagtctatcctttggagtttggttcattatggaaaatgaaaaacaaatagctttctaaattaaatttttatttgcttattctttatttgtgtgttgtgttccttaaaatagcattgaaacaaaagctgaataaaactaaaatgttttttgttttcagatgtcttcagtaaatgtaaaggtgacctcttagaagttaaagatggtaacttgaaaacacatcctactcttttagaaaatctagttttctttgttgagactatttctgttatcctttgggtatccagttactgtgagagtgtcctacgaccatacaaactaaatttacagaaaaagaaaaagaagaaaaaagaaaccagcatcatcatgccacctgtctttaccagtttccaagactatgttactgggcttcagactttaatttccaatgttgtggatcatattaaagggcttgaaacacatctaattgcacttaaacttgaagaacttattttagaagacacttctctctcaccggaagagagaaaattttcaaagactgtgcaagggaaggtgcagagcagttatctgcactcacttctggaaatgggggagctgctgaaaaaaagacttgagaccacaaagaaactaaaaatttaaggaagtatctatcatgggcactgatgactctgcaacagaatatgacaccatcttcccaggcaaaagcaacatctggttgaccatgattttaatccagaacttcctcataaaatgcatgaaggactttgatcgtgaatttttttaggtgttaaatatatacaactgattaaattattgtatataaaccagaagcgggaccctcatctgggtttgaccactttttatacatgttcatatgcatatggcagcaacaagagaaccctacttttcttcttcccatcaccagaaacatcttttcaggggagcggggggtctataaaaacagcaatagaaattaagcataaagcatcaacctcatagcaactgaatagcccttccattataaataacattgagagtttttggtctggtccttgagccacaagaagtggaggggagaccatgcctgggaacagacccccttttcacagcagtaagtttgttttgaggctttctcagctacttggctcccacagaacccaaggcaggtacacaaaggaccttagatgagatctggcatatgcacccgcaatagaagggcaccacttggatgaccacaggcacttagtttttggctagtttttgtctgatagttaagacatccccatcctagcttctgtgagagttaaaaatctcaggtaagaaggcaaggaaggctctgttaatttatagctgtttagaggggaaagcagtgcagaccacttattaagcccgctgaggactagctttctgtctttcatacatttgggaaagataggaatgactgtttcaaagaagagaggtgcacataatttatgcaggcaagtatgatacttatttcattggttttgtgagtcatatatatacatatatatatatacacatatatatatgacttgaaaattaagatttaatactttaatgttttaagtgtggggggtttgggaaggaaggaatgtaatattatggatttagccttaggctttaagttttaggctggcaaaagaaatgttattcagtgggtttgaggtttggactactttcttcaaacttagagaattataacaggatggtgtttactttgttcacctggatgtccccaagactctagcttcttctatcagtggttggtctgatagaagaggtaaaaattgctcttgaaaatgtcctacaatttatgcagtttctttgataatatttttctgtttaaatccctgcttctgtttttggtctgttacctaaatatagttcaagtttaattctgtaagagcaaagaaatgaatttgatgaggaaattaagcatccaatggaggattggtcttgaagaccttaaaggtgctttccaacctgcactgctccagtgaaatgtggtacttttttcttttaaaagcaaccaagagagctgggaatatctgtgtacgcaaagtaattgcattttgtcccttcattttgactttcttagattcataatttgatacagtgcttaaacttccaaggaaattttaaacaattactacattacctgttcaaaataaggcttgttggaaatcctagtccatcaactaatttcaaaaatttatttttgatatgagtagcaacagctggtcatataccctatcccaaaaggaagaactgtcttgaacaagatgaatggaaaattgtggttaattctgaatttcatgtaatgacaacatattctttcataaaactatggcctgtttaagatggaactttgtgtgtgtctgctggggagggtggggtacatgtgtatggcgtgtgttcttgaaatgatgtctctctgaatatccaaaaaagtactgtactgtagaaatgctctttgaaaaagtctatcgactgaccatgatcaatctagcatatgtatgttcagtgggctagccttggtcctcagggacagtgtgtgactctagtggtcttcctaaccagtctcttgcctaaagatatctgggacctctactggctttaatgacaaataatgttatgttgaggttatgcttcctttgttatttgctgattttcctactaaatgtagcatttcaattagatccagctttcacattttgagataattgtaaaaagaatgaaattatgcagaaatggccaatatctcttatcaatctgttcttttggaaaccctcatgtactataaattgtgtacagttaaaaaaatatatatatatatatattcttacatgagtaaaaagcaccctctcccagcaatcgtatgccattggtatttgaagagaattcccaaataacccattgctgctgctgctgtttttgatttgtatgggtttttttgttttgtttgtttttgtgtggtaaactgatatttaaaaaaggaaaggagaaaaatcacgactactgtttacagactgaaaaattattgctttttatactactgagatcctaagttaagactctccaaagcaaacatttggtttaaatcatttatctgatgtagataaaaggtagagaaacttgtagtgttctccacataatggaaaatgtacaaatgcctagttgtgttgcccatcaattttgtatattttcataattttaattgttgaaaattgcattatattttgcaatcactatgttcaatctggatttgtctttcattttaacttttaatataaaaaggggtttcaatgta

SEQ ID NO: 71886 - DNA, 3086 bp, Homo sapiens
actgtggttctgcgcttgtcatcatggcgacgcggggccatgtgcaggaccctaacgacaggcgcctccggcccatttacgattatcttgacaatggtaataataaaatggcaattcagcaagcagataaactgttgaagaaacataaggatcttcattgtgctaaggttttaaaggcaattggtttacagagaactggaaagcaagaggaagcctttactcttgcacaggaggtggcagcccttgaacccacagatgacaactcactgcaggcactgactatcctttaccgggagatgcaccgaccggagttagttacaaaactttatgaggcagctgtgaagaaagttcccaatagtgaggagtatcactctcacctcttcatggcctatgccagagtgggtgaatacaagaaaatgcaacaggctggcatggctctatataagattgtccccaaaaatccctactacttttggtctgtgatgagcttaattatgcaatctatatcggcacaggatgaaaacctctcaaaaacaatgtttctgccccttgctgagagaatggtcgaaaaaatggtgaaagaggacaagatagaagctgaggctgaagttgaactttattatatgatcctggaacgtttgggaaagtaccaggaggccttggatgtcatcagagggaaattaggagagaagttgacaagtgagattcagagtcgggaaaataaatgcatggctatgtacaagaagctgagcaggtggccagagtgcaatgccctttcccggcgcctcttactaaaaaactcagatgactggcagttctatctgacttatttcgattctgtctttcgactgattgaagaggcctggagtcctcctgctgaaggtgaacactctttagaaggagaagtacattattctgcagaaaaagctgtgaagtttatagaagatcggataacggaagaatctaaaagttctcgccatctccgaggaccacatctagctaaattggagctgattaggcgtttacgaagtcaaggttgtaacgatgagtacaaactgggtgatccagaagaattaatgttccagtattttaaaaagtttggcgataaaccttgttgttttacagaccttaaggtgtttgttgacctcttacctgctacacagtgtacaaaatttattaatcagttacttggagttgttcctttgtcgacaccaacagaggataagctggcactgcctgctgacatcagagctctgcagcaacatttgtgtgtggtgcagctgacgaggttacttggcttgtaccacaccatggataaaaatcagaaattgagtgtggtcagagaattgatgttaaggtaccagcatggactggaatttgggaaaacctgtttgaaaacagaattgcaattttctgactattactgtctccttgctgtccatgcgcttattgatgtatggagggaaacaggtgatgagaccactgtgtggcaggccctgactttgctggaagagggattaacccatagcccttccaatgctcagttcaaattgctgcttgttcgaatctactgtatgctgggtgcatttgaaccagtggtggatctttactccagcctcgatgctaagcatatccagcatgataccattggttatcttttgacccgatatgctgaatctctaggtcagtatgctgctgcgtcccaatcctgtaacttcgcactcaggttttttcactccaaccagaaagatacctcagaatatattattcaagcttacaaatatggtgcatttgagaagatcccagagtttatcgcttttaggaacaggctgaataattctcttcattttgcacaagtccgtactgaacggatgctgttagaccttctacttgaagcaaatatatcaaccagtttagcagaaagtataaagtcaatgaaccttaggccagaagaagatgacattccatgggaagatttgcgagacaacagagacttaaatgtttttttcagctgggatccaaaagacagggacgtttctgaagaacataagaaactttccttagaggaggagaccttgtggttaagaatccgatccttaacattgaggctgataagtggacttccaagtctcaaccaccctgtggagccaaagaactcggagaagactgccgagaatggggtatcctcccggattgatattcttcgtttgctccttcaacagctggaggcaaccctggagacaggaaagcgatttattgagaaggatattcagtatcctttccttggtcctgtacctaccagaatgggtggattctttaattctggctgttctcagtgccagataagctctttttatcttgtcaatgatatttatgagctggataccagtggtttagaggatacaatggagattcaggaacgaatagaaaatagttttaagtctttactagaccagttaaaagatgtcttcagtaaatgtaaaggtgacctcttagaagttaaagatggtaacttgaaaacacatcctactcttttagaaaatctagttttctttgttgaggtaagtttttgttctcttcctaaaagacattgttgttcttaatggtctacaggattcatttttcaacagtgaacaggtaataggcaccttatacctgtaacttaaccctccatccctgtttttgttaattgaaaagcaatttaaatcattttctaaaccaatttcttccaagaattctaagatgatttcattcataatacttaggtaaaacttcttgaaatttgctgtactcatctctaaacttccccagattcacctcaaatctagctgttttcattctcctttctgactcactctttattatgtagtttaattcctccagcttcttttatttgttgtcatttattaattgctaagatattatgcattgtgatagtgtccagcaactgatacagcaaaactccctcctctttttttgccagagggaagagaaggaagattgcaaacactcataatctattatcttttcttttatttctgtcacatatttgttgactgttctccccttactactctgtgtgggga

SEQ ID NO: 71887 - DNA, 2260 bp, Homo sapiens
actgtggttctgcgcttgtcatcatggcgacgcggggccatgtgcaggaccctaacgacaggcgcctccggcccatttacgattatcttgacaatggtaataataaaatggcaattcagcaagcagataaactgttgaagaaacataaggatcttcattgtgctaaggttttaaaggcaattggtttacagagaactggaaagcaagaggaagcctttactcttgcacaggaggtggcagcccttgaacccacagatgacaactcactgcaggcactgactatcctttaccgggagatgcaccgaccggagttagttacaaaactttatgaggcagctgtgaagaaagttcccaatagtgaggagtatcactctcacctcttcatggcctatgccagagtgggtgaatacaagaaaatgcaacaggctggcatggctctatataagattgtccccaaaaatccctactacttttggtctgtgatgagcttaattatgcaatctatatcggcacaggatgaaaacctctcaaaaacaatgtttctgccccttgctgagagaatggtcgaaaaaatggtgaaagaggacaagatagaagctgaggctgaagttgaactttattatatgatcctggaacgtttgggaaagtaccaggaggccttggatgtcatcagagggaaattaggagagaagttgacaagtgagattcagagtcgggaaaataaatgcatggctatgtacaagaagctgagcaggtggccagagtgcaatgccctttcccggcgcctcttactaaaaaactcagatgactggcagttctatctgacttatttcgattctgtctttcgactgattgaagaggcctggagtcctcctgctgaaggtgaacactctttagaaggagaagtacattattctgcagaaaaagctgtgaagtttatagaagatcggataacggaagaatctaaaagttctcgccatctccgaggaccacatctagctaaattggagctgattaggcgtttacgaagtcaaggttgtaacgatgagtacaaactgggtgatccagaagaattaatgttccagtattttaaaaagtttggcgataaaccttgttgttttacagaccttaaggtgtttgttgacctcttacctgctacacagtgtacaaaatttattaatcagttacttggagttgttcctttgtcgacaccaacagaggataagctggcactgcctgctgacatcagagctctgcagcaacatttgtgtgtggtgcagctgacgaggttacttggcttgtaccacaccatggataaaaatcagaaattgagtgtggtcagagaattgatgttaaggtaccagcatggactggaatttgggaaaacctgtttgaaaacagaattgcaattttctgactattactgtctccttgctgtccatgcgcttattgatgtatggagggaaacaggtgatgagaccactgtgtggcaggccctgactttgctggaagagggattaacccatagcccttccaatgctcagttcaaattgctgcttgttcgaatctactgtatgctgggtgcatttgaaccagtggtggatctttactccagcctcgatgctaagcatatccagcatgataccattggttatcttttgacccgatatgctgaatctctaggtcagtatgctgctgcgtcccaatcctgtaacttcgcactcaggttttttcactccaaccagaaagatgtaagtgaaaaactattttttaactgtgatcttgtctgctgactgcacactattgaggagcacgtcaccacatgtcacaagtacacatgttaaggtgcaccatgctgaactagcaagtgcccttagaccaaagcttactgtccaaggctggtagggagaggtagagagttatttgtgtttgttagaatgggcgtgtttaatagaatccttggaaagttgcatttaaaaactggtatttactgactaggaagtgttagtcctcttagacctggcttttaatctctaagagacttttccaagggtataagaaacagtccataagcgttcatagcctgggatgccgtgtaacatcctgcaatagcagctgctctctgttacttttatttaactctgaaatgtatgtccattgtgctctttgccaaaggtgaatgtacttgtattttcttagaaaattaaaaggcattccgagaaacctaggtgaataatatgttttttaaagtagcaataaa

SEQ ID NO: 71888 - DNA, 172 bp, Homo sapiens
acgaccatacaaactaaatttacagaaaaagaaaaagaagaaaaaagaaaccagcatcatcatggtaataacagtaacacaagtgatatacaaggaacaatctgaccacatgctactttttcttttcactgttttcctccatgttgagtccttaggatcctatatgccaagc

SEQ ID NO: 71889 - DNA, 389 bp, Homo sapiens
aaagattttttaattaacttggacaaaagtatgaaatttctactatgctcaatttgcttccaataaatggaattaaagggggcagataacaatattccttaagtgttctggattttatttactcattgtaatgtaaacagagactcatatcccactaatttgggggctttgtttctataactcaccttctaatgacaatggctgggcaaatgaatactaccttgctccaccccaatttggtccttgtcagcatcaatcccagtgaattttcactttctttcctttccaaatcaaggctttgctctataataacccattcagaaaagtgattactgaagttttggtaacagctttcaaaaaaataccctacagcaatttggaataatctg

SEQ ID NO: 71890 - DNA, 572 bp, Homo sapiens
ctttcttattgttacaagatttcaaaggagggcttctcctcaaattctacactgcggagctcccttcccactccacagaagctccgacagcatccacagttgtccatgtgcagcacaacaaatcaagccaggcagatctcccattggcactagttaccaacttcctagagaaacccatcaatctcaaaattcctgctctagcaagtcctggaaaagagactagagcccaaatgccttcactctgccaagggagcttccctttttgtgtgtctgtgccatggacttcttgaagtagggaagcctgtggaccccttctcactgtgatgttttttaaatgcataaaatagaacatggagtatttcaaagaaaaccaattacattgaaatacaatgaccaaatattttaaaaatgaatttgtgttatagtaatatatgtttctataataatgctttaaataacaatagcagcagatctaaacaattgaaatgtctaaatggtgagcgtaagtcacatgctgagacgtctgcaacaacaaactcataggtacagctgatactaggaaatattaattt

SEQ ID NO: 71891 - DNA, 324 bp, Homo sapiens
cccagtccaagcagtacctttatattcattgggatttgggctagctgttgaaacaaaggctaggataataaaatagattatttttatctatgcaggcagcctctgtgcaagctgtccagtacatgcacggaggcctcattgtgctggggacccagacaccttctttctcattgctctgttaccctcgtacagggtttctgcctcgtggtctgaggaggctgctcttgctcccactgtcgtatctatattccagccaccgggaagggaggagggcatgatctgaaattagcagacctcactctgctcgtgtcatatgtttataac

SEQ ID NO: 71892 - DNA, 410 bp, Homo sapiens
tataacattaccttcaggctatgtgtaaaaagtgtatataaaatgtaaatgaatttcatggttagactggagtcccatccccaagatatctctttatggatatgcaaatattctaaaatccaaaaaatcgaaaacactttcagtctcaagcatttcagataagagatacttaacctgtatatcgcttaagaaaatgtttcctgaggaaaccatcacacgaagggatacatctctgttagccaatgcagccataaataaaaatgttaatgaggtaaaattggtcatgatgaaggtaaaacaatatcaagaaactgaaaaagttcttgttaagcttaattcattttgacatattttgaaaaaagtctcagatgcattgtagcaaatcttaattaaaccagaaatccattata

SEQ ID NO: 71893 - DNA, 262 bp, Homo sapiens
gtagagatggagttccgccatattccccaggctgataggctggtcttgaactcctgggcttaagtgatctgcccccctcagcctctcaaaatgctgacattataggcgtgagccactatgcttcgccagatcttcttgtttttgtttttgctaaatcttttgttgttgttgttgttgttgttttgagatggactctcgctctgtcgcccaggctggagtgcagtggcgccatctcagctcactgcaacctccacctcccagg

SEQ ID NO: 71894 - DNA, 753 bp, Homo sapiens
atcagaaaacaattagcaaaataacaagaatagatctttacttaacaacattgaatgtatatggtttaagttcccattaaaacttagacactggctgaatggatgtaaaaaaagaagaccgaattctatgctacctacaagaaactcaacttcacctgtaaaaagcacaatagactaaatgtaaagggaaggaaaaatcccatgtaaatggaaaccaagagcgtacagaagcagttattttagacaaaatatactttgtaaaaaaccataaaaagagacaaggtcaatatcaaatgataaagggatcaattcagcgaaaggatataacaattgtaaatatgtacctaatactggagcacccagatatatgaagtaaatattgttaaagatagagaaacagactccaatacaatagtagttggggacttcagcacaccagattcaccactggacagatcatctagacagaaaacaaacattggacttaatctgcacggtagaccaaaggaacctaataaacatttaaacaacattttatccaacagctgcagaatatgcattcttcacctcagcacgtgaaacactcttcagaaaagaccatatgttaggccacaaaacaagtctcaaaaaaatttttaaatagtaattatatccagtattttctcacaccacaattgaataaaactagaaatcaataacaaggaactttggaaactgtacaaatacatggaaattaaacaacactctcctgaa

SEQ ID NO: 71895 - DNA, 915 bp, Homo sapiens
ccaggtataggtcttgctcttataccttatcctggctacctgccagtactccagcttccccacagctgaggtcttctttgcattcggccaaacccttttctgactccaggccccaagggtgcgagcctatcacctgatatgaacttcctccctcctctagtctgcctgaatcctccattaccaccttcatcccaccctattccaccttgcccctgtctgctgagccatctgcatttgctgaacctcgctaaggcatagtctgccaacattgtctgctgggggtacagagagagcctccctctccctgtgtctcgagttcagcacctattccaccttagtaagcctgtgaggctttccaggcatctctcccaagctggtctgtcccttgtcttcagggctcctgttctgacactgggcccatgggaggtacaagttttgagtcctgtaaaaagaaaaaagaaggaagtgtccttcacacaacttctgacctttttcttcacttcctggtgtgttagtgtgtaagagagagagagagtgtgtgtgtgtgtgtgtgtgtgtgatgtttagggtctgaggatattcaaagtggaaaagggtataagagctaggtaatttttattttgtgactaggcaaaggcagtctaaaaaactgacctatggagacaattttagttctcttctacctgttaatgtaagagatgtaaaaactaaagtctttcttttcaaagtgactactagaaaatccttttggactgtaggtaatacagaatgtttataatcagaccaacaaaatactattcctacacattgttttctatgacctagaaataaggatgttacagatccttctttgtaatggaatttgttgtcctaagatcatacccattgtaaaatttaggacttttcgttggtaaa

SEQ ID NO: 71896 - DNA, 127 bp, Homo sapiens
attctacccaggaactgtggcccttatgtccatgcattgcagctttaagaaaggataataaacaatccagatagaccagacgcatcctgctccaaggattatttagatgagaaatcagtttgcgtga

SEQ ID NO: 71897 - DNA, 432 bp, Homo sapiens
aggatggccattagggatcagggatgctaatgaaacatcaacaatgttaccttgtaaaattttgaacaaatactactattagataaaacttttaatttgaaactaaaagaagtgaagcgtatgtctgtgttttagatttgccttttttgaacaaaaggttcattcagtcaaacatgaagtcaacacactcaggaaagtgtcaggatttccagattgtgggtctttcttctgattcgagttgcatcagccacggttctaaggagaattctactcccaagatcagcattctagtggaatcataaaaggtcccacaccaccatcagtgaacttaggatctccatggggatgtttacccaaaactcaaactgaaaaatgtaaccttccagccaggcacggtggcttacacctgtaatcccagcactttgagaagcc

SEQ ID NO: 71898 - DNA, 745 bp, Homo sapiens
gctcctggttcactgcagattatcaatcagtggaaagtgatagaagcaatggatcagcagaatgggtatagaggcaatgttcagtctttgtatggtggaaagtggagctgatgaggttaatttgcacggtgtgaccagccttggcttaaagcaggctctggagtttgcatacacaggacaggccatgcctcttctgcaagactatacaacatccttgctcctctgatgggagctgcactaatttcgtgaatgtcagtcaaagcctccttccttgaggagttggcgaaagacgggtttctctttctgactagatggaaaaggagatataaagatttttcagaataagatgagtattttgctggagccaggtgtgatccaggatgtgctagcagcgggcagtcacctacagctgttggagcttctcaatttatgctcccactatctcatccaggaattaaatagctttaattacttggatctgtacagacttgctgacctctttaacctcactttgttggagaaggcagtgatcgatttcttagtgaaacatctctctgaactcctgaagagccgcccagaagaagttctaacgcttccctattgcctgcttcaggaggtgctgaagagcgaccgcctgacctccctgagtgaagagcagatctggcaggtggagtaactaatacggcacaatatcagaacaggctaatggtgtatgaacctaaccaggtaagaatcatgtaagaac

SEQ ID NO: 71899 - DNA, 3684 bp, Homo sapiens
gtttccccgcgcgacagttcgggagcgcgcaggcagtcgcgcgcacacacgcacgcaggcacacacacacacacacacacacacacacacacactttcgcacacacaaacacgctaggacgctcgtcttcgctactgcatccccgaaccagcagagcgaagctactgcgggttctgttaacctcagcatcgtggggcgaagcagagccattgtgcatcaaggagaggccggtgcctgcgctgccgtctctggcacctaacccagcagaccgctcaccccatcggctggaatgcttgctgattcctctgcacacttctaaggctgagaacctgaggaacccagctggaaaatgccgtctgaacgctgcctcagtattcaagaaatgctgacaggccagaggctctgccactccgaatctcacaatgacagtgtcctggcagcgctgaatcagcagaggagtgatggcatcctctgcgacatcaccctgattgctgaggaacagaaattccatgctcacaaggcagtcctagcagcatgcagtgactatttccgggcaatgttcagtctttgtatggtggaaagtggagctgatgaggttaatttgcacggtgtgaccagccttggcttaaagcaggctctggagtttgcatacacaggacagattttgctggagccaggtgtgatccaggatgtgctagcagcgggcagtcacctacagctgttggagcttctcaatttatgctcccactatctcatccaggaattaaatagctttaattacttggatctgtacagacttgctgacctctttaacctcactttgttggagaaggcagtgatcgatttcttagtgaaacatctctctgaactcctgaagagccgcccagaagaagttctaacgcttccctattgcctgcttcaggaggtgctgaagagcgaccgcctgacctccctgagtgaagagcagatctggcagctagctgtgaggtggttggaacacaactgccactaccagtacatggacgagctcctgcaatacatccgctttggcctaatggatgtggatactctccatacagttgccctgtcccacccccttgtccaagcaagtgagactgcaacagcccttgtcaacgaggccctggaataccaccagagcatctatgcacagcctgtctggcagactcgcaggaccaaaccacgattccagtcagacactctgtatatcattggtgggaaaaagcgcgaggtctgcaaggtcaaggaacttcggtacttcaatcctgttgatcaggagaatgctctcatagctgccattgccaactggagtgagctggctcccatgcctgtgggaaggagccaccattgtgtggcagtcatgggggacttcctgtttgtggcaggaggggaagttgagcatgccagtggccggacgtgtgctgtgaggactgcctgtcgctatgacccccgcagtaattcctgggcagagatagcacccatgaaaaactgccgggagcattttgtgctgggtgccatggaggaatacctctatgcagttgggggcagaaatgaactgcgccaggttctgcctacagttgagcgatattgccccaagaagaacaaatggacttttgttcagtcctttgacagatccctttcatgccatgctggatatgtggctgatggtcttctttggatatcaggtggagtaactaatacggcacaatatcagaacaggctaatggtgtatgaacctaaccagaataagtggataagccgtagccccatgctgcagagaagggtctaccattccatggctgctgtacaaaggaagctttatgttcttggaggcaatgacctagactacaataatgaccggatccttgtgcgccatatagattcttacaacatagacactgaccagtggacacgttgtaatttcaacctgctgactggccaaaatgaatctggagttgctgtccataatgggagaatatatttagttggtggatattcaatttggacaaatgagcctctggcttgtatccaggtactggatgtaagcagagaaggcaaagaagaagtattctatgggcctacactcccttttgcttccaatggaatagcagcatgcttccttccagctccatattttacatgccctaaccttcaaactcttcaagtgcctcatcacaggattggcaccatctgaaaagccaagccatcatgaacaggaggaaaacatagctctgactgttggatactgggcatgaaaagactcagtgctccatgcttccttgtcttgctttataggtcttatattcggataaatttaagcaaaaaatgaacaattttctaaaatacgttattgaaaactcgtcacccttctcagtgtatgtcaacattcaatatgtatgacttttattgtggtatagcttagtgccaatttaaggtatattgtgttccatgggtctttagagcattctttgtacactttttctaatcagcactgtcttaagacaacataacactgttagtaaggcaatttattggacacaatggcatcgatgatcttaaaaatatatatattctgtacttaatccctttattatttaaagccgggcttgtaatttttctttttaaaatttaacattatgcagccctgctcagtagagactcactcagcattatgacatcataaatttttaaatgccatattttattcaaggtgatacgaataataatagacatacactggaacagcagttgttgaaatacccagatttttcaccttggttactctgaccttgggtcagaacctaactttacagtgcttcagttttcccaccttttaaggaggataattactgatttccacgttaatttaaaagaacattatgaggattaggcgaacactttgtaatactttgcccaagaaaaagaaaaatgttgttactgaaattataaggtattttattgtctttagaaccttgtaattgaacagggagattatttttgaagtttaaaaattactagatagaatttggaaacatgttgtggaataaatgattctaaaaagcatgtgaaagagacacacaatgaggaaatagggagtttctcaaaatctaaacttgtacaggtatctaaacttgcctcaagtaactctcagatgtcttatttaaaatcatttagtgaaaaatgacatttaaagctaaaaaataatttagttgtactaattatggtaccataaagtgctttgacataaatttgaacctagaattggcagttctaataaaagtttttccactttgttaaaggttatgtcaatcttgagtgcttgtggaattcttcaccaccaatacatattttattactatctcttttaataatgcataggaattcttttttagactagtttttgggtttgctttgtctataacaaaaaataaatacaacaacttaataatcacatttgaaaacaaatttaacaagtataatgtgagtttttcttttttcctaacttcctcaggacctaggtcacctttattaaaaggaagaattcactcttttttccttggcagtttaatcattcaggaatccctctcttaaaggaaattgttattttattcatgtaacctttttttgtaatcaaaagtgaataaaaacgatctttttgtcttacag

SEQ ID NO: 71900 - DNA, 3763 bp, Homo sapiens
gtttccccgcgcgacagttcgggagcgcgcaggcagtcgcgcgcacacacgcacgcaggcacacacacacacacacacacacacacacacacactttcgcacacacaaacacgctaggacgctcgtcttcgctactgcatccccgaaccagcagagcgaagctactgcgggttctgttaacctcagcatcgtggggcgaagcagagccattgtgcatcaaggagaggccggtgcctgcgctgccgtctctggcacctaacccagcagaccgctcaccccatcggctggaatgcttgctgattcctctgcacacttctaaggctgagaacctgaggaacccagctggaaaatgccgtctgaacgctgcctcagtattcaagaaatgctgacaggccagaggctctgccactccgaatctcacaatgacagtgtcctggcagcgctgaatcagcagaggagtgatggcatcctctgcgacatcaccctgattgctgaggaacagaaattccatgctcacaaggcagtcctagcagcatgcagtgactatttccgggcaatgttcagtctttgtatggtggaaagtggagctgatgaggttaatttgcacggtgtgaccagccttggcttaaagcaggctctggagtttgcatacacaggacagattttgctggagccaggtgtgatccaggatgtgctagcagcgggcagtcacctacagctgttggagcttctcaatttatgctcccactatctcatccaggaattaaatagctttaattacttggatctgtacagacttgctgacctctttaacctcactttgttggagaaggcagtgatcgatttcttagtgaaacatctctctgaactcctgaagagccgcccagaagaagttctaacgcttccctattgcctgcttcaggaggtgctgaagagcgaccgcctgacctccctgagtgaagagcagatctggcagaagtgtggaatttgtgctgccttttgtgcactgaggggagactggtgccctggcttacctcaatgggatgacaagactgctagctgtgaggtggttggaacacaactgccactaccagtacatggacgagctcctgcaatacatccgctttggcctaatggatgtggatactctccatacagttgccctgtcccacccccttgtccaagcaagtgagactgcaacagcccttgtcaacgaggccctggaataccaccagagcatctatgcacagcctgtctggcagactcgcaggaccaaaccacgattccagtcagacactctgtatatcattggtgggaaaaagcgcgaggtctgcaaggtcaaggaacttcggtacttcaatcctgttgatcaggagaatgctctcatagctgccattgccaactggagtgagctggctcccatgcctgtgggaaggagccaccattgtgtggcagtcatgggggacttcctgtttgtggcaggaggggaagttgagcatgccagtggccggacgtgtgctgtgaggactgcctgtcgctatgacccccgcagtaattcctgggcagagatagcacccatgaaaaactgccgggagcattttgtgctgggtgccatggaggaatacctctatgcagttgggggcagaaatgaactgcgccaggttctgcctacagttgagcgatattgccccaagaagaacaaatggacttttgttcagtcctttgacagatccctttcatgccatgctggatatgtggctgatggtcttctttggatatcaggtggagtaactaatacggcacaatatcagaacaggctaatggtgtatgaacctaaccagaataagtggataagccgtagccccatgctgcagagaagggtctaccattccatggctgctgtacaaaggaagctttatgttcttggaggcaatgacctagactacaataatgaccggatccttgtgcgccatatagattcttacaacatagacactgaccagtggacacgttgtaatttcaacctgctgactggccaaaatgaatctggagttgctgtccataatgggagaatatatttagttggtggatattcaatttggacaaatgagcctctggcttgtatccaggtactggatgtaagcagagaaggcaaagaagaagtattctatgggcctacactcccttttgcttccaatggaatagcagcatgcttccttccagctccatattttacatgccctaaccttcaaactcttcaagtgcctcatcacaggattggcaccatctgaaaagccaagccatcatgaacaggaggaaaacatagctctgactgttggatactgggcatgaaaagactcagtgctccatgcttccttgtcttgctttataggtcttatattcggataaatttaagcaaaaaatgaacaattttctaaaatacgttattgaaaactcgtcacccttctcagtgtatgtcaacattcaatatgtatgacttttattgtggtatagcttagtgccaatttaaggtatattgtgttccatgggtctttagagcattctttgtacactttttctaatcagcactgtcttaagacaacataacactgttagtaaggcaatttattggacacaatggcatcgatgatcttaaaaatatatatattctgtacttaatccctttattatttaaagccgggcttgtaatttttctttttaaaatttaacattatgcagccctgctcagtagagactcactcagcattatgacatcataaatttttaaatgccatattttattcaaggtgatacgaataataatagacatacactggaacagcagttgttgaaatacccagatttttcaccttggttactctgaccttgggtcagaacctaactttacagtgcttcagttttcccaccttttaaggaggataattactgatttccacgttaatttaaaagaacattatgaggattaggcgaacactttgtaatactttgcccaagaaaaagaaaaatgttgttactgaaattataaggtattttattgtctttagaaccttgtaattgaacagggagattatttttgaagtttaaaaattactagatagaatttggaaacatgttgtggaataaatgattctaaaaagcatgtgaaagagacacacaatgaggaaatagggagtttctcaaaatctaaacttgtacaggtatctaaacttgcctcaagtaactctcagatgtcttatttaaaatcatttagtgaaaaatgacatttaaagctaaaaaataatttagttgtactaattatggtaccataaagtgctttgacataaatttgaacctagaattggcagttctaataaaagtttttccactttgttaaaggttatgtcaatcttgagtgcttgtggaattcttcaccaccaatacatattttattactatctcttttaataatgcataggaattcttttttagactagtttttgggtttgctttgtctataacaaaaaataaatacaacaacttaataatcacatttgaaaacaaatttaacaagtataatgtgagtttttcttttttcctaacttcctcaggacctaggtcacctttattaaaaggaagaattcactcttttttccttggcagtttaatcattcaggaatccctctcttaaaggaaattgttattttattcatgtaacctttttttgtaatcaaaagtgaataaaaacgatctttttgtcttacag

SEQ ID NO: 71901 - DNA, 2741 bp, Homo sapiens
gtttccccgcgcgacagttcgggagcgcgcaggcagtcgcgcgcacacacgcacgcaggcacacacacacacacacacacacacacacacacactttcgcacacacaaacacgctaggacgctcgtcttcgctactgcatccccgaaccagcagagcgaagctactgcgggttctgttaacctcagcatcgtggggcgaagcagagccattgtgcatcaaggagaggccggtgcctgcgctgccgtctctggcacctaacccagcagaccgctcaccccatcggctggaatgcttgctgattcctctgcacacttctaaggctgagaacctgaggaacccagctggaaaatgccgtctgaacgctgcctcagtattcaagaaatgctgacaggccagaggctctgccactccgaatctcacaatgacagtgtcctggcagcgctgaatcagcagaggagtgatggcatcctctgcgacatcaccctgattgctgaggaacagaaattccatgctcacaaggcagtcctagcagcatgcagtgactatttccgggcaatgttcagtctttgtatggtggaaagtggagctgatgaggttaatttgcacggtgtgaccagccttggcttaaagcaggctctggagtttgcatacacaggacagattttgctggagccaggtgtgatccaggatgtgctagcagcgggcagtcacctacagctgttggagcttctcaatttatgctcccactatctcatccaggtggagtaactaatacggcacaatatcagaacaggctaatggtgtatgaacctaaccagaataagtggataagccgtagccccatgctgcagagaagggtctaccattccatggctgctgtacaaaggaagctttatgttcttggaggcaatgacctagactacaataatgaccggatccttgtgcgccatatagattcttacaacatagacactgaccagtggacacgttgtaatttcaacctgctgactggccaaaatgaatctggagttgctgtccataatgggagaatatatttagttggtggatattcaatttggacaaatgagcctctggcttgtatccaggtactggatgtaagcagagaaggcaaagaagaagtattctatgggcctacactcccttttgcttccaatggaatagcagcatgcttccttccagctccatattttacatgccctaaccttcaaactcttcaagtgcctcatcacaggattggcaccatctgaaaagccaagccatcatgaacaggaggaaaacatagctctgactgttggatactgggcatgaaaagactcagtgctccatgcttccttgtcttgctttataggtcttatattcggataaatttaagcaaaaaatgaacaattttctaaaatacgttattgaaaactcgtcacccttctcagtgtatgtcaacattcaatatgtatgacttttattgtggtatagcttagtgccaatttaaggtatattgtgttccatgggtctttagagcattctttgtacactttttctaatcagcactgtcttaagacaacataacactgttagtaaggcaatttattggacacaatggcatcgatgatcttaaaaatatatatattctgtacttaatccctttattatttaaagccgggcttgtaatttttctttttaaaatttaacattatgcagccctgctcagtagagactcactcagcattatgacatcataaatttttaaatgccatattttattcaaggtgatacgaataataatagacatacactggaacagcagttgttgaaatacccagatttttcaccttggttactctgaccttgggtcagaacctaactttacagtgcttcagttttcccaccttttaaggaggataattactgatttccacgttaatttaaaagaacattatgaggattaggcgaacactttgtaatactttgcccaagaaaaagaaaaatgttgttactgaaattataaggtattttattgtctttagaaccttgtaattgaacagggagattatttttgaagtttaaaaattactagatagaatttggaaacatgttgtggaataaatgattctaaaaagcatgtgaaagagacacacaatgaggaaatagggagtttctcaaaatctaaacttgtacaggtatctaaacttgcctcaagtaactctcagatgtcttatttaaaatcatttagtgaaaaatgacatttaaagctaaaaaataatttagttgtactaattatggtaccataaagtgctttgacataaatttgaacctagaattggcagttctaataaaagtttttccactttgttaaaggttatgtcaatcttgagtgcttgtggaattcttcaccaccaatacatattttattactatctcttttaataatgcataggaattcttttttagactagtttttgggtttgctttgtctataacaaaaaataaatacaacaacttaataatcacatttgaaaacaaatttaacaagtataatgtgagtttttcttttttcctaacttcctcaggacctaggtcacctttattaaaaggaagaattcactcttttttccttggcagtttaatcattcaggaatccctctcttaaaggaaattgttattttattcatgtaacctttttttgtaatcaaaagtgaataaaaacgatctttttgtcttacag

SEQ ID NO: 71902 - DNA, 274 bp, Homo sapiens
tgcctacagttgagcgatattgccccaagaagaacaaatggacttttgttcagtcctttgacagatccctttcatgccatgctggatatgtggctgatggtcttctttggatatcaggtagaacatacctcatgttggatttatcaaaacacactttcattgtggtatatatttaaaagtcaagctttaatactgtggccatgtgtaattgaaagattgaaccaagcatgccattttagctaattaacattcatttattgagcacctactctag

SEQ ID NO: 71903 - DNA, 774 bp, Homo sapiens
ctgccatggacattcacgtataagtttttgtgtggatatatgttttcatttctttggagtagagttgctgggtcatggggtaaccctaggtttaagcttttgaggcctaccagatttccaaagtgactgcatcattttgcattcccatcaacagtatatgaaggttctaacttctctacatcttcaccaatatttgttattgtctgtcttcttgacaaaagttctcctagtgggtgtgaactggtatcattttgtggttttgatttgcatttcctggatggttatgaatgttgattttactttcatgtgcttattggccattgtatatctttgggaaaatagctattttcccaaacttttgcccagtttaaaattgagttttctttttattactgagttggaagtgttctttatatattctggatactagaccagcagcagatatatggcagatattttttcccattctgtgggttgcctttcactttcttggtggtgttctttgaagccccaaagtttttaattttgatgatatgcaatttatctatttttccttttgttgcatgtgcttttggtgtcatatctaagaaatcattgcataatggtttccaaggtaatctgggactattagaccatcaaaatagatgatagtaacagattatacattgaatggaataggaattcatgagcccataataataataaattgacaaaaagatacatagtgtggagctgaattggaaacctcttcctgacaataaaaggttgactgat

SEQ ID NO: 71904 - DNA, 477 bp, Homo sapiens
cgcggcccgcgaccggctgcgagaagacgacagagggtatatcgggaaatagctacccaactgccccagtttaaaattgagttttctttttattactgagttggaagtgttctttatatattctggatactagaccagcagcagatatatggcagatattttttcccattctgtgggttgcctttcactttcttggtggtgttctttgaagccccaaagtttttaattttgatgatatgcaatttatctatttttccttttgttgcatgtgcttttggtgtcatatctaagaaatcattgcataatggtttccaaggtaatctgggactattagaccatcaaaatagatgatagtaacagattatacattgaatggaataggaattcatgagcccataataataataaattgacaaaaagatacatagtgtggagctgaattggaaacctcttcctgacaataaaaggttgactgat

SEQ ID NO: 71905 - DNA, 4671 bp, Homo sapiens
  misc_feature (5)..(5): n is a, c, g, or t
  misc_feature (7)..(7): n is a, c, g, or t
  misc_feature (830)..(830): n is a, c, g, or t
  misc_feature (2103)..(2103): n is a, c, g, or t
  misc_feature (3076)..(3076): n is a, c, g, or t
  misc_feature (3197)..(3197): n is a, c, g, or t
  misc_feature (3832)..(3832): n is a, c, g, or t
  misc_feature (4313)..(4313): n is a, c, g, or t
acttntnccagcagctggataaacatattcgacgacagaccttggcaagaactgcaaagatgctcttgacaatggcatgaataaatattaggtgttatctagaattcaccacatttgaggtcgtgcgcaaagccagatcaaagagaatgcagaacaatagaagcaagaaggatcccaaatatagtgttgcaactctcctcacctgcaggaagggctatacatttccgaagacagagaagaggaaaaaggagggccatggaaaaaggcaagaaggtcccgtgaccaagaaatgaccagctccacagaggaaatgcagggccactctccgactggaccccactgtgcacaaggtgagaattcagcctgtttatcagggtttcccttattaaagtatatgtcaaaaaggcctggtagaaatgtaactctgtgatgttaattttggaaagtctcatctagaactttctgggaagtatttgaaagcacagttgtggaatcatttgaagactcaaacatataaattaaacactcttcttggatacagcagttagaatatggaacagatagggtctacattggagaaatgagagatgtggcaagtgcttagcctctctgagactcagtctcaatgtctccatcagggacagctagctagctcacggaattattgtgagggttcactgttataatttattccaaggtccactgcagcaccgaggacataggtggcactcaagaagcagtggccagtagtattctctgctaaaatatttgccacctcagccactttgattctgctccagagggctttttcgctcatcccattggcgacncaaggcaggttaactaaagatactctcacctaatctaaaaattcaagacatcagtccacaaaataccagaatcaccatggaggcagctgtttagcactttggatagtctatttctccccctaaaaacagcctacttaaaacaggggagagttaaggttccaggatcttactcctgagattttttatttaaagaacaccccatctttactcgcagctgagaggctaagattaaaaattagccactgtatagtagctgagcagtgacaatttttcataaaggtttttagtacacatttgggattataatttcaatattatgcaaatgcattttatggatctataatacagaatgtgtactggcgttaatgtgcattagcaggcgagaagaaaaggctccaaatgagccattttggtgtctgctttcaacatgtattatgaataataagtaaaatgttctggtttagaacaaataatataaaatctgaattcttcttgatgtacatcagtgacaaagccctacgcaactcccatggaattattccattggacacaatttaaaactggctcttaaacaatatattcctgtttctggcttctcttcttgaatgagatgtgaaagtaaaataaatatatttaatatgaatacgggatagttccccccattgctcaaaatcaggcatgaactagatgaaggcattgggaaggctgaaacaccatagtggtcaagagagtggcccaggatacttgtaatttgagaggctctgagtattgaaaagtgaagaagcatctaaatagggttatataacttgcatattttcaatgaataaaattaacaaatataatgcctttaacaaaatatttaatacaagatgactgtattattctgaagatatttaaatgatgtgtaagtaatatttcttaatgtaatgtgctgcaagctttgttccaaaatgggaacttgagttgaaatttgtctgatgtctattttctttcagccttgtcagagtgtttctgtgactgcagattagaataaaattctcacaaactaatttgaggcttttcgtaaaggcagaggactgagccaaacaactagcttctcatgatagagccccaaaatgtttcctttttaattaatatttccatgttgcaattttgcatgtacagaaggtggtagctggttattttagtagtaattcaaactttctatttgcattgatttagttaagactttcagatctattgaccctgtttcttgaatgcatgtttcacaccngccccattcttgggcagcctgcaggaatacaagatcacactgtccaatgagtatggactaagcattcagctgagtaacaataatacaatcatcttgtctctcaaacaggtgcccttaacttaatgttttttaaaatgccaccacgtccatgacatcttcaaaatgatactaaaaatatccatgcgatgagttctgtgtgtgttaagtgttttatatgcattatctcaattgacttccaaagcaacctcacaaggtcagttttacaatccccatgaaatggttgaagaatttggagtctaaaaagactaagtaatttgtacaaaatcacaattatacaggtctaattttgcaacccaaactcttgaccagtatataaccctgaatccagtattaatgtagtagataattgtcttggcttaatttatcatataagttatagaaatggtgttttgtccttactctgacatggggactataattgacactaaaatctgaatcaatttcaaccagtcattgcttcacttcactacttgtctacattgctgcagttggttgctgctttccatttcccccgatgcttttccattcgagatggaggtctgtggaaggaaagatggatacagcaagagggtctatccaagaacccaataaatatgtactgcataaataaatcagatgttttaaatttggcaatttaaattcagcaaaaagtctttgacaacctgtggagtgtaagctatggtttctatccttgcaaccttaaaatttcaaaaagccccaaattcaagcttatcagtagcaaggaagcccttccaaatattaacttacaatcaatattggaaaaaactgagtagtatattgtgtcctattttgaaaacaagctatttgccatgtgtagataagattcctacactaaagatatctttttaatagttgaaatatgagatgccgagtaataaaacttgaagtacantggagcagctctgagagaacaagtggcacattgccttgaaataatactctcaacgccatttgctgagtcttctatgctcttggccctttgcacaatctcacttaatcttcactgcaccctntaaggtaaatattattatcttcattttacagatgaggaaattgaagcttacataaattgtctgaggtcacacagttaataagtggttgaatgtggatttaattcgaggtctgctttatttcaaagtgattcagtgagtgagacagagagaaacaaagagaagacagtggtttttaaagaaagaatgaatctcaattttctgaaaccctatagcaattcctgcctttcttgtggctcttaccatattctgctgttatttctggatttcttatataacctttactgaattataagctattctatttgagagaagagaccacacacaaaccatttctgtattcccccaggaccttgttcagtgcctggaacaaagtaggtattcaagatacctttcacttattcctcatatatttgctgggtgtggttaagcccagtaaagaagacaagtcatgccttccaggagcttctagctcaggggagaaagtgattgaagacccagtgttctaaactgggtgtggcaccacagtgatgggaagtaggggaagccaaggggaagctgactgactggtgggctcaaccaaggtttcccgaggaagaggtcatccaaaaccattcttgaagcttcagtaagagccnagcaaagagggtggggaaagcctcacaaagcgagaaggatcaggaatgcacaaaggccctgaaattagagataagcacaaagcctgtttccaaggattacaaatcacctggagattactggaggacaagagaaaggggagaaacagcaagacagaaggtggcaaggtatccgctgtgaagtctagaaggactgtgtacaccatggtaaagtatttctctatcctgatctttctggggagggtttatgcagaggagaggcaagacaaggcatatatttgagaaagaggatcattagctgaattgtggagaacagactcgaagaggatgctactggttgcagggaacaggaaagaaaaccaaggaagcaatcactaaagccagtgggagggagggtcttgccattagagaagagaaggccattttgtatacacagctgacgcttgaacaacacaggtttgaactgtgagagtccacttatatntggaattttttcaataaaagttacatggagtgtgcctgcctctcctgcctcctcttccacccccgccacccttgagacagcaaaaccaaccattcctcttcctcctcttcctcagcctgctcaatgtgaagatgacgaggatgaaaacctttatgatgatctactcctatttatgtggacttgctctggattagggatgagaagacctgactctactgttttcttgataagtgaccttgaaccagacacatgtgctcaagttccatatctgtaaaatgaagatacctggccttcctacttcacaaggttcttttgaagatcaaatgtaatactgcataataaagtgactcataaattc

SEQ ID NO: 71906 - DNA, 475 bp, Homo sapiens
cagaagtctgattgaagttcttttgctttaatgccattttcagtaccttttgatagagagctcccaagatgagcccaccatgtggtgttcatcatgggttttttttaatgactgggagattagaattactatggtatgtgaatattccttctacaaataactcagttttgggatattctctgagtagttaaacattctaccaatttgattttttttcaacgaaagcttcaagtgcaattaaaacactttgcgtttttctattacactatatgaagataaactaggagtcagtaaggcaattttcaaaacaaagtgttgcagagatactttattctcagtatgtgtattaataacttgactcatctttctcatcaaaccttctccccaccagcacatacctggaggacatccagggtgcaatattgagggttcatctcccatgctctcctctttgtcacctcctctattcaattac

SEQ ID NO: 71907 - DNA, 407 bp, Homo sapiens
ggcaattctaggcaatattttcttaatgtagttagaaaggcaattgcctgacaattgataactataaaatgatagtctaccttaaagagaaagggtaaaacaaaatgatttttctgttaatctcttataattctgtaaaactagttatttttctttcatgaatgaatcacatgaattcatttaagctgatgccgacatatacagtgatcatatgtggaattccactttgatgctgatgcacaccatggtcatgtgaggtattctcctttatagcacttggccctcagttgtgtaaattggttttcaagaatgaattaccaaacctctcaattgtaacatgttgtctaagcgttcccttcaagtttatggcagtaaaaggaatctcttccatgagacataggggcttt

SEQ ID NO: 71908 - DNA, 2247 bp, Homo sapiens
gctgaaattcagggactctttggtggagcaattaccagtcaacttcagggtattatgataaactctgatctggggaggaaccaggactacatagatcaaggcagttttcttctttgagaaactatcccagatatcatcatagagtcttctgctcttcctcaactaccaaagaaaaacatcagcgaagcagcaggccatgcaccccccaaaaactccatctggggctcttcatagaaaaaggaaaatggcagcctggcccttctccaggctgtggaaagtctctgatccaattctcttccaaatgaccttgatcgctgctctgttgcctgctgttcttggcaattgtggtcctccacccactttatcatttgctgccccgatggatattacgttgactgagacacgcttcaaaactggaactactctgaaatacacctgcctccctggctacgtcagatcccattcaactcagacgcttacctgtaattctgatggcgaatgggtgtataacaccttctgtatctacaaacgatgcagacacccaggagagttacgtaatgggcaagtagagattaagacagatttatcttttggatcacaaatagaattcagctgttcagaaggatttttcttaattggctcaaccactagtcgttgtgaagtccaagatagaggagttggctggagtcatcctctcccacaatgtgaaattgtcaagtgtaagcctcctccagacatcaggaatggaaggcacagcggtgaagaaaatttctacgcatacggcttttctgtcacctacagctgtgacccccgcttctcactcttgggccatgcctccatttcttgcactgtggagaatgaaacaataggcgtttggagaccaagccctcctacctgtgaaaaaatcacctgtcgcaagccagatgtttcacatggggaaatggtctctggatttggacccatctataattacaaagacactattgtgtttaagtgccaaaaaggttttgttctcagaggcagcagtgtaattcattgtgatgctgatagcaaatggaatccttctcctcctgcttgtgagcccaatagttgtattaatttaccagacattccacatgcttcctgggaaacatatcctaggccgacaaaagaggatgtgtatgttgttgggactgtgttaaggtaccgctgtcatcctggctacaaacccactacagatgagcctacgactgtgatttgtcagaaaaatttgagatggaccccataccaaggatgtgaggcgttatgttgccctgaaccaaagctaaataatggtgaaatcactcaacacaggaaaagtcgtcctgccaatcactgtgtttatttctatggagatgagatttcattttcatgtcatgagaccagtaggttttcagctatatgccaaggagatggcacgtggagtccccgaacaccatcatgtggagacatttgcaattttcctcctaaaattgcccatgggcattataaacaatctagttcatacagctttttcaaagaagagattatatatgaatgtgataaaggctacattctggtcggacaggcgaaactctcctgcagttattcacactggtcagctccagcccctcaatgtaaagctctgtgtcggaaaccagaattagtgaatggaaggttgtctgtggataaggatcagtatgttgagcctgaaaatgtcaccatccaatgtgattctggctatggtgtggttggtccccaaagtatcacttgctctgggaacagaacctggtacccagaggtgcccaagtgtgagtgggagacccccgaaggctgtgaacaagtgctcacaggcaaaagactcatgcagtgtctcccaaacccagaggatgtgaaaatggccctggaggtatataagctgtctctggaaattgaacaactggaactacagagagacagcgcaagacaatccactttggataaagaactataatttttctcaaaagaaggaggaaaaggtgtcttgctggcttgcctcttgcaattcaatacagatcagtttagcaaatctactgtcaatttggcagtgatattcatcataataaatatctagaaatgataatttgctaaagtttagtgctttgagattgtgaaattattaatcatcctctgtgtggctcatgtttttgcttttcaacacacaaagcacaaattttttttcgattaaaaatgtatgtataaaaaactatt

SEQ ID NO: 71909 - DNA, 2349 bp, Homo sapiens
gctgaaattcagggactctttggtggagcaattaccagtcaacttcagggtattatgataaactctgatctggggaggaaccaggactacatagatcaaggcagttttcttctttgagaaactatcccagatatcatcatagagtcttctgctcttcctcaactaccaaaggctgtcatttccttgaagacatggatcccataacatttattctagtgctttatgacaagttggaattcaatgactatttattaaattgagttctttcagcagaaaaacatcagcgaagcagcaggccatgcaccccccaaaaactccatctggggctcttcatagaaaaaggaaaatggcagcctggcccttctccaggctgtggaaagtctctgatccaattctcttccaaatgaccttgatcgctgctctgttgcctgctgttcttggcaattgtggtcctccacccactttatcatttgctgccccgatggatattacgttgactgagacacgcttcaaaactggaactactctgaaatacacctgcctccctggctacgtcagatcccattcaactcagacgcttacctgtaattctgatggcgaatgggtgtataacaccttctgtatctacaaacgatgcagacacccaggagagttacgtaatgggcaagtagagattaagacagatttatcttttggatcacaaatagaattcagctgttcagaaggatttttcttaattggctcaaccactagtcgttgtgaagtccaagatagaggagttggctggagtcatcctctcccacaatgtgaaattgtcaagtgtaagcctcctccagacatcaggaatggaaggcacagcggtgaagaaaatttctacgcatacggcttttctgtcacctacagctgtgacccccgcttctcactcttgggccatgcctccatttcttgcactgtggagaatgaaacaataggcgtttggagaccaagccctcctacctgtgaaaaaatcacctgtcgcaagccagatgtttcacatggggaaatggtctctggatttggacccatctataattacaaagacactattgtgtttaagtgccaaaaaggttttgttctcagaggcagcagtgtaattcattgtgatgctgatagcaaatggaatccttctcctcctgcttgtgagcccaatagttgtattaatttaccagacattccacatgcttcctgggaaacatatcctaggccgacaaaagaggatgtgtatgttgttgggactgtgttaaggtaccgctgtcatcctggctacaaacccactacagatgagcctacgactgtgatttgtcagaaaaatttgagatggaccccataccaaggatgtgaggcgttatgttgccctgaaccaaagctaaataatggtgaaatcactcaacacaggaaaagtcgtcctgccaatcactgtgtttatttctatggagatgagatttcattttcatgtcatgagaccagtaggttttcagctatatgccaaggagatggcacgtggagtccccgaacaccatcatgtggagacatttgcaattttcctcctaaaattgcccatgggcattataaacaatctagttcatacagctttttcaaagaagagattatatatgaatgtgataaaggctacattctggtcggacaggcgaaactctcctgcagttattcacactggtcagctccagcccctcaatgtaaagctctgtgtcggaaaccagaattagtgaatggaaggttgtctgtggataaggatcagtatgttgagcctgaaaatgtcaccatccaatgtgattctggctatggtgtggttggtccccaaagtatcacttgctctgggaacagaacctggtacccagaggtgcccaagtgtgagtgggagacccccgaaggctgtgaacaagtgctcacaggcaaaagactcatgcagtgtctcccaaacccagaggatgtgaaaatggccctggaggtatataagctgtctctggaaattgaacaactggaactacagagagacagcgcaagacaatccactttggataaagaactataatttttctcaaaagaaggaggaaaaggtgtcttgctggcttgcctcttgcaattcaatacagatcagtttagcaaatctactgtcaatttggcagtgatattcatcataataaatatctagaaatgataatttgctaaagtttagtgctttgagattgtgaaattattaatcatcctctgtgtggctcatgtttttgcttttcaacacacaaagcacaaattttttttcgattaaaaatgtatgtataaaaaactatt

SEQ ID NO: 71910 - DNA, 2188 bp, Homo sapiens
gctgaaattcagggactctttggtggagcaattaccagtcaacttcagggtattatgataaactctgatctggggaggaaccaggactacatagatcaaggcagttttcttctttgagaaactatcccagatatcatcatagagtcttctgctcttcctcaactaccaaagaaaaacatcagcgaagcagcaggccatgcaccccccaaaaactccatctggggctcttcatagaaaaaggaaaatggcagcctggcccttctccaggctgtggaaagtctctgatccaattctcttccaaatgaccttgatcgctgctctgttgcctgctgttcttggcaattgtggtcctccacccactttatcatttgctgccccgatggatattacgttgactgagacacgcttcaaaactggaactactctgaaatacacctgcctccctggctacgtcagatcccattcaactcagacgcttacctgtaattctgatggcgaatgggtgtataacaccttctgtatctacaaacgatgcagacacccaggagagttacgtaatgggcaagtagagattaagacagatttatcttttggatcacaaatagaattcagctgttcagaaggatttttcttaattggctcaaccactagtcgttgtgaagtccaagatagaggagttggctggagtcatcctctcccacaatgtgaaattgtcaagtgtaagcctcctccagacatcaggaatggaaggcacagcggtgaagaaaatttctacgcatacggcttttctgtcacctacagctgtgacccccgcttctcactcttgggccatgcctccatttcttgcactgtggagaatgaaacaataggcgtttggagaccaagccctcctacctgtgaaaaaatcacctgtcgcaagccagatgtttcacatggggaaatggtctctggatttggacccatctataattacaaagacactattgtgtttaagtgccaaaaaggttttgttctcagaggcagcagtgtaattcattgtgatgctgatagcaaatggaatccttctcctcctgcttgtgagcccaatagttgtattaatttaccagacattccacatgcttcctgggaaacatatcctaggccgacaaaagaggatgtgtatgttgttgggactgtgttaaggtaccgctgtcatcctggctacaaacccactacagatgagcctacgactgtgatttgtcagaaaaatttgagatggaccccataccaaggatgtgaggcgttatgttgccctgaaccaaagctaaataatggtgaaatcactcaacacaggaaaagtcgtcctgccaatcactgtgtttatttctatggagatgagatttcattttcatgtcatgagaccagtaggttttcagctatatgccaaggagatggcacgtggagtccccgaacaccatcatgtggagacatttttcaaagaagagattatatatgaatgtgataaaggctacattctggtcggacaggcgaaactctcctgcagttattcacactggtcagctccagcccctcaatgtaaagctctgtgtcggaaaccagaattagtgaatggaaggttgtctgtggataaggatcagtatgttgagcctgaaaatgtcaccatccaatgtgattctggctatggtgtggttggtccccaaagtatcacttgctctgggaacagaacctggtacccagaggtgcccaagtgtgagtgggagacccccgaaggctgtgaacaagtgctcacaggcaaaagactcatgcagtgtctcccaaacccagaggatgtgaaaatggccctggaggtatataagctgtctctggaaattgaacaactggaactacagagagacagcgcaagacaatccactttggataaagaactataatttttctcaaaagaaggaggaaaaggtgtcttgctggcttgcctcttgcaattcaatacagatcagtttagcaaatctactgtcaatttggcagtgatattcatcataataaatatctagaaatgataatttgctaaagtttagtgctttgagattgtgaaattattaatcatcctctgtgtggctcatgtttttgcttttcaacacacaaagcacaaattttttttcgattaaaaatgtatgtataaaaaactatt

SEQ ID NO: 71911 - DNA, 2192 bp, Homo sapiens
gctgaaattcagggactctttggtggagcaattaccagtcaacttcagggtattatgataaactctgatctggggaggaaccaggactacatagatcaaggcagttttcttctttgagaaactatcccagatatcatcatagagtcttctgctcttcctcaactaccaaagaaaaacatcagcgaagcagcaggccatgcaccccccaaaaactccatctggggctcttcatagaaaaaggaaaatggcagcctggcccttctccaggctgtggaaagtctctgatccaattctcttccaaatgaccttgatcgctgctctgttgcctgctgttcttggcaattgtggtcctccacccactttatcatttgctgccccgatggatattacgttgactgagacacgcttcaaaactggaactactctgaaatacacctgcctccctggctacgtcagatcccattcaactcagacgcttacctgtaattctgatggcgaatgggtgtataacaccttctgtatctacaaacgatgcagacacccaggagagttacgtaatgggcaagtagagattaagacagatttatcttttggatcacaaatagaattcagctgttcagaaggatttttcttaattggctcaaccactagtcgttgtgaagtccaagatagaggagttggctggagtcatcctctcccacaatgtgaaattgtcaagtgtaagcctcctccagacatcaggaatggaaggcacagcggtgaagaaaatttctacgcatacggcttttctgtcacctacagctgtgacccccgcttctcactcttgggccatgcctccatttcttgcactgtggagaatgaaacaataggcgtttggagaccaagccctcctacctgtgaaaaaatcacctgtcgcaagccagatgtttcacatggggaaatggtctctggatttggacccatctataattacaaagacactattgtgtttaagtgccaaaaaggttttgttctcagaggcagcagtgtaattcattgtgatgctgatagcaaatggaatccttctcctcctgcttgtgagcccaatagttgtattaatttaccagacattccacatgcttcctgggaaacatatcctaggccgacaaaagaggatgtgtatgttgttgggactgtgttaaggtaccgctgtcatcctggctacaaacccactacagatgagcctacgactgtgatttgtcagaaaaatttgagatggaccccataccaaggatgtgaggcgttatgttgccctgaaccaaagctaaataatggtgaaatcactcaacacaggaaaagtcgtcctgccaatcactgtgtttatttctatggagatgagatttcattttcatgtcatgagaccagtaggttttcagctatatgccaaggagatggcacgtggagtccccgaacaccatcatgtggagacatttgcaattttcctcctaaaattgcccatgggcattataaacaatctagttcatacagctttttcaaagaagagattatatatgaatgtgataaaggctacattctggtcggacaggcgaaactctcctgcagttattcacactggtcagctccagcccctcaatgtaaagctctgtgtcggaaaccagaattagtgaatggaaggttgtctgtggataaggatcagtatgttgagctatcacttgctctgggaacagaacctggtacccagaggtgcccaagtgtgagtgggagacccccgaaggctgtgaacaagtgctcacaggcaaaagactcatgcagtgtctcccaaacccagaggatgtgaaaatggccctggaggtatataagctgtctctggaaattgaacaactggaactacagagagacagcgcaagacaatccactttggataaagaactataatttttctcaaaagaaggaggaaaaggtgtcttgctggcttgcctcttgcaattcaatacagatcagtttagcaaatctactgtcaatttggcagtgatattcatcataataaatatctagaaatgataatttgctaaagtttagtgctttgagattgtgaaattattaatcatcctctgtgtggctcatgtttttgcttttcaacacacaaagcacaaattttttttcgattaaaaatgtatgtataaaaaactatt

SEQ ID NO: 71912 - DNA, 460 bp, Homo sapiens
tcaacatttctggaactcctcttttagagtggccacgagtccctagcacattctttaaaacatccttgagttggcaaatactcctctttccaggataaatttgattttttaaaagaactgccaattattcagtctggtgaatatggtagatgattaaccagattaacatttctggttaataaggtgagattataataaaacaatgataattattttagtgtggctcataaattggtcttgatagtggtatattaaggttaagtaaaggcagcatggtcaccatacagattaaagcccattttagttggtttatgatgtgaatgaattcaggtagcactgggagtcattatatgtttaaatagtattaaaggtttctttttataaaaatcttaattatgacattctctgaaatctggtttcacagtattaaaatgaggctttaaggaaaaacattaaatgg

SEQ ID NO: 71913 - DNA, 486 bp, Homo sapiens
ataacgttacttaatcacagtgcaatatatacccagttttgtactatctatgaacaaccagctagagtgacaagagtggtctgtttcactggaatgcgaagaggacatgtaatattctaaaccttgactttttcctgccaaaagttgctatgttgcatttttagccaaaaaggaatccagtgaacataatctgagtactttgcaattttcctgggttttcggtaactgaaagaccactgagcaagatcctaagagattgtaatgtctagcatggcagccagcagccccatgtgtggttgtttaaatttagattaattacaagtgaaaaaaatttaaaaattttcgggtagcatcttctactcatgaatgtcttttacattttacttgagaaaatcaagctcctcttccgttggctttcttagttgcttgtgtgattattcaaagatgaaaaatgctggagttcagagttccctggtgcttgacacg

SEQ ID NO: 71914 - DNA, 891 bp, Homo sapiens
atccaatatcccggcgtggaacatttcctcggggatccaagtgccctcccgtaaccgctgaaagtcaccccatctgctgagcagccagaagcaagctgatgatgccagtagccagtcaccccgtctgctcggggccagacatggaggagtggggacggacatgtcccaccctcgtctaggtcatgggatgctggccgaaggcccctggcatgggaactgctccgggccaggggttgtggagggctggacaggaaaggaatgaggatcgcctccaccactacagcctcaggagggtggggaggctggatgcgtgccactttaacgagtgtgtatttaccaaatggataaattctgcgcaatgctttgcattccaaataacttgccaccaggtcccttgtgagtctccacctgcctagactgtgagcttcctaagggctggatcacccctgcaaccctagcacctggcatactacctgacccctaacacgcatggatgcctaaggagtgagttcctccgacacctggagaacgagatgcagaggctcgccgggagccccagtgccctgcatgccaatggcacacatcttctccaaacacagcctctctctaaagagctgcctcaaatcagccatgccttgccctgacagctgtttccttcccctgcaaagaccctcgaaagatctcttggctgtgatttgatttgagctcttctggaaggtcctatagagggccttatctaggttgttgaatctttttcagcatctggaaacgggggacagaaacaaatgggagtgtgtctagggggcggcaggcatcatggccccccttcccaggccagggcccacctgtggcaaaggaggccccaaataatagccatcctggttttcttgc

SEQ ID NO: 71915 - DNA, 460 bp, Homo sapiens
ctcctggtagttaccttcatgggtttttccaaattattatttttttagtttttcaagtgggtgcatatattaatacatgtaattttaaaaagcctcttcagtttataatgcaccctaacagtcccctgccccatccctcctaattctccagagcaatgacttttaactcttttagcaatgtcttctatttttttctcacataactacttagtcatttcttgattattttatacattctatagtaatttcttgatatgacagatgaggatttagctcttacaccatcactaccttcacttttccccccatattgtcccaaagtagttaccagatttaggggctaagtagtcaccacatcattatgagtatgtacatattgctcattgttgagaaaaacagagtattatgctcttgcttcctgccttgtgcttccttctgccctagaattaatgattgccta

SEQ ID NO: 71916 - DNA, 515 bp, Homo sapiens
tcaaatcaccaggttcctcaaaaaacaaacaacaacaaaaaaacaacaaaacatgaagaagccaaatctggaggatgagttttccaaattaaacactgaatattgttgtagagtaaaatgatactgtttgtaaagagatgtttttactagacatcctcttcctagccacctattaaggaataactagaatatatattaacagcaagacatcggaaattatctttgcacctgacaaaatgttaagattcagaatttggctggatgctcctaaagagctactgaaatagactcaatgcagctacgatgcccaacagaagcagcgatgcctggtgcacatagcaggttgctagcaggagtcatctggggtgattcacctgtcttgttggtgaggatatggacatcatctggggactctcagaaatccctgaagtgatatagagtcccacatgagcttgcctgtggtgttttacaaaccaataacgtagtgttcataaaccaaagtcacttggaggtaa

SEQ ID NO: 71917 - DNA, 630 bp, Homo sapiens
acaccactgcaccccagcctgggcgacagagtgagactctgtctgaaaacaaacaaactacagctggctgtcctattcttagtccacaatcccttcctccaggtactttctccccttagtcacacagcctctgaaaagggtttgtgtcccaacctaccagaaacctttttaaaaatctattcacacacacacacacaagttttatcaagataaatcctccataccacgggatgggcttttacatttctcaaccggaagtttgccatttcaggctgaatctctgcaatcaagattccgtttatctcacttggcttcctgagccaggactcaggtgtactctcttccctaccccaggagcatcttccagcagcttccctgacctgcttgtacaaatgcccccttccagctgcagagccacaggccacccatggccggcagtggtgtccctgcttcctgctatcaagggcagagaaatattaaagttcaatctcagaacaccctgttatctggtcaagaaatttttaaactactttttatagtaaaaaattaatatgaacacaacctttagtccccaaaccatccacaccgaaagggaaccgctgtcaacagtttcttacacattctcctaga

SEQ ID NO: 71918 - DNA, 273 bp, Homo sapiens
aacagttttccagtatttttttccagccctttgacttaagatactttttaatcacaagtgaacagaaaagaacaatcaaaaaagccctacttattggtattagtgaagaaacaaagctacctgaattgggaattactttaaaactgcactgtagtgtattttagttacataaagtaattaaaattaatgtttagaaaaaagtcttagtccatgatttctgtaactacagagaaggaaaaagagaaaagaagggaaagagagaggtgggtaggg

SEQ ID NO: 71919 - DNA, 1974 bp, Homo sapiens
gccttcgctctctagcttttcttctttcactcccgctcgccgactccagcccgctgggctcacgctctgccggacaccaatcccggcggccctgcccgacggagctcaaggctaggcctggccttgtccgcggagtccgcccctcgccgccaccgggatccgcccccgcgccgacacgcacttccggcagcgccgcggccgggagggaccgagcggggagcaaggcctgcggggaggcgcaggatggacgcgttggctgtcatgatgtaggacctcctgacctagaaccatgcccggcgcagggagaacaacgagcttacggaccgggtgcgggggctgctgtgcgagaaagcctacctgctggcccgggagcgttcgccggcccacctggtggctttccctggacgtttaacggcgactccgcccggcctcccgactttttgatgcaggcgttctcttacatgactttcttcgaggctagattctcgaaagacatcctgaaggtggctttcttaattagctgcctcaccggctggcggagcagttcgtagtcgcctacatcgagagggagagccccgtcctggctcagtactggggcttcgtggacgcgctgtagcgggtcttcgccgtcgtgggtaggaaacagtcgggccggatccccggtgtctggggagcggctgccggccgggcccgcgcgagccgcttcactcctacaagcccggctcactagttccaagctgctggactttgaccctcgctgggaagcttgatcgccgcctgttctcgccaatctctatgcctttgcactgcccagcaacccggtcactgcccaggacctgttaaaagttgaatggacctcccagaatcacgccgctgccaccgccgtttctagagacggcttttggccacctttgagaatcagggtcaaacttggaagggcctgcatttgtcacacttcctcggacactaatttggatagttcaggcccagagacggcttcccgggttagtgtgcctgacaacactgaagaaaaattgtgacattttccttccccagaattacttcgttttatacatttcacttctcttctgaaatcacagcaatgccagtttgcgccttttggtctgaggaacgcaggccctggccactaccaggaaaaagtatttacttttaaaacttgaatgtatatctttaccgtatgcctagtacagtagtgcttggaagaaacagattagtaagacaaaatatatgtcttcaagaacacttacgttctgagaaagaattctgaatgcagattctaatgtctggtaaaatgctttacagtgtaaagaatgcatatatgattcttattttatggcattttaaactttccaccccacggttttaaagtgttaatatatgttaaaaatatatgcaatttataaaggagagggaaagcccagcttgatttttgctgccaaagatggtatatttaaaattaaacgtaactaatggcaaaaaataatgggaatggtgcagtctttgagctgtatccagttggcattattctcttggactaaaaggaatagtattaacttcctcactttgggtaagccactttagatttttgggctgcagttttctcaggtaattagagactttatattatgaaagtttggttcacaattctttgagtctcttttgggaacaaagaaggtaagaggaggatatgtgccctcctctcaatcaaggggtttcttgaaaccctctaaggagaaaaatctgaaactgcctttcctaaaacgttcatgggtttgtcattctgatgatcaatatcgtcccactgaagtatctttttgaattcctagttaggaatctttatgttaagataaactgatcactctctccttcgtggacagtttatctacctaaagatgataggggaaaacactgtttttgaaagacgaaataaagacatgttgtagcaattttatt

SEQ ID NO: 71920 - DNA, 2979 bp, Homo sapiens
gccttcgctctctagcttttcttctttcactcccgctcgccgactccagcccgctgggctcacgctctgccggacaccaatcccggcggccctgcccgacggagctcaaggctaggcctggccttgtccgcggagtccgcccctcgccgccaccgggatccgcccccgcgccgacacgcacttccggcagcgccgcggccgggagggaccgagcggggagcaaggcctgcggggaggcgcaggatggacgcgttggctgtcatgatgtaggacctcctgacctagaaccatgcccggcgcagggagaacaacgagcttacggaccgggtgcgggggctgctgtgcgagaaagcctacctgctggcccgggagcgttcgccggcccacctggtggctttccctggacgtttaacggcgactccgcccggcctcccgactttttgatgcaggcgttctcttacatgactttcttcgaggctagattctcgaaagacatcctgaaggtggctttcttaattagctgcctcaccggctggcggagcagttcgtagtcgcctacatcgagagggagagccccgtcctggctcagtactggggcttcgtggacgcgctgtagcgggtcttcgccgtcgtgggtaggaaacagtcgggccggatccccggtgtctggggagcggctgccggccgggcccgcgcgagccgcttcactcctacaagcccggctcactagttccaagctgctggactttgaccctcgctgggaagcttgatcgccgcctgttctcgccaatctctatgcctttgcactgcccagcaacccggtcactgcccaggacctgttaaaagttgaatggacctcccagaatcacgccgctgccaccgccgtttctagagacggcttttggccacctttgagaatcagggtcaaacttggaagggcctgcatttgtcacacttcctcggacactaatttggatagttcaggcccagagacggcttcccgggttagtgtgcctgacaacactgaagaaaaattgtgacattttccttccccagaattacttcgttttatacatttcacttctcttctgaaatcacagcaatgccagtttgcgccttttggtctgaggaacgcaggccctggccactaccaggaaaaaatcctttgcacatggcctgctatcaacaatcctctacaatgattctcagcatcacctagggagcttatgtaaaatctcaaattcctgggccctatccccagagtttcttatcaagtaagtctgcattgggatctgaggatttgcatctctaacaaaaattcctaggcgatgctcacactgttggtgtaaggtttccttgatggagaactatcaaagcagtcaaagctatcaaaataaaaaagaattctgattgggtgcagtggctcacacctgtcattccagcactttgagaggccaaggtgggcagatcacatgaggccaggagttcaagaccagcctggccaacatggcagaaaccccatctctactaaaaataccaaaattagccgggcatggtggaacacacctgcaatcccagctactcgggaggctgaggcaagagaatcgcttgaacctgggaggcagaagttgcagtgaaacaagttggtgccaatgcattccagcctggatgatggagcgagactctgtctcaagaaaaaaaaaaacaaaaacaaaaacagaactctgcctcatagcgtcttttaagttatacactggacctatcctttcctcactgacagacattttaaaaattttttggtaaggcctagttcatataaaatgtaatccaagccaaaagttaacaagaataaggggaggaaaggggactccaatagcagagaaaggtatttacctgggatatacactgcaagaaaatcaaagctataagaaatgtccatgaatagtagccataaggcatcagagtgataaaattcctgtccctaggagggaatattggagtttgccagagaaacagaatgagagagacagagaggtttattgtaggaattggctcatatgattacggaggctgagaagacccacgatctgccatctgcaagctggagaatcaggaaagctggaggtgtaattcagtcaagtccaatggccagagaagcaagtgtactgatatccaagagcaggagaaaatagatgtcccagaacaagcagagaggctgattttgtccttcctctgcctttttgtttcatatggggcactgaatggactgatgcccatccacattagtgagggtggatcttctttactcagtctaccagtagaaatgtcaatgacttccagaaacaccctcaccaacacacgtggaaataatgttttaccaggtatctgggcatcccttggttcactcaagttgacacaaaattaaccatcacagaaggagactggccttactctgaaattaggaaactaaagaagtgaccagaatggagactaggtagagacaactagttctctaccaaacatgtacagttattcgttggtatctgaaggggattggttccaggaactctcagggataccaaaatctgcaggtgctcaagtcatttatataaaatattacagtatttgcatataacctttgcacatcttccatatactttaaatcatctctacattacttataataatgaatgtgtaaatgctatgaaaatagttactacactattgtttatttgtatttttattgaattgttttggggtggggggcagctgtatctttcttagtaatagaacccctggttttagctgggcacatgactgccctcaataaagattaaagtaccccagccttccttgagattgtggccatgtgactgaactttagacagtgagatataagcagatatcttctgtggcagtgttaggaaactattaaagacagtaagaacattgccctttgccttctttttcctttcttca

SEQ ID NO: 71921 - DNA, 2626 bp, Homo sapiens
gccttcgctctctagcttttcttctttcactcccgctcgccgactccagcccgctgggctcacgctctgccggacaccaatcccggcggccctgcccgacggagctcaaggctaggcctggccttgtccgcggagtccgcccctcgccgccaccgggatccgcccccgcgccgacacgcacttccggcagcgccgcggccgggagggaccgagcggggagcaaggcctgcggggaggcgcaggatggacgcgttggctgtcatgatgtaggacctcctgacctagaaccatgcccggcgcagggagaacaacgagcttacggaccgggtgcgggggctgctgtgcgagaaagcctacctgctggcccgggagcgttcgccggcccacctggtggctttccctggacgtttaacggcgactccgcccggcctcccgactttttgatgcaggcgttctcttacatgactttcttcgaggctagattctcgaaagacatcctgaaggtggctttcttaattagctgcctcaccggctggcggagcagttcgtagtcgcctacatcgagagggagagccccgtcctggctcagtactggggcttcgtggacgcgctgtagcgggtcttcgccgtcgtgggtaggaaacagtcgggccggatccccggtgtctggggagcggctgccggccgggcccgcgcgagccgcttcactcctacaagcccggctcactagttccaagctgctggactttgaccctcgctgggaagcttgatcgccgcctgttctcgccaatctctatgcctttgcactgcccagcaacccggtcactgcccaggacctgttaaaagttgaatggacctcccagaatcacgccgctgccaccgccgtttctagagacggcttttggccacctttgagaatcagggtcaaacttggaagggcctgcatttgtcacacttcctcggacactaatttggatagttcaggcccagagacggcttcccgggttagtgtgcctgacaacactgaagaaaaattgtgacattttccttccccagaattacttcgttttatacatttcacttctcttctgaaatcacagcaatgccagtttgcgccttttggtctgaggaacgcaggccctggccactaccaggaaaaaatcctttgcacatggcctgctatcaacaatcctctacaatgattctcagcatcacctagggagcttatgtaaaatctcaaattcctgggccctatccccagagtttcttatcaagtaagtctgcattgggatctgaggatttgcatctctaacaaaaattcctaggcgatgctcacactgttggtgtaaggtttccttgatggagaactatcaaagcagtcaaagctatcaaaataaaaaagaattctgattgggtgcagtggctcacacctgtcattccagcactttgagaggccaaggtgggcagatcacatgaggccaggagttcaagaccagcctggccaacatggcagaaaccccatctctactaaaaataccaaaattagccgggcatggtggaacacacctgcaatcccagctactcgggaggctgaggcaagagaatcgcttgaacctgggaggcagaagttgcagtgaaacaagttggtgccaatgcattccagcctggatgatggagcgagactctgtctcaagaaaaaaaaaaacaaaaacaaaaacagaactctgcctcatagcgtcttttaagttatacactggacctatcctttcctcactgacagacattttaaaaattttttggtaaggcctagttcatataaaatgtaatccaagccaaaagttaacaagaataaggggaggaaaggggactccaatagcagagaaaggtatttacctgggatatacactgcaagaaaatcaaagctataagaaatgtccatgaatagtagccataaggcatcagagtgataaaattcctgtccctaggagggaatattggagtttgccagagaaacagaatgagagagacagagaggtttattgtaggaattggctcatatgattacggaggctgagaagacccacgatctgccatctgcaagctggagaatcaggaaagctggaggtgtaattcagtcaagtccaatggccagagaagcaagtgtactgatatccaagagcaggagaaaatagatgtcccagaacaagcagagaggctgattttgtccttcctctgcctttttgtttcatatggggcactgaatggactgatgcccatccacattagtgagggtggatcttctttactcagtctaccagtagaaatgtcaatgacttccagaaacaccctcaccaacacacgtggaaataatgttttaccaggtatctgggcatcccttggttcactcaagttgacacaaaattaaccatcacagaaggagactggccttactctgaaattaggaaactaaagaagtgaccagaatggagactaggtagagacaactagttctctaccaaacatgtacagttattcgttggtatctgaaggggattggttccaggaactctcagggataccaaaatctggagctatcgcgcaatagatcctctagagtacctaacta

SEQ ID NO: 71922 - DNA, 2776 bp, Homo sapiens
gccttcgctctctagcttttcttctttcactcccgctcgccgactccagcccgctgggctcacgctctgccggacaccaatcccggcggccctgcccgacggagctcaaggctaggcctggccttgtccgcggagtccgcccctcgccgccaccgggatccgcccccgcgccgacacgcacttccggcagcgccgcggccgggagggaccgagcggggagcaaggcctgcggggaggcgcaggatggacgcgttggctgtcatgatgtaggacctcctgacctagaaccatgcccggcgcagggagaacaacgagcttacggaccgggtgcgggggctgctgtgcgagaaagcctacctgctggcccgggagcgttcgccggcccacctggtggctttccctggacgtttaacggcgactccgcccggcctcccgactttttgatgcaggcgttctcttacatgactttcttcgaggctagattctcgaaagacatcctgaaggtggctttcttaattagctgcctcaccggctggcggagcagttcgtagtcgcctacatcgagagggagagccccgtcctggctcagtactggggcttcgtggacgcgctgtagcgggtcttcgccgtcgtgggtaggaaacagtcgggccggatccccggtgtctggggagcggctgccggccgggcccgcgcgagccgcttcactcctacaagcccggctcactagttccaagctgctggactttgaccctcgctgggaagcttgatcgccgcctgttctcgccaatctctatgcctttgcactgcccagcaacccggtcactgcccaggacctgttaaaagttgaatggacctcccagaatcacgccgctgccaccgccgtttctagagacggcttttggccacctttgagaatcagggtcaaacttggaagggcctgcatttgtcacacttcctcggacactaatttggatagttcaggcccagagacggcttcccgggttagtgtgcctgacaacactgaagaaaaattgtgacattttccttccccagaattacttcgttttatacatttcacttctcttctgaaatcacagcaatgccagtttgcgccttttggtctgaggaacgcaggccctggccactaccaggaaaaaatcctttgcacatggcctgctatcaacaatcctctacaatgattctcagcatcacctagggagcttatgtaaaatctcaaattcctgggccctatccccagagtttcttatcaagtaagtctgcattgggatctgaggatttgcatctctaacaaaaattcctaggcgatgctcacactgttggtgtaagggtgagtacaaattagaaataaaactatttaattctgcctggtgcaaaggagagagagagacttttaccctccacatccttttctttggtcatttactttaggaaacttaattgtaagctttttctgtgcctctttgaaatgcctgtaaatctttccaaaaactaaattaggcttttgccaattttacaacctaagaatgtgaattcctcaaggacctgggagctatctcactgaaatttaatcattgagaaaaatagtacccctatctttcagcttcctggaaacataagagcctaactttattaggcaccttgctccattacaaagctatcttctgtcataaagatacaagaaatttatttttcccttgggacaaaagcaactaactagcagagggtcaccaaaattaccaggtgaatttagggtgaactctgtgtgacaaatggtgctgccaagttctcttgagtactatagaaagtgcatgacatgaattttttacttcatgatggtgcaaaaccattgcttttcactttcagtataatattcaagaaattacatattgaatataagatattcaatatcttattctttattataggctttgtgttatataattttgcccaactaactgtaggctaatgtaagtgttctgaacatgttgaaggtaggttagactaagctctaatgttcagtagggtaggtgtattaagtgcattttcaacttacgaaatttaagctgatatccaaagaatgagtaagaatgaggtaaaggagcaagaaaacattgcttcaggcaaaggaatagtatgtgcaaaagccctggggtttaagaatatgatgtttttagagaactgcaaataattcagtatggttggagcagagggatgtggaatgattattgattctgttggagagtagacagaggccagattgctatgcttagatacaatttcaaccacctacaaatccatctaattacctacatgaccatcatcatctggtcatgtttctccattttatcattatgtataccttaaagacttgctcacattacttaaaattgagataggttaggcatctatccaatctcccatgccagtaattctacagaaacagattaggttagctagataagcatgtttacaattaaatttatgctgtatccttctaatcaccactttctcatcaaaatgctcacaaatcatctgcatcattgtccattctttaaaaatgtataaacccatctctactaaaaatacaaaattagctgggcatgatggcgcacgcctgtaatcccagctgttcaggaggctgaagcagaagaattgcttgaaccccggagacggaggttgcagtcagccgagattgcaccattgctctctagcctgggcaacaagagcaaaactccatctcaaaaaaaaaaaa

SEQ ID NO: 71923 - DNA, 1868 bp, Homo sapiens
taaggaatttcttttttttatttctgacatacttctgtggagtgtgttttgctttcatttttgttgtattgtttgtaatttacactattaacagtttctattagtgctgtggaattaattcctcttgtgctgaagatagaaatatattatttctaggaagaaattgtccttatcgtcttcactaatattggacttagagagtcctcctataagacatgttctgtttttcattttgaacagtttccttgatggagaactatcaaagcagtcaaagctatcaaaataaaaaagaattctgattgggtgcagtggctcacacctgtcattccagcactttgagaggccaaggtgggcagatcacatgaggccaggagttcaagaccagcctggccaacatggcagaaaccccatctctactaaaaataccaaaattagccgggcatggtggaacacacctgcaatcccagctactcgggaggctgaggcaagagaatcgcttgaacctgggaggcagaagttgcagtgaaacaagttggtgccaatgcattccagcctggatgatggagcgagactctgtctcaagaaaaaaaaaaacaaaaacaaaaacagaactctgcctcatagcgtcttttaagttatacactggacctatcctttcctcactgacagacattttaaaaattttttggtaaggcctagttcatataaaatgtaatccaagccaaaagttaacaagaataaggggaggaaaggggactccaatagcagagaaaggtatttacctgggatatacactgcaagaaaatcaaagctataagaaatgtccatgaatagtagccataaggcatcagagtgataaaattcctgtccctaggagggaatattggagtttgccagagaaacagaatgagagagacagagaggtttattgtaggaattggctcatatgattacggaggctgagaagacccacgatctgccatctgcaagctggagaatcaggaaagctggaggtgtaattcagtcaagtccaatggccagagaagcaagtgtactgatatccaagagcaggagaaaatagatgtcccagaacaagcagagaggctgattttgtccttcctctgcctttttgtttcatatggggcactgaatggactgatgcccatccacattagtgagggtggatcttctttactcagtctaccagtagaaatgtcaatgacttccagaaacaccctcaccaacacacgtggaaataatgttttaccaggtatctgggcatcccttggttcactcaagttgacacaaaattaaccatcacagaaggagactggccttactctgaaattaggaaactaaagaagtgaccagaatggagactaggtagagacaactagttctctaccaaacatgtacagttattcgttggtatctgaaggggattggttccaggaactctcagggataccaaaatctgcaggtgctcaagtcatttatataaaatattacagtatttgcatataacctttgcacatcttccatatactttaaatcatctctacattacttataataatgaatgtgtaaatgctatgaaaatagttactacactattgtttatttgtatttttattgaattgttttggggtggggggcagctgtatctttcttagtaatagaacccctggttttagctgggcacatgactgccctcaataaagattaaagtaccccagccttccttgagattgtggccatgtgactgaactttagacagtgagatataagcagatatcttctgtggcagtgttaggaaactattaaagacagtaagaacattgccctttgccttctttttcctttcttca

SEQ ID NO: 71924 - DNA, 1624 bp, Homo sapiens
gccttcgctctctagcttttcttctttcactcccgctcgccgactccagcccgctgggctcacgctctgccggacaccaatcccggcggccctgcccgacggagctcaaggctaggcctggccttgtccgcggagtccgcccctcgccgccaccgggatccgcccccgcgccgacacgcacttccggcagcgccgcggccgggagggaccgagcggggagcaaggcctgcggggaggcgcaggatggacgcgttggctgtcatgatgtaggacctcctgacctagaaccatgcccggcgcagggagaacaacgagcttacggaccgggtgcgggggctgctgtgcgagaaagcctacctgctggcccgggagcgttcgccggcccacctggtggctttccctggacgtttaacggcgactccgcccggcctcccgactttttgatgcaggcgttctcttacatgactttcttcgaggctagattctcgaaagacatcctgaaggtggctttcttaattagctgcctcaccggctggcggagcagttcgtagtcgcctacatcgagagggagagccccgtcctggctcagtactggggcttcgtggacgcgctgtagcgggtcttcgccgtcgtgggtaggaaacagtcgggccggatccccggtgtctggggagcggctgccggccgggcccgcgcgagccgcttcactcctacaagcccggctcactagttccaagctgctggactttgaccctcgctgggaagcttgatcgccgcctgttctcgccaatctctatgcctttgcactgcccagcaacccggtcactgcccaggacctgttaaaagttgaatggacctcccagaatcacgccgctgccaccgccgtttctagagacggcttttggccacctttgagaatcagggtcaaacttggaagggcctgcatttgtcacacttcctcggacactaatttggatagttcaggcccagagacggcttcccgggttagtgtgcctgacaacactgaagaaaaattgtgacattttccttccccagaattacttcgttttatacatttcacttctcttctgaaatcacagcaatgccagtttgcgccttttggtctgaggaacgcaggccctggccactaccaggaaaaaaaccttctggatttcagctttggcaagcttcctctgtttctgagacacctccatcacctgggttacaatcccatccatgattttccccatctccaggcatttttcatggaaagctcctcatgctttttaattccagtttatccatttgtgtggctttaacctccacatccaggtctttctggctaaactgcagtatatccacaatggggccaatggacacataagggaggccctatcacaggaacacgaacacccggagtcgctagaaatcagattccaccggctttgcttcaggccgacttcctaaggaaggcatggtagcatcacagatgctgtttgtctcagtttcctgagaagccagtttcttagagctgtcattcaagagtgggtcaaatttgagatataaaaacctttctcaaggtagactctttggcccctatgcctagtatgtcagctgggcctct

SEQ ID NO: 71925 - DNA, 1468 bp, Homo sapiens
gccttcgctctctagcttttcttctttcactcccgctcgccgactccagcccgctgggctcacgctctgccggacaccaatcccggcggccctgcccgacggagctcaaggctaggcctggccttgtccgcggagtccgcccctcgccgccaccgggatccgcccccgcgccgacacgcacttccggcagcgccgcggccgggagggaccgagcggggagcaaggcctgcggggaggcgcaggatggacgcgttggctgtcatgatgtaggacctcctgacctagaaccatgcccggcgcagggagaacaacgagcttacggaccgggtgcgggggctgctgtgcgagaaagcctacctgctggcccgggagcgttcgccggcccacctggtggctttccctggacgtttaacggcgactccgcccggcctcccgactttttgatgcaggcgttctcttacatgactttcttcgaggctagattctcgaaagacatcctgaaggtggctttcttaattagctgcctcaccggctggcggagcagttcgtagtcgcctacatcgagagggagagccccgtcctggctcagtactggggcttcgtggacgcgctgtagcgggtcttcgccgtcgtgggtaggaaacagtcgggccggatccccggtgtctggggagcggctgccggccgggcccgcgcgagccgcttcactcctacaagcccggctcactagttccaagctgctggactttgaccctcgctgggaagcttgatcgccgcctgttctcgccaatctctatgcctttgcactgcccagcaacccggtcactgcccaggacctgttaaaagttgaatggacctcccagaatcacgccgctgccaccgccgtttctagagacggcttttggccacctttgagaatcagggtcaaacttggaagggcctgcatttgtcacacttcctcggacactaatttggatagttcaggcccagagacggcttcccggaaccttctggatttcagctttggcaagcttcctctgtttctgagacacctccatcacctgggttacaatcccatccatgattttccccatctccaggcatttttcatggaaagctcctcatgctttttaattccagtttatccatttgtgtggctttaacctccacatccaggtctttctggctaaactgcagtatatccacaatggggccaatggacacataagggaggccctatcacaggaacacgaacacccggagtcgctagaaatcagattccaccggctttgcttcaggccgacttcctaaggaaggcatggtagcatcacagatgctgtttgtctcagtttcctgagaagccagtttcttagagctgtcattcaagagtgggtcaaatttgagatataaaaacctttctcaaggtagactctttggcccctatgcctagtatgtcagctgggcctct

SEQ ID NO: 71926 - DNA, 2925 bp, Homo sapiens
gccttcgctctctagcttttcttctttcactcccgctcgccgactccagcccgctgggctcacgctctgccggacaccaatcccggcggccctgcccgacggagctcaaggctaggcctggccttgtccgcggagtccgcccctcgccgccaccgggatccgcccccgcgccgacacgcacttccggcagcgccgcggccgggagggaccgagcggggagcaaggcctgcggggaggcgcaggatggacgcgttggctgtcatgatgtaggacctcctgacctagaaccatgcccggcgcagggagaacaacgagcttacggaccgggtgcgggggctgctgtgcgagaaagcctacctgctggcccgggagcgttcgccggcccacctggtggctttccctggacgtttaacggcgactccgcccggcctcccgactttttgatgcaggcgttctcttacatgactttcttcgaggctagattctcgaaagacatcctgaaggtggctttcttaattagctgcctcaccggctggcggagcagttcgtagtcgcctacatcgagagggagagccccgtcctggctcagtactggggcttcgtggacgcgctgtagcgggtcttcgccgtcgtgggtaggaaacagtcgggccggatccccggtgtctggggagcggctgccggccgggcccgcgcgagccgcttcactcctacaagcccggctcactagttccaagctgctggactttgaccctcgctgggaagcttgatcgccgcctgttctcgccaatctctatgcctttgcactgcccagcaacccggtcactgcccaggacctgttaaaagttgaatggacctcccagaatcacgccgctgccaccgccgtttctagagacggcttttggccacctttgagaatcagggtcaaacttggaagggcctgcatttgtcacacttcctcggacactaatttggatagttcaggcccagagacggcttcccgggttagtgtgcctgacaacactgaagaaaaattgtgacattttccttccccagaattacttcgttttatacatttcacttctcttctgaaatcacagcaatgccagtttgcgccttttggtctgaggaacgcaggccctggccactaccaggaaaaaatcctttgcacatggcctgctatcaacaatcctctacaatgattctcagcatcacctagggagcttatgtaaaatctcaaattcctgggccctatccccagagtttcttatcaagtaagtctgcattgggatctgaggatttgcatctctaacaaaaattcctaggcgatgctcacactgttggtgtaaggtttccttgatggagaactatcaaagcagtcaaagctatcaaaataaaaaagaattctgattgggtgcagtggctcacacctgtcattccagcactttgagaggccaaggtgggcagatcacatgaggccaggagttcaagaccagcctggccaacatggcagaaaccccatctctactaaaaataccaaaattagccgggcatggtggaacacacctgcaatcccagctactcgggaggctgaggcaagagaatcgcttgaacctgggaggcagaagttgcagtgaaacaagttggtgccaatgcattccagcctggatgatggagcgagactctgtctcaagaaaaaaaaaaacaaaaacaaaaacagaactctgcctcatagcgtcttttaagttatacactggacctatcctttcctcactgacagacattttaaaaattttttggtaaggcctagttcatataaaatgtaatccaagccaaaagttaacaagaataaggggaggaaaggggactccaatagcagagaaaggtatttacctgggatatacactgcaagaaaatcaaagctataagaaatgtccatgaatagtagccataaggcatcagagtgataaaattcctgtccctaggagggaatattggagtttgccagagaaacagaatgagagagacagagaggtttattgtaggaattggctcatatgattacggaggctgagaagacccacgatctgccatctgcaagctggagaatcaggaaagctggaggtgtaattcagtcaagtccaatggccagagaagcaagtgtactgatatccaagagcaggagtttgtttcatatggggcactgaatggactgatgcccatccacattagtgagggtggatcttctttactcagtctaccagtagaaatgtcaatgacttccagaaacaccctcaccaacacacgtggaaataatgttttaccaggtatctgggcatcccttggttcactcaagttgacacaaaattaaccatcacagaaggagactggccttactctgaaattaggaaactaaagaagtgaccagaatggagactaggtagagacaactagttctctaccaaacatgtacagttattcgttggtatctgaaggggattggttccaggaactctcagggataccaaaatctgcaggtgctcaagtcatttatataaaatattacagtatttgcatataacctttgcacatcttccatatactttaaatcatctctacattacttataataatgaatgtgtaaatgctatgaaaatagttactacactattgtttatttgtatttttattgaattgttttggggtggggggcagctgtatctttcttagtaatagaacccctggttttagctgggcacatgactgccctcaataaagattaaagtaccccagccttccttgagattgtggccatgtgactgaactttagacagtgagatataagcagatatcttctgtggcagtgttaggaaactattaaagacagtaagaacattgccctttgccttctttttcctttcttca

SEQ ID NO: 71927 - DNA, 1641 bp, Homo sapiens
aaaattttattttctaatatatacctgctggcccgggagcgttcgccggcccacctggtggctttccctggacgtttaacggcgactccgcccggcctcccgactttttgatgcaggcgttctcttacatgactttcttcgaggctagattctcgaaagacatcctgaaggtggctttcttaattagctgcctcaccggctggcggagcagttcgtagtcgcctacatcgagagggagagccccgtcctggctcagtactggggcttcgtggacgcgctgtagcgggtcttcgccgtcgtgggtaggaaacagtcgggccggatccccggtgtctggggagcggctgccggccgggcccgcgcgagccgcttcactcctacaagcccggctcactagttccaagctgctggactttgaccctcgctgggaagcttgatcgccgcctgttctcgccaatctctatgcctttgcactgcccagcaacccggtcactgcccaggacctgttaaaagttgaatggacctcccagaatcacgccgctgccaccgccgtttctagagacggcttttggccacctttgagaatcagggtcaaacttggaagggcctgcatttgtcacacttcctcggacactaatttggatagttcaggcccagagacggcttcccgggttagtgtgcctgacaacactgaagaaaaattgtgacattttccttccccagaattacttcgttttatacatttcacttctcttctgaaatcacagcaatgccagtttgcgccttttggtctgaggaacgcaggccctggccactaccaggaaaaagtatttacttttaaaacttgaatgtatatctttaccgtatgcctagtacagtagtgcttggaagaaacagattagtaagacaaaatatatgtcttcaagaacacttacgttctgagaaagaattctgaatgcagattctaatgtctggtaaaatgctttacagtgtaaagaatgcatatatgattcttattttatggcattttaaactttccaccccacggttttaaagtgttaatatatgttaaaaatatatgcaatttataaaggagagggaaagcccagcttgatttttgctgccaaagatggtatatttaaaattaaacgtaactaatggcaaaaaataatgggaatggtgcagtctttgagctgtatccagttggcattattctcttggactaaaaggaatagtattaacttcctcactttgggtaagccactttagatttttgggctgcagttttctcaggtaattagagactttatattatgaaagtttggttcacaattctttgagtctcttttgggaacaaagaaggtaagaggaggatatgtgccctcctctcaatcaaggggtttcttgaaaccctctaaggagaaaaatctgaaactgcctttcctaaaacgttcatgggtttgtcattctgatgatcaatatcgtcccactgaagtatctttttgaattcctagttaggaatctttatgttaagataaactgatcactctctccttcgtggacagtttatctacctaaagatgataggggaaaacactgtttttgaaagacgaaataaagacatgttgtagcaattttatt

SEQ ID NO: 71928 - DNA, 586 bp, Homo sapiens
gccttcgctctctagcttttcttctttcactcccgctcgccgactccagcccgctgggctcacgctctgccggacaccaatcccggcggccctgcccgacggagctcaaggctaggcctggccttgtccgcggagtccgcccctcgccgccaccgggatccgcccccgcgccgacacgcacttccggcagcgccgcggccgggagggaccgagcggggagcaaggcctgcggggaggcgcaggatggacgcgttggctgtcatgatgtaggacctcctgacctagaaccatgcccggcgcagggagaacaacgagcttacggaccgggtgcgggggctgctgtgcgagaaagcctacctgctggcccgggagcgttcgccggcccacctggtggctttccctggacgtttaacggcgactccgcccggcctcccgactttttgatgcaggcgttctcttacatgactttcttcgaggctagattctcgaaagacatcctgaaggtggctttcttaattagctgcctcaccggctggcggagcagttcgtagtcgccttttctatggacaaaagtcggccctcagga

SEQ ID NO: 71929 - DNA, 449 bp, Homo sapiens
cacgaggcctcgtgccacctcgtgccatggctaccttgtatcttggtctggattctctctctgagaccccggattttactttctctttggagggcgctgggacatacatctctcaatccagcttcctccgcatcctcccatcttgccccatttctgccacgtcagacacttcctgagagtctcaccttcaaaatgacaccgctgcccatccattgctcaatggtacagagtgtggggtcagtccaccacccttgacctcccggcagggcaaggtgaggaggcggacccaaagcagtaccagcaggacttgttgccagtgataccaaaacagacttttcccaagcagtgcctcacatgtctgctggtgtggctttgggattctcctgccccaccccccctcctgatagatcccttctccatgttatgttcttctctccttacattaacat

SEQ ID NO: 71930 - DNA, 403 bp, Homo sapiens
gggtccctccctcctgcctccctgcagccctccttaccagcaactaagtcacagctgtcctacagaaagaatccataagccctgctgctaacaaggtgacctgtggcgcttcttggcactggatgcatggacgaatggagagagggctccagcacaaacaggaaggggaattctctaatctagaacattgctgcttttcactccccaccccgcccctcacatcatactccaatcataaccttgtatattacgcagtcattttggttttcgcggacgcgcctacctaagtaccatttacagaaagtgactctggctgtcattattttgtttatttgttccctatgcaaaaaaaaaatgaaaatgaaaaaagggggattccataaaagattcaataaaagacaaa

SEQ ID NO: 71931 - DNA, 1526 bp, Homo sapiens
cccttgcaagacaggttctggagccaggagcaactgtccagccctccagaagagacagcaagcagcccccctacccactctggcctccccaatggtactttgacctccagtgtagggctatactatacatatatatatatatatatatatatatatataattttggaatttgtttctcataatacagaatatatagtggctaccttgtatcttggtctggattctctctctgagaccccggattttactttctctttggagggcgctgggacatacatctctcaatccagcttcctccgcatcctcccatcttgccccatttctgccacgtcagacacttcctgagagtctcaccttcaaaatgacaccgctgcccatccattgctcaatggtacagagtgtggggtcagtccaccacccttgacctcccggcagggcaaggtgaggaggcggacccaaagcagtaccagcaggacttgttgccagtgataccaaaacagacttttcccaagcagtgcctcacatgtctgctggtgtggctttgggattctcctgccccacccccccgtccatggcagccccctccccaaggctttgctcacacctgagacaggaaggaggaaggggatccaataggaatatgggccccggaggggaagtcatgcacccccaagccaccaccccccagccttccacgcacatctcctggctggaagagagccctccaaaaaggggacacaggctgccccggcccctcaactgcatccacaccccatcctctcatcttgggtcccagccaggcccccccaaaaccaaagccccctcaagtcctggggtcccagcctgtgcccccagcttcctgcccacccagccccgagcattctcacacagagaaagaacaagcaagggctccagggggacaggatggggcagggcatacagtggggggtgggggggcagctgggaggagggagggacaaaacaaaacattttcctttgggttttttttttctttcttttttctcccctttactctttgggtggtgttgcttttcctttccttttccctttgagatttttttgttgttgtttcctttttgtattttactgatatcaccaggatagtttactctccttctagctttctgcttaccgcacactggataacacacacatacacacccacaaaaatgctcatgaacccaatccggagaaggttccagcaggtcccccaccctcccctcctcctcctacttctcctcttgacagcgaggacaggagggggacaaggggacacctgggcagacccgccggctctccccccaccccaccccgcccctcacatcatactccaatcataaccttgtatattacgcagtcattttggttttcgcggacgcgcctacctaagtaccatttacagaaagtgactctggctgtcattattttgtttatttgttccctatgcaaaaaaaaaatgaaaatgaaaaaagggggattccataaaagattcaataaaagacaaa

SEQ ID NO: 71932 - DNA, 1837 bp, Homo sapiens
  misc_feature (1648)..(1648): n is a, c, g, or t
cccttgcaagacaggttctggagccaggagcaactgtccagccctccagaagagacagcaagcagcccccctacccactctggcctccccaatggtactttgacctccagtgtagggctatactatacatatatatatatatatatatatatatatataattttggaatttgtttctcataatacagaatatatagtggctaccttgtatcttggtctggattctctctctgagaccccggattttactttctctttggagggcgctgggacatacatctctcaatccagcttcctccgcatcctcccatcttgccccatttctgccacgtcagacacttcctgagagtctcaccttcaaaatgacaccgctgcccatccattgctcaatggtacagagtgtggggtcagtccaccacccttgacctcccggcagggcaaggtgaggaggcggacccaaagcagtaccagcaggacttgttgccagtgataccaaaacagacttttcccaagcagtgcctcacatgtctgctggtgtggctttgggattctcctgccccacccccccgtccatggcagccccctccccaaggctttgctcacacctgagacaggaaggaggaaggggatccaataggaatatgggccccggaggggaagtcatgcacccccaagccaccaccccccagccttccacgcacatctcctggctggaagagagccctccaaaaaggggacacaggctgccccggcccctcaactgcatccacaccccatcctctcatcttgggtcccagccaggcccccccaaaaccaaagccccctcaagtcctggggtcccagcctgtgcccccagcttcctgcccacccagccccgagcattctcacacagagaaagaacaagcaagggctccagggggacaggatggggcagggcatacagtggggggtgggggggcagctgggaggagggagggacaaaacaaaacattttcctttgggttttttttttctttcttttttctcccctttactctttgggtggtgttgcttttcctttccttttccctttgagatttttttgttgttgtttcctttttgtattttactgatatcaccaggatagtttactctccttctagctttctgcttaccgcacactggataacacacacatacacacccacaaaaatgctcatgaacccaatccggagaaggttccagcaggtcccccaccctcccctcctcctcctacttctcctcttgacagcgaggacaggagggggacaaggggacacctgggcagacccgccggctctccccccaccccaccccgcccctcacatcatactccaatcataaccttgtatattacgcagtcattttggttttcgcggacgcgcctacctaagtaccatttacagaaagtgactctggctgtcattattttgtttatttgttccctatgcaaaaaaaaaatgaaaatgaaaaaagggggattccataaaagattcaataaaagacaaaaaaaaagaaaaaagaaaaaaatgtataaaaatttaaaaaaaaaaaaaaaaaaaaaaaaaaaaaaaaaaaaaaaaaaaaaaaaaaaaaaaaaaaaaaaaaaaaaaaaaaaaaaaaaaaaaaanaaaacccttttttaaattttttaacccccccccccccgggggggggccccccccccccatccccccttttggggggggttaaaaaaatcgggggcgggttttaaacagggggggtgggaaaaaaccggggggccccaaatataaagtttttggaaaaatcccctttttcccagggggggaataaaaggg

SEQ ID NO: 71933 - DNA, 1168 bp, Homo sapiens
cccttgcaagacaggttctggagccaggagcaactgtccagccctccagaagagacagcaagcagcccccctacccactctggcctccccaatggtactttgacctccagtgtagggctatactatacatatatatatatatatatatatatatatataattttggaatttgtttctcataatacagaatatatagtggctaccttgtatcttggtctggattctctctctgagaccccggattttactttctctttggagggcgctgggacatacatctctcaatccagcttcctccgcatcctcccatcttgccccatttctgccacgtcagacacttcctgagagtctcaccttcaaaatgacaccgctgcccatccattgctcaatggtacagagtgtggggtcagtccaccacccttgacctcccggcagggcaaggtgaggaggcggacccaaagcagtaccagcaggacttgttgccagtgataccaaaacagacttttcccaagcagtgcctcacatgtctgctggtgtggctttgggattctcctgccccacccccccgtccatggcagccccctccccaaggctttgctcacacctgagacaggaaggaggaaggggatccaataggaatatgggccccggaggggaagtcatgcacccccaagccaccaccccccagccttccacgcacatctcctggctggaagagagccctccaaaaaggggacacaggctgccccggcccctcaactgcatccacaccccatcctctcatcttgggtcccagccaggcccccccaaaaccaaagccccctcaagtcctggggtcccagcctgtgcccccagcttcctgcccacccagccccgagcattctcacacagagaaagaacaagcaagggctccagggggacaggatggggcagggcatacagtggggggtgggggggcagctgggaggagggagggacaaaacaaaacattttcctttgggttttttttttctttcttttttctcccctttactctttgggtggtgttgcttttcctttccttttccctttgagatttttttgttgttgtttcctttttgtattttactgatatcaccaggatagtttacaatcctggtgatatcagtaaaatacaaaaaaaaacact

SEQ ID NO: 71934 - DNA, 784 bp, Homo sapiens
cccttgcaagacaggttctggagccaggagcaactgtccagccctccagaagagacagcaagcagcccccctacccactctggcctccccaatggtactttgacctccagtgtagggctatactatacatatatatatatatatatatatatatatataattttggaatttgtttctcataatacagaatatatagtggctaccttgtatcttggtctggattctctctctgagaccccggattttactttctctttggagggcgctgggacatacatctctcaatccagcttcctccgcatcctcccatcttgccccatttctgccacgtcagacacttcctgagagtctcaccttcaaaatgacaccgctgcccatccattgctcaatggtacagagtgtggggtcagtccaccacccttgacctcccggcagggcaaggtgaggaggcggacccaaagcagtaccagcaggacttgttgccagtgataccaaaacagacttttcccaagcagtgcctcacatgtctgctggtgtggctttgggattctcctgccccacccccccacttcctcttttaaaaaaaaaaaaaaaaaaaaaagatacaagaaaaacctttaaaaaaattccatgtttcctaatttgcacgaaattttctaccacaagatgtgccttgccttccgagaataagtattacctttaaacaatatcagcgcacacacatagctgcatgttctgctcgtgtagtttaaaaaaaaaaagacaaaacagtgacatgaaataa

SEQ ID NO: 71935 - DNA, 272 bp, Homo sapiens
cgccggctctccccccaccccaccccgcccctcacatcatactccaatcataaccttgtatattacgcagtcattttggttttcgcggacgcgcctacctaagtaccatttacagaaagtgactctggctgtcattattttgtttatttgttccctatgcaaaaaaaaaatgaaaatgaaaaaagggggattccataaaagattcaataaaagacaaaaaaaaagaaaaaagaaaaaaatgtataaaaattaaacaagctatgcttcgactc

SEQ ID NO: 71936 - DNA, 896 bp, Homo sapiens
attttagtacattgagaggttttggatcacgattcatcaaatatgtgaattacacttttagttttgtggcatttgcacttggtcattcacgtctctatgttcatacaaatgtcgacagcacggggccacagtagctgccaccagctgcttccctaaaggttaatgccagtctgtgaataaagacaaaggatgtgaactcacctgcctatgtgataattgtcaccacattttctatgccttattcacaaggacaagataaatattctggtgaaataaagctattctgtgtctgcattctggtccgttggtctgtgtaccatatcagaacataaaatgaaattagtttaactgaatgtgtttatatggaatcaactgtctatatgataactgatgcagtgttttctggtttgtactatcatctgaagtgaaaattctttatgtaggctaattttaaaaaatacacaaatctaagctgaattttttttcagtaaaacagactatagtaacttaatggttttattttagtgtttagagaaaaactggtttcattcattgaatttctatagaaggcgtgctattaagcatgatggactgagtgcatttatttcactctgctccttcctaaaatccctttaaaataaaagtaaaagaataaaaagtgcataccaacgggagcaaagagaaaatagagaacatgaagagaagatacagttcaaatgaaagatgccatacaaattttgcaagcaaatggataaattgtaactgacttagagaaatagtgaagttgatcaaaaaaaaaaaaaggtgcttgagaacctcaaagtggcttaggaatttagaacctataaagatgggagtgcagagtaggactgaaaacaggattgattaaaactttt

SEQ ID NO: 71937 - DNA, 1320 bp, Homo sapiens
gaaaatctgaataagggaggctagagagatagaaagacttttactcttcatataataatctttttaaaaaataataaacttttaaaaatactgtcaatattatcctaggaagcatagttttatttctgttttcattaattaatttggacccagcattgatgaagtaaagtttaacttttattttagtttttctctatgttgaatgaacactctttctcccagtttccaattatgttatctacattgagtcactgcttgactccatttccatatttgtagtgttagtccctggtaagacaataaacttccttataagcaaatttagaagcaattatttaattcaagcttgcacaattttctcgagtccagcacgagttgttgccacatctaacaatagcaaagtaaaggttgcaatgcttactagtgatgatttcttgaggaagaaaaataagtcttacttaacaatagaaaccttttttgtcttgctgcccaagtcaccaattttatataggggaagtagttaaaattaactaattatgacaattccggggtaaacttaatttcttagaaatgtttcagagaataatactttctgcctcaaaagtatgcatttattatgtatcaaataaaattttaaatttagagaacattgaagaaatatgagatcagagaaatcaaagattattattaaattacatttcttttggtatctcctgagatttctcagttatgcattacttgtattcattcatttattcatcaaatacaatatttatctaaaacctgctatgaccaagactgggtgaggaactggagacatagctattaaaaaaatagtatttatatttataaatgatgaaacaaaaagaaaaaatagaaggtgaatcggtaggtaaaaagagacaatagactaccagccaatctcaatgtgtgaaccttgtttgtatcctgattcaagaaaagacattaaaaagattatctgaaagagataattaaaaatctgaattctgcctggatagttgatgatattaaagaggtattattcattcttaggtgtaataatgacattgtggttatgttacaaaaaggagtcatttcagaaacagactgaaatatttacaaataaaatcatatgttgtctgggacttacttcaaaataatgtgtgagtgtagggaatgggcagggttgcagtagggacaggattggccatgggttgatggttactgaggctgagcgatggcatgtgaggttttattattttattgtttactctcatctattttcaaaaagttaaaaaatcagccctccctttgctgaaa

SEQ ID NO: 71938 - DNA, 402 bp, Homo sapiens
  misc_feature (398)..(398): n is a, c, g, or t
  misc_feature (401)..(402): n is a, c, g, or t
caaaacctgtataaaaactgaaaaaatgtaaaacgtcacaattagaataagaaaatttaaatagaacaatgaatattaaataaactaaaatgctaataaaatgtactccttagggccaggtgcggtggctcacacctgtaatcccagcactttgggaggccgaggtgggtggatcacctgaggtcaggagtttgagaccagcctggccaatgtggtgaaaccctgtctctactaaaaatacaaaaagttagccaggtgtgatggtgggcacctgtaatcccagctacttgggaggctgaggtgggaggatcacttgggcccggaaggcagaggttgcggtgagcctggatcacggcactgcactccagcctgggcaacaagagcaaatctctgtctcngtnn

SEQ ID NO: 71939 - DNA, 564 bp, Homo sapiens
tggtcatctcagtttcttttctcaccttgactgcaagatgaaactccttgtgctagctgtgctgctcacagtggccgccgccgacagcggcatcagccctcgggccgtgtggcagttccgcaaaatgatcaagtgcgtgatcccggggagtgaccccttcttggaatacaacaactacggctgctactgtggcttggggggctcaggcacccccgtggatgaactggacaagtgctgccagacacatgacaactgctatgaccaggccaagaagctggacagctgtaaatttctgctggacaacccgtacacccacacctattcatactcgtgctctggctcggcaatcacctgtagcagcaaaaacaaagagtgtgaggccttcatttgcaactgcgaccgcaacgctgccatctgcttttcaaaagctccatataacaaggcacacaagaacctggacaccaagaagtattgtcagagttgaatatcacctctcaaaagcatcacctctatctgcctcatctcacactgtactctccaataaagcaccttgttgaaagacca

SEQ ID NO: 71940 - DNA, 566 bp, Homo sapiens
gagggagcaggaaggcagtgtgtccccggggtgctggcagaccgatttgaactctggctatgtcttcttgcagtggccgccgccgacagcggcatcagccctcgggccgtgtggcagttccgcaaaatgatcaagtgcgtgatcccggggagtgaccccttcttggaatacaacaactacggctgctactgtggcttggggggctcaggcacccccgtggatgaactggacaagtgctgccagacacatgacaactgctatgaccaggccaagaagctggacagctgtaaatttctgctggacaacccgtacacccacacctattcatactcgtgctctggctcggcaatcacctgtagcagcaaaaacaaagagtgtgaggccttcatttgcaactgcgaccgcaacgctgccatctgcttttcaaaagctccatataacaaggcacacaagaacctggacaccaagaagtattgtcagagttgaatatcacctctcaaaagcatcacctctatctgcctcatctcacactgtactctccaataaagcaccttgttgaaagacca

SEQ ID NO: 71941 - DNA, 436 bp, Homo sapiens
tggtcatctcagtttcttttctcaccttgactgcaagatgaaactccttgtgctagctgtgctgctcacagtggccgccgccgacagcggcatcagccctcgggccgtgtggcagttccgcaaaatgatcaagtgcgtgatcccggggagtgaccccttcttggaatacaacaactacggctgctactgtggcttggggggctcaggcacccccgtggatgaactggacaagcaaaaacaaagagtgtgaggccttcatttgcaactgcgaccgcaacgctgccatctgcttttcaaaagctccatataacaaggcacacaagaacctggacaccaagaagtattgtcagagttgaatatcacctctcaaaagcatcacctctatctgcctcatctcacactgtactctccaataaagcaccttgttgaaagacca

SEQ ID NO: 71942 - DNA, 612 bp, Homo sapiens
  misc_feature (588)..(588): n is a, c, g, or t
  misc_feature (595)..(595): n is a, c, g, or t
  misc_feature (600)..(600): n is a, c, g, or t
tggtcatctcagtttcttttctcaccttgactgcaagatgaaactccttgtgctagctgtgctgctcacagtggccgccgccgacagcggcatcagccctcgggccgtgtggcagttccgcaaaatgatcaagtgcgtgatcccggggagtgaccccttcttggaatacaacaactacggctgctactgtggcttggggggctcaggcacccccgtggatgaactggacaagtgctgccagacacatgacaactgctatgaccaggccaagaagctggacagctgtaaatttctgctggacaacccgtacacccacacctattcatactcgtgctctggctcggcaatcacctgtagcagcaaaaacaaagagtgtgaggccttcatttgcaactgcgaccgcaacgctgccatctgcttttcaaaagctccatataacaaggcacacaagaacctggacaccaagaagtattgtcagagttgaatatcacctctcaaaagcatcacctctatctgcctcatctcacactgtactctccaataaagcaccttgttgaaagaccaaaaaaaaaaaaaaaaaaaaaattntgggggnggccngggcccgaaaaa

SEQ ID NO: 71943 - DNA, 1037 bp, Homo sapiens
tggtcatctcagtttcttttctcaccttgactgcaagatgaaactccttgtgctagctgtgctgctcacagtggccgccgccgacagcggcatcagccctcgggccgtgtggcagttccgcaaaatgatcaagtgcgtgatcccggggagtgaccccttcttggaatacaacaactacggctgctactgtggcttggggggctcaggcacccccgtggatgaactggacaagtgctgccagacacatgacaactgctatgaccaggccaagaagctggacagctgtaaatttctgctggacaacccgtacacccacacctattcatactcgtgctctggctcggcaatcacctgtagcagcaaaaacaaagagtgtgaggccttcatttgcaactgcgaccgcaacgctgccatctgcttttcaaaagctccatataacaaggcacacaagaacctggacaccaagaagtattgtcagagttgaatatcacctctcaaaagcatcacctctatctgcctcatctcacactgtactctccaataaagcaccttgttgaaagaccacaggcaaacaaaacaaaaaaaaaacaaaaacaacaaaacacactgtgtgtgtggcgcgcgcgccctggggccccgcggagaaaagcttttctagaacaccaattgtcggtgtgggcggcgcgcggaggcgccacagggtggtgaaagtgtgagacacgtggggcgcaataaggcgtgtgtgccccaaagaggagagactcgcggggccaacgagagacaagagcgggcgtggggggattctctctacaccacatagtcaaagaacaagcgcgccccgggggggaacaaccacgagacgcggttctctggagagcaaaaaaatctccaaaaaagggggagagggctccaaagagagggggcaacaatacagggggagagatcataccaccaacaggggagagggccccaaagagcgagagcgcaccgagaaatatctaaaaatatataacgcgcccccgggacaagggaggagc

SEQ ID NO: 71944 - DNA, 253 bp, Homo sapiens
gagtctccacaaatggtctgctttgacacttaccttctactttatgagacagtctgctgcatagctggattattattcctcccaccacagctccagattctattctgtctgaagacaactgtgtgtcttcaccccacaatctctgtatcccctacaacatacggcatttgcttctgcatagtaggtccctaagtaagatgaagaacctgcatctgaaagattatgtggtttgtgcaggatctcaccacacagt

SEQ ID NO: 71945 - DNA, 2875 bp, Homo sapiens
gcctatagctgtgctgaatgcaaggagactttcagcgataacaatcgccttgtgcaacaccagaaaatgcacactgtcaaaaccccatatgaatgtcaggagtgcggagaacgcttcatttgcggctcaaccctgaagtgccacgagagtgttcacgccagagaaaaacaaggattttttgtgagtgggaagatcttggatcagaacccagaacagaaagagaagtgctttaagtgtaacaaatgtgagaaaacctttagctgcagcaaatacctaactcagcacgagaggattcacaccaggggagtgaagccctttgaatgtgaccagtgtgggaaagcctttggccaaagtactcggctcattcaccatcaaagaatccactctagagtgaggctgtataaatggggtgagcaagggaaagccatcagcagtgcctcccttatcaaacttcagtccttccacacaaaggagcacccttttaaatgtaacgaatgcggaaagaccttcagccacagtgcacacctctcaaaacatcagttaattcacgctggagagaatccctttaaatgtagtaagtgtgacagagtcttcacccagagaaactaccttgttcagcatgagcgaactcatgccagaaagaagccgttggtgtgtaacgaatgcgggaaaacgttccgtcagagctcatgcctttctaagcatcagagaattcactcaggtgagaagccctatgtatgtgattactgcgggaaggccttcggcctgagtgctgagcttgtccgccaccagagaattcacactggagaaaagccttatgtttgtcaggaatgcgggaaagccttcacccagagctcatgcctttctattcaccggagagttcacactggggagaagccctacagatgtggtgaatgtgggaaagcctttgcccagaaagcaaatctaacacagcaccagagaattcacacaggggagaagccttactcctgtaatgtgtgtggcaaagcttttgtcctcagtgcccatctcaaccagcacctgagagttcacacccaggagacactttatcagtgtcaacgttgccagaaagcctttcggtgccactcgagcctcagccgccatcagcgtgtacacaacaagcagcaatactgcctgtagccattgggtggcagcagagtcccagaatatgagaccgttactcggatgttgaaagttggaaactatcccattgcaagtttctctccaaataaatgcatctaaagattgattagaaagtttgtgcgcatgtttttcattataacaatgaaaacacaaaagtggagaagctgtacaacgtcaggattcagaggtaggctctggagccagtctaccttgagttaaatcccacctctgccatctactacctaagtgaccttgggaaggtcagaaaaatctctcagggcctcggtgtccttatctgtaaaatgggcatcacctacctcagagggcttttctgaggattaaataaataaatgtgaagcacttagaactgatggccagcacatgagggctcaccaagtgtaagccacaaatacacatcagctatagcacaaatatacttgtgttacaagaaaggaattagtaatctgtgtttactgtagttaatgttcttacaatgtatcgcttttaatttaagttttccttttttacagtttttctccagcactttactcttcttaagtgcctggcctttttttgtccctttatctctcctggtttttttcttaagccccagaaagccaaaaagaacatgtaaactcttcacctcaactagctacaaccttccactcctaacctcccaagcttctcacttaaagaggactccctatcccacaaacacatgctccctcttcctatgaccttcctccatttaacagtgttggttatgcaataagacacccaatttttcatgggagttgacaccaaaacacagctggattccatcaggaaagctgcattgatcagggtgttaaccgcatatgaaacaacccatatggaagacatacttaggggtcaaacctgtggtgtgtggaagtgaccactgggatgtcatcattcaccatttatccaggatggccgctcaccaggcaatttgctaggctcgggggcgggtagtatccatacactatgcactactgctctgaagcttctggaatcagaaatgaacccattttcatcgacgattgctgttagttgacaagtgacatcttgaaaatgccacattccctcatgtcacaggaagttctgggatcaccaaggattgttggagagtccagtgagatggaaccacacaaccagttccctaccagtgtcttgtcagctctgggtgtttgttccctgccactaagtggctcagtcacacctttgctgaaacacagtagtcttatgaaaagcactggacacatactttgaatacctttcatattttaggtgctgaaaatggtgagggagtgagtgctctgcacccttgggcttttcaactcttgcacctggagttctgctggttaagtttgttaaacttagttgaaactgggaacctgttggctaaccattggggccttacactgtttttcaaatggttgcaacatttaacttctcgcacatggttcccgtcctctggagctctgtcttgtcggggagatgggcatgttgtataccaaaagagtgtacaaagtgttgcagggctgtgacacaatagggactctatggaaaactggcagccattgggtgtgggggcagtctgtaaatcagtcacctgtgttgctgcaggccaaggtagaaacgccctccgtgtgtgcatatttgttggttctctgattaaagttttgagtct

SEQ ID NO: 71946 - DNA, 312 bp, Homo sapiens
cgagatcacaccactgcactccagcctgggcaacagagtgagattccacctcaaaaacaaaacaaaacaaaaaacctgaagccaaataaacttgtccattatgaacttacaggccctctgtgcctccaactcacctttttcaacgcttcctacctccctgtggtgttcaaaaatctgttttattgtacaccctcttctctcatcttcactttcagatacttcaaacatctgacctcatggttgttttttttttgagatgtcttgctgtgtcacccaggctggagtgcagtggtgcaatctcggctcactgca

SEQ ID NO: 71947 - DNA, 365 bp, Homo sapiens
aatataaaacctcaggcatttatttcatagaactctttccagggaaagctatagatgcagtatagccaactcaaaacactccttcttccctgttcctcctcaagccttacactcagtgcccaaacccatgggttccacctcagaaacatctcttaagtccactccttcctctagccccatgtccccaactgcagcctcatttcccgctttcaggaactcaggttcaggagctcctaactttcatcgtacactttttacaacttggtgcctttgtaatactgctgcttctgcctggaagccactgggttaagagcacagactcagaagccggactgtctgagctccaattctgactgaacgtctgc

SEQ ID NO: 71948 - DNA, 3401 bp, Homo sapiens
actttagtcaagtaagcacaaaaaggaatatataattccaaattgtgataaatgctatgaagaaaaggaatgtgctctgacataaaggggggaacgaacgtgatctagggagtcagagatctctccgagaagagatctgaaataggagtaagtcgagagggggaagagaatgctagaccgagggaacagtgcgtgccaaagccgcgtggcggaaaggggcgtgtgggagggtaactgcggagagggagggtagaggacgaagccggagaggcagacgaagggcaggacgcacagagccccgcggctaccgccttaggggttgtcccggcggtggggaagccattgaggagtttaacgccggaaggtggtgactaatcagatttcacttgaaaatggcacggtgtctgcagcgaggctaactgatgggaagggcccagcgaatgccaataggagagagcaccggacctggaaggcctgggtcaacgcggccccgcgcgggggcgaagcggttccggcgcaggggcctggcgcggggctccgcggaaaaccgaaccggcccacgtgggaccggtcgctccgccctgctgcgcagacgccgcctgactccgcagtccgggactggggctgggcgcgctgcccgggagccccgcacccacgcctggaccgcggagacgcccaggccgaggaacccccagcccagggactagacaccaccagggccgggcggagccagagccagacgcgccggagcgggcgcctctacgccggttggatagcagttggatctgggctgaagacagatctgagagtcaccagcatatgatggtctttgaagctacagcagagaatgaggtcctctggagagaaatgcacaaaatcagaagacagcctggctctgaggacggaggaaaaaccctttgcaggagactgagaatgaacaggctagatgttcgccatccagccagggctagctgaggggggccaattcctgggggacccacctcctggattatgtcagcccgagctccaaccagacagcaactccaacttcatggcaagtgccaaggatgctaacgagaattggcatgggatgccaggcagagtggaacctatcctgaggaggagctcctctgagtcaccctctgacaaccaagccttccaggcccctggatcccctgaggaaggggtgcgcagccccccagagggggcagagattcccggggctgagcctgagaagatgggtggtgctggcacagtctgctcccctctggaggacaacggctatgccagcagttccctgagcattgacagccgtagcagcagtcctgagcctgcctgtgggaccccgcgaggccctggccctcccgatccccttctgccctcagtggcccaggctgtgcagcacttacaagtccaggagcgctacaaagagcaggagaaggaaaagcaccacgtgcacttggtgatgtaccgtcgcctggcactgctccagtggatccggggcctgcagcatcagttgattgaccagcaggcccgactgcaggagagcttcgacaccatcctagacaaccggaaggagcttattcgctgtctccagcagagggcagcaccatccaggccccaggaccaggcctaagggtgtgcctccacaagtgtgcaagggtatatgtatatatttgcaggcatgtgtgaggcgcactagtaagtacataatttgctggcatgattgcaggtaggcatgagtgtgtatgtgctaacatgtaggctggtgtgtgtaggcatgtgtgaataagcatgtataaatgagcttaagtgtgctgtgtgcacatgtgtacacacagctaatttatctgcagacctatatgtgagcatgtaagagtgaacatatgtgtgtgtgtgtagtatgtaagaatgaggaactcggtatgtgcatgtgtagacaggtacccagcagtgtgtgtatatgcgcatgagtgaggatgtataggcagaagatgtgtgtgtctatgagtgagtttgagtgtgcaggcttgtattaggtgtatgtgaggaagcccttgtgtgtgcaggggtgcacatgtttggccacaggcatgggaggtgtatgttaggagcatgtgtgtttgtaggcagactcatgagcaggtgtgtgcaaatacatatccagctgcactgtgggtgtccacccacaccttgtgttcctcatggcctaccccagcctttcttctccactgggtcccactgttccctggagacagagggctagcatgctgtcatttatctgaaggttgtggctgacccattctcctgggatttcccaggccacctctcctttccctttccctcacttaacccagacttgctcagctgaggctattgtccctgatgttggctttacttgtaggaggtttagtggctgctctggcctgccatggaattttggctgcaattttggcagtgtgtggagaactggtatcaggaaagggaaccaggagtagtgatgaagatgatggtggggatggggacagaggacataggggactgtccctcttgaactctgcctttgggcacatgggagatggggacaggaaagatgataacagtggaaccctgtgaagaataggagaatgggaattctaaaataccagttcccaaacaaaccatctctccattggaaaaggagctgttgcaaaccgtgttcatttaagcttctgatgaaaagcaatgtatgtttataagcttgcaagtaacagacaagatgttccaaggccgatgaggaaaatatcgcttccctgtctctgcctctaccttgctgtgcctctctggctttagcagcattggatgttgaattggtttggttcatttctctgaagtcggactgtcaggaggagccagaggttggctttctgggatgtgaaggggacagtgtcagcctaagcctctggagatgcttaggatgctgaattttaaccccttctttcactgcatggcccttcaaacagggattggcaggctccgcgagttacagagtgggtgagtcttggagagaaccaacgactaaggtagcttagctctctgctttgttcttgggagccaagagaatgcaagatcctggtgggtgagcagtggtatgaagaggggacactggtgggtgaacagtggcatggaagtcactgatgcagcctctggccctcagtctccctatcggcaaagtggggggctcttcctatctctaaagagtttcatccctgacaggtggatgggtgaaagatccagagagtgggggtgaggggtgggccctgaagactttttgtctgtagctcttgcatattgagtgtataaacccggcttctggaccaacccaagatgaataaactggggcagaaaattacaaaaaaaaa

SEQ ID NO: 71949 - DNA, 3226 bp, Homo sapiens
actttagtcaagtaagcacaaaaaggaatatataattccaaattgtgataaatgctatgaagaaaaggaatgtgctctgacataaaggggggaacgaacgtgatctagggagtcagagatctctccgagaagagatctgaaataggagtaagtcgagagggggaagagaatgctagaccgagggaacagtgcgtgccaaagccgcgtggcggaaaggggcgtgtgggagggtaactgcggagagggagggtagaggacgaagccggagaggcagacgaagggcaggacgcacagagccccgcggctaccgccttaggggttgtcccggcggtggggaagccattgaggagtttaacgccggaaggtggtgactaatcagatttcacttgaaaatggcacggtgtctgcagcgaggctaactgatgggaagggcccagcgaatgccaataggagagagcaccggacctggaaggcctgggtcaacgcggccccgcgcgggggcgaagcggttccggcgcaggggcctggcgcggggctccgcggaaaaccgaaccggcccacgtgggaccggtcgctccgccctgctgcgcagacgccgcctgactccgcagtccgggactggggctgggcgcgctgcccgggagccccgcacccacgcctggaccgcggagacgcccaggccgaggaacccccagcccagggactagacaccaccagggccgggcggagccagagccagacgcgccggagcgggcgcctctacgccgctagatgttcgccatccagccagggctagctgaggggggccaattcctgggggacccacctcctggattatgtcagcccgagctccaaccagacagcaactccaacttcatggcaagtgccaaggatgctaacgagaattggcatgggatgccaggcagagtggaacctatcctgaggaggagctcctctgagtcaccctctgacaaccaagccttccaggcccctggatcccctgaggaaggggtgcgcagccccccagagggggcagagattcccggggctgagcctgagaagatgggtggtgctggcacagtctgctcccctctggaggacaacggctatgccagcagttccctgagcattgacagccgtagcagcagtcctgagcctgcctgtgggaccccgcgaggccctggccctcccgatccccttctgccctcagtggcccaggctgtgcagcacttacaagtccaggagcgctacaaagagcaggagaaggaaaagcaccacgtgcacttggtgatgtaccgtcgcctggcactgctccagtggatccggggcctgcagcatcagttgattgaccagcaggcccgactgcaggagagcttcgacaccatcctagacaaccggaaggagcttattcgctgtctccagcagagggcagcaccatccaggccccaggaccaggcctaagggtgtgcctccacaagtgtgcaagggtatatgtatatatttgcaggcatgtgtgaggcgcactagtaagtacataatttgctggcatgattgcaggtaggcatgagtgtgtatgtgctaacatgtaggctggtgtgtgtaggcatgtgtgaataagcatgtataaatgagcttaagtgtgctgtgtgcacatgtgtacacacagctaatttatctgcagacctatatgtgagcatgtaagagtgaacatatgtgtgtgtgtgtagtatgtaagaatgaggaactcggtatgtgcatgtgtagacaggtacccagcagtgtgtgtatatgcgcatgagtgaggatgtataggcagaagatgtgtgtgtctatgagtgagtttgagtgtgcaggcttgtattaggtgtatgtgaggaagcccttgtgtgtgcaggggtgcacatgtttggccacaggcatgggaggtgtatgttaggagcatgtgtgtttgtaggcagactcatgagcaggtgtgtgcaaatacatatccagctgcactgtgggtgtccacccacaccttgtgttcctcatggcctaccccagcctttcttctccactgggtcccactgttccctggagacagagggctagcatgctgtcatttatctgaaggttgtggctgacccattctcctgggatttcccaggccacctctcctttccctttccctcacttaacccagacttgctcagctgaggctattgtccctgatgttggctttacttgtaggaggtttagtggctgctctggcctgccatggaattttggctgcaattttggcagtgtgtggagaactggtatcaggaaagggaaccaggagtagtgatgaagatgatggtggggatggggacagaggacataggggactgtccctcttgaactctgcctttgggcacatgggagatggggacaggaaagatgataacagtggaaccctgtgaagaataggagaatgggaattctaaaataccagttcccaaacaaaccatctctccattggaaaaggagctgttgcaaaccgtgttcatttaagcttctgatgaaaagcaatgtatgtttataagcttgcaagtaacagacaagatgttccaaggccgatgaggaaaatatcgcttccctgtctctgcctctaccttgctgtgcctctctggctttagcagcattggatgttgaattggtttggttcatttctctgaagtcggactgtcaggaggagccagaggttggctttctgggatgtgaaggggacagtgtcagcctaagcctctggagatgcttaggatgctgaattttaaccccttctttcactgcatggcccttcaaacagggattggcaggctccgcgagttacagagtgggtgagtcttggagagaaccaacgactaaggtagcttagctctctgctttgttcttgggagccaagagaatgcaagatcctggtgggtgagcagtggtatgaagaggggacactggtgggtgaacagtggcatggaagtcactgatgcagcctctggccctcagtctccctatcggcaaagtggggggctcttcctatctctaaagagtttcatccctgacaggtggatgggtgaaagatccagagagtgggggtgaggggtgggccctgaagactttttgtctgtagctcttgcatattgagtgtataaacccggcttctggaccaacccaagatgaataaactggggcagaaaattacaaaaaaaaa

SEQ ID NO: 71950 - DNA, 3062 bp, Homo sapiens
actttagtcaagtaagcacaaaaaggaatatataattccaaattgtgataaatgctatgaagaaaaggaatgtgctctgacataaaggggggaacgaacgtgatctagggagtcagagatctctccgagaagagatctgaaataggagtaagtcgagagggggaagagaatgctagaccgagggaacagtgcgtgccaaagccgcgtggcggaaaggggcgtgtgggagggtaactgcggagagggagggtagaggacgaagccggagaggcagacgaagggcaggacgcacagagccccgcggctaccgccttaggggttgtcccggcggtggggaagccattgaggagtttaacgccggaaggtggtgactaatcagatttcacttgaaaatggcacggtgtctgcagcgaggctaactgatgggaagggcccagcgaatgccaataggagagagcaccggacctggaaggcctgggtcaacgcggccccgcgcgggggcgaagcggttccggcgcaggggcctggcgcggggctccgcggaaaaccgaaccggcccacgtgggaccggtcgctccgccctgctgcgcagacgccgcctgactccgcagtccgggactggggctgggcgcgctgcccgggagccccgcacccacgcctggaccgcggagacgcccaggccgaggaacccccagcccagggactagacaccaccagggccgggcggagccagagccagacgcgccggagcgggcgcctctacgccgctagatgttcgccatccagccagggctagctgaggggggccaattcctgggggacccacctcctggattatgtcagcccgagctccaaccagacagcaactccaacttcatggcaagtgccaaggatgctaacgagaattggcatgggatgccaggcagagtggaacgacaacggctatgccagcagttccctgagcattgacagccgtagcagcagtcctgagcctgcctgtgggaccccgcgaggccctggccctcccgatccccttctgccctcagtggcccaggctgtgcagcacttacaagtccaggagcgctacaaagagcaggagaaggaaaagcaccacgtgcacttggtgatgtaccgtcgcctggcactgctccagtggatccggggcctgcagcatcagttgattgaccagcaggcccgactgcaggagagcttcgacaccatcctagacaaccggaaggagcttattcgctgtctccagcagagggcagcaccatccaggccccaggaccaggcctaagggtgtgcctccacaagtgtgcaagggtatatgtatatatttgcaggcatgtgtgaggcgcactagtaagtacataatttgctggcatgattgcaggtaggcatgagtgtgtatgtgctaacatgtaggctggtgtgtgtaggcatgtgtgaataagcatgtataaatgagcttaagtgtgctgtgtgcacatgtgtacacacagctaatttatctgcagacctatatgtgagcatgtaagagtgaacatatgtgtgtgtgtgtagtatgtaagaatgaggaactcggtatgtgcatgtgtagacaggtacccagcagtgtgtgtatatgcgcatgagtgaggatgtataggcagaagatgtgtgtgtctatgagtgagtttgagtgtgcaggcttgtattaggtgtatgtgaggaagcccttgtgtgtgcaggggtgcacatgtttggccacaggcatgggaggtgtatgttaggagcatgtgtgtttgtaggcagactcatgagcaggtgtgtgcaaatacatatccagctgcactgtgggtgtccacccacaccttgtgttcctcatggcctaccccagcctttcttctccactgggtcccactgttccctggagacagagggctagcatgctgtcatttatctgaaggttgtggctgacccattctcctgggatttcccaggccacctctcctttccctttccctcacttaacccagacttgctcagctgaggctattgtccctgatgttggctttacttgtaggaggtttagtggctgctctggcctgccatggaattttggctgcaattttggcagtgtgtggagaactggtatcaggaaagggaaccaggagtagtgatgaagatgatggtggggatggggacagaggacataggggactgtccctcttgaactctgcctttgggcacatgggagatggggacaggaaagatgataacagtggaaccctgtgaagaataggagaatgggaattctaaaataccagttcccaaacaaaccatctctccattggaaaaggagctgttgcaaaccgtgttcatttaagcttctgatgaaaagcaatgtatgtttataagcttgcaagtaacagacaagatgttccaaggccgatgaggaaaatatcgcttccctgtctctgcctctaccttgctgtgcctctctggctttagcagcattggatgttgaattggtttggttcatttctctgaagtcggactgtcaggaggagccagaggttggctttctgggatgtgaaggggacagtgtcagcctaagcctctggagatgcttaggatgctgaattttaaccccttctttcactgcatggcccttcaaacagggattggcaggctccgcgagttacagagtgggtgagtcttggagagaaccaacgactaaggtagcttagctctctgctttgttcttgggagccaagagaatgcaagatcctggtgggtgagcagtggtatgaagaggggacactggtgggtgaacagtggcatggaagtcactgatgcagcctctggccctcagtctccctatcggcaaagtggggggctcttcctatctctaaagagtttcatccctgacaggtggatgggtgaaagatccagagagtgggggtgaggggtgggccctgaagactttttgtctgtagctcttgcatattgagtgtataaacccggcttctggaccaacccaagatgaataaactggggcagaaaattacaaaaaaaaa

SEQ ID NO: 71951 - DNA, 596 bp, Homo sapiens
acacacatatttatggtctgcacaaatgggtatatgccagagtgaacatgaaagtaaattacatcttacccgaatctgattctaatcagaaaacagccaagaacataacaccttttcctgctttcagtggagctggtgggacaaacctggactgggtggagctggggccccagcagtgggctctgccatagcaggcgccataagctggaatttgtgcctccaggcctggagggacgcaaggcgtttctgatgaagccgatacattcagaattggggtccaaataggaaataatgcccttttcaggctagtgaaaatgttgaactctaagagataagtttatttagagactggattgagcttttgtttaagatttcccacctgcgtaaaattcctttcagcccataggattcttgattctgaagtccagacagaagcctgtgttctgtagctgctgaacaaagatgagagatcactggggctgctgtttgtccgaagtttgtgtgggtatcatgatgaaccctcttctaagaagtaaaaggatcttttaaatcaaaatagacaactgcagtcagtccaccatgcccaacgacattta

SEQ ID NO: 71952 - DNA, 546 bp, Homo sapiens
aggagatcttcaaataatctccttctcttcctacaatctccactctcccaggactgccctctttgtgaggcttctggaacttcacacatctggcctcaatttcaccagtgcaagcatatctgcacgcctctccaatcttatcctcccaggtccccttcttaacgccagtgggtctggtctcctctttctagcaaatatctttttctctctgttgctggttgagccctcccaacagacatgtatctggcagagttgggacattgagtgtgggggttggggggaacatgtgacatctttggaatctgacggtcccagagtggatttttggaaatctagtgttgggtggttttagtgggctgagacagaattgaaagggaatgtcttggttggggttatttgcacatttcttctctgctggggcagagcaaattaagctttgattatctgatagattaactgtaaagctactgctctttataaatttaacaccttttgttacttctgagttttcttctaagccactggacccatccgtaaaaaaaaaaa

SEQ ID NO: 71953 - DNA, 343 bp, Homo sapiens
acactcacacggtcacacggagaccgaggctatgagcgctcgaacagcagagacatgctcttccccaggggtctccctgagaccacagagcctctcgcgtgctcactgcaatcttctcaagtcaacagcaggaaggaactcaaccagtaacaccaggatcctttgagatcctctaaagtgggccaaagtggtgcccctggaggagccctcctgtcaccatggtaaccctctcacacctctcctgctgggctttcccgggataccacccaggggcctggagcggctgcatgtgtgcatggcggcctcctgaggacccagccacacaccactggtgttgcctcgg

SEQ ID NO: 71954 - DNA, 8443 bp, Homo sapiens
  misc_feature (2)..(2): n is a, c, g, or t
  misc_feature (8)..(8): n is a, c, g, or t
antctggntcggaggaatctcagtagggacaacaggcaggagaatatgggagcgcatttccccaggtggtgaaaacaggaatgagaacgaggagtcaacctcaaaggctgaaacctcggaagattcagcatcacgcggggagacaacaggaagatcccagaaagagtttggagagaaacgtgaccaggagggcaaaacaggagaaagacagcagaaaaaccctgaggagaaaaccaggaaagagaaaagagattcagggccagctataggaaaggacaaaaaaaccatcacaggagagagaggtccaagggagaaggggaaaggattgggaagaagcttcagtctgagctccaacttcaccacccctgaagaagttcccacgggaacaaagtctcacagatgtgatgaatgtggtaaatgcttcacgagaagttcaagccttatccgccataaaataatccacactggagaaaagccctatgaatgtagtgagtgtgggaaagccttcagtcttaactccaaccttgtcctgcatcagaggatccacacaggagagaaacctcatgaatgtaacgagtgtggcaaggccttcagccacagttccaatctcatcctccatcagcgcatccactctggagagaaaccttatgaatgtaatgagtgcgggaaggccttcagccagagctcggacctcaccaagcatcagagaattcacacgggggagaaaccctatgaatgtagtgaatgtggaaaagctttcaaccgaaactcatacctgattttgcatcggagaattcacactcgagaaaagccctacaagtgcactaagtgtggcaaggccttcacccgcagctccaccctcactctgcatcacagaatccatgccagagagagagcctctgagtacagcccagcctcccttgatgcatttggcgcgttcctgaaaagttgtgtgtaaaggaagaatttgccatcaagccatttcccccttttgtttctaaaattatttcagagatgtgtgctcctggagggaaaaagaaatacagcctcaacagattaaaaaacaaaagtcacacttaaggatccttctagtcacatcagcagtgttctgcctttatgtagtagttgggcatataatccttccacacagcccctgcagggaaaggctaatcttacggataatccacgtgagatttccacacaagagaaaagcacacgcatagtgaaatgtcagtcttttcagtaatgaggatacctttaaggcactcttggactctcggcaaccacaacataatagttgaaagatcaagattggctccacgaaagtgatacggaggttaggatgctacttgctgcaaacaagccctactttggccaacatcctgcttatttctcaaaaaagagggacagtgaaaacaaaaacgacattgggacatgctgctcaaggtagttatatatacgataagttgtatatatgatcactggtagcctaccaaagctgtagaaatctaggactgtgctaatcagtatcaaaccaaagatttctatctcttcccgaaagagagggtatgtgcaccagtctacagttccaaaggactgcaacaaatgtagatggttctgtcctcatccctgagatcagttctactgaaatggcaacaacaactccaaatacatctctcccttcttgaaatccctaaagcactatcgcactcctaaatgcatttctccacaagttagcacttgattgtatactgtcttttaatccttcattgtttcatgtatgaagtttttaatcaccccctaacccccaaaaaagattcggttgtcaagggatatatttctatccctgccagcacagtgctggacatagtgagtactgaacacctaagaggcactcattcagactgacttctacaggacttctacgtgtgtgataaaagcctgtgaatcgtgagtccctgaaatatggtagcctggcccagcttctaaagaggaccttcgtagccacaaggcatgctaaacctctagggtctgatgctgtttttgttccaaatataaacgaaaggcactagtcagccgcctgcatagactttctaaacagtgagtaaataccatggaatgtcagaaatgactttatcatcgtcatcttgaagaaaaatatgaacactgatgaaggtcattttttttttttgacatctttctgtggcaaagctcttagaattctttgcagttagctgctgaacagtatgatgatttggggattttctgaatcatttgtacttagatactggagttcagaagatgtgatttttgttgcttttcagaaaaaggaacgtggtagggagtgttttttcccacgcttttccagtaactttgcaaaagcattaattgttcactggcaattactaaatgtattttgttgctctgagaaactcagcagtgtactgagatgtggctggctgtgccatcgtcatagtgcacagtgacttttctgtttcttatcactaaagactgaggtgaggttatgaaactttcattggtcccatcgttgtgcgcagggtgcaactggctacctagaagctgatggcaggagactgtttcacacacaggagattgtgagctgtgtaagtagtcatcgccactcaagtaggacaagggtcctacccaaggctaggaccgccctgcggaaacagaaacatagactgagaacaaacctcaagactatcagtgtgacctccccataacaagagaaccccatatatagtttgagactttcccttgagaaacttatactaaaactattactcatcagtcattcactgatcagcagctaaagtccatgagaccaaatggttttatatggaaccaacgaagtgggagctaaaactgcacagtggtcattctttggcctctccttggctttatgacttaaaccaactacaacttccctatagcttctaagcagtttcatcagcattacttgggaaaacgtgttgcaagtcaaccagtcactaggatatttctacccatgcaacggaagaaaaacccattactccagaagagtatatctaagtaactaaaatggaggcagaaaatgttttaaggattttcttcaaagaataagccacagcaatggttttgtagaaaactcctgtgcttttgagcaaggacttttgccctctagaaagcaactgaggccaggtgcggtggctcacgcctgtaatcccagcactttgggaggccgaggtgagcggatcacctgaggtcaggagttttgagaccagcctggccaacatggtaaaatcccgtctctactaaaattataaaaattagccgggcatgatggtgggcacctgtaatcccagctacttgggaggctgaggcaggagaatcacttgaacccaggaggcagaggttgcagtgagccaagattgcacactgcactccagcctgggtgactagcaaaactccatctcaaaaaaaaaaaaaagaaagaaagaaactgaaaagtgaggtgtggaactccaggcaacgacccaagcacttattttttaagagggaaaggactttggtcatgtttacattggcctttggtttttttttttctttcagccacaactatatgctgatataactcagccatcacttttgagttttgtttttaaatgaaggttaaatgtgacctgtgccctcacatttaattccgtttcatggagacatcttcctgactttgttggatagctgccactagggttgcttcgatcttcagccacatgctgtccttgaagcagctatttgaagatgtgttttctgaggaaaacaggctacaactgtttattaaaaccacttgcagtgcattcgtttatcagatgctcagtgcaaagtgtaattgggtcatggtcaaaaacgcttgcaacatctaattggcgttcaagatagtcattcaaaagttcttggcccgctgaagtctgttaacagttgaaacattctacagttaaccattagcatgctagttgtcctaatggaaatttttgaagagtttttcaatatataccctacccttgccaggaagagaagtaaaatcctcaggttgtggggtatttgtttctactccagcctggcaggcaaggctaaaacctgagattatcgatctatgagacatcttgatatgtaaagcacttaatattaaaggcataaaagtgaaactgctaaatatgtatagagaggttgacgtgtgatacgtgggacagttcacatagacatcagagaatttattccagaaaggagcctcctgaatgtgatgaatacggcaaagcctttaatcacatctcagcccttagcatcggaaagcttatactgtaaataaacttgatgaatattatatgtgaggaaaactttcatgtatagcactcattgcttcagacagaaaatgaattccgtcggtatgttccaatcgtgatgaatttgagaaacattgcaagagggagctcaatcttggccgggcgcagtggctcacgcctgtaatcgcagcactttgggaggccgaggcaggcggatcacgaggtcagtagttcgagaccagcctggccaacatggtgaaaccttgtctctactaaaaatacaaaaaaaaattagctgggcacagtggcgcacgcctgtagtcccagctactcgggaggctgaggcaggagaatggcttgaacctgcgaggcggaggttgcagtgagctaagatcatgccactggcactccagccttgagtgacagagcgaggctctgtatcaaaaaaaaaagttgcgggggggtgctcaatcttaactgcagaggatctacagatgaaaaaaaatgtggggaaatgctttaaaaaaatagcaaaatgtgcaacttcttacaaaaattgttaacgttaggtacttctatatattttatatgaccataatgtccgtgtgtgttttgtaccttcagtcccttgttattgttccgtatattacctgtaagcagatactgtattttattttagcctatttgacagaacacatcactcagaaaaagtgaagtttcagagcaaacagtgaagaaatcagtgtgattgtagacaaaaagtcggttcacagaacggagcagcggggagaggaagggaaaagcttcatagtttggtgcttatcacatcaagagattggtaaatttctgaggaaagacaggctaatggggcactgaaatggaacaactcctttaaacgtgcagccttttgaatttttcctcaaaaccaagaagttgacctctgagctgtcaggtgaccactgtgtgcaaaggggatggattctcttgtcagtagacggtcttctccatgaagcgagagtaggaagtgtactggaatggccaagtgggactgcttcagctgaccaggttcttttaaaccgtagtcatgctttcccactaactcttaaatccttatgcttagaaaattgaggataaggctgggcacagtggctcaggcctgtaatcccagcactttgggagaccaaggcgggtggatcacaaggtcaggagatcgagaccatcctggctaacatggcgaaaccccgtctctactaaaaatacaaaaaaatagctgggcgtggtggcgggcgcctgtagtcccagctactcaggaggctgaggcaggaggatcacttgaacatgggaggcggaggttgcagtgagccaagatggcgccactgcactccagcctgggtgatggcgtgagactccatgtcaaaaaaaaaaacaaaggttggggggaggataggactggccaggcacggtggctcactcctgtaatctcagcactttgggaggcagaggtgggcggatcacttgaggtcaggagtttgagaccagcctggccaacgtggtgaaagcctgtctctactaaaaatacaaaaattagccgggcgtggtggtgggcgcctgtagtcccagctactcaggaggctgaggcaggagaatcacctaaatctgggaggcagaggttgcagtgagccgagattgcaccactgcactccagcctgggtaacagagactctgtctcaaaaaaagaaaaaaagaaagaaagaaagaaagaaaattggggataggagaacagcaaggtgggcatttcccggaattgtgtgcagatgcatccagtcgtggcattgcaagaagtctgtctgatgaagctcgggaagcattttgcaatattccctttggctgtgttcctgtgttccctgctcccacttttcttcccctggtttgtgattattaggagagaggttttgcaaagactcgttgctgtgaaagaatctttttttaatttttatcctagagtcagtcacttttattccaggtagtcatgctgatctgcttatccaaagccagctaaccaggttcatcctaccatcctcatggaagactgtgtgtatgaattggagtaacagaactgaaatacacttaaacagtgacagcagtacttcccagggtgggggccatatttctctgtgtcctactctgagcaacttctcagagatacgagggggctagggttttcccatctgggaaatggggtgaaagtctgcagattgttaaatgaaatatagaatcagagaaaaagaaaagtcagtgatataaatagatcatttcatagaaattagggtagatttttatttcaactactactggagaatttaataaaaggcattatttgaaaagtttttctaacatagatttagggtttttttttttagagtggacacactacatttaaaagcaattattttgctattcagattttttattatctgaaaatgaaattatctgttttacttttcaaagctttgtgaaacaaacttgaagttatagggaggtaagccatctccaactctgcaggtcaaacgaaagtttgggaaatacttttgacatcccacaatacagaatgtcttaacatgagaattgaatttcatgatgtgtggttccatttaatagcggacaccaccccaatctcatgttttcctgttaccctaaaacagtggaaggaaactgggtgtttggtagacttctaaatcatggtctctgacaatttgaatctgagattctcacctccatttactaaagaatcgtgacttaattcaaattgcacagtaatcagtaaagtgaatacgtttttaaaatggaattttctcccttcagcaagcactcattaaggagtgaggctgagtattttaagatagagtgagatctgtgagtgattgaaaggtgatatttaaaaacttggatttcattccagtgtcaggtttgggttttaagttcctttggtccagggaagggtccaagcagccacagttgccctaaatctccatcattaagtcttccagcaaggttaagtgcagtatggaaggagaagggggaagaggacggtaacggccccacactccaggctgagaaagagtaattaggaggcctgaggaggggccgaggaaaggctgttggggtgtgctggggttggtacccgagcgccttcccctcacctcaaccagagaagagcatccggttgctttttaaagcttttagcctgccctagcaaggacaaagcatgttagattagagatgcttctgctgatcgcaggggttcttatttgaaaacatctatgatgggggtggggtgggaggagacaggttgtggttatgcaggaaaatcttgtcctaaaaatatatgagtttgggggtaaggggtgggatagccaagcaaaatcagtaattattttaaaatgaacatatgtatttttattaacttttagttaaatacagattttacaacgaggtcagcataagcctaaatctatatagagggctaactcaggcattgtcttgtttatttgtagactggattaaaaacaacctgtcctgttttgtcagttcccagcttcttcgtttagaataaattagaccaaaagaagaaacgtgcttgtctctgtatacccgcagaatgaagttactgttgttaaaactggattttttcattttactaggttccgaagagtccagatgcttggtagatgttcaatacgtgattttttttttaattgaatgtgttcatttaaaatcctccttaacatttctagaaagacttctttcaataaataatggaatcttagaggaaaagtggttttttaaaagctagggaactcctccactaaaagtaaccattggaaacctcgaatgagggctaaagttttaatcataagagaaaaggcagcataatgaaatgtgtacacatacatagtcagtggtccattttaggaagccagtggcgtctgataaagaaatgttaagagtagtgaggttgaggaaggaaattgtggggatttgaaatattctctttatgttgtttctcttctgagtcatggtaaaacaataaattatcatctcta

SEQ ID NO: 71955 - DNA, 7146 bp, Homo sapiens
  misc_feature (2)..(2): n is a, c, g, or t
  misc_feature (8)..(8): n is a, c, g, or t
antctggntcggaggaatctcagtagggacaacaggcaggagaatatgggagcgcatttccccaggtggtgaaaacaggaatgagaacgaggagtcaacctcaaaggctgaaacctcggaagattcagcatcacgcggggagacaacaggaagatcccagaaagagtttggagagaaacgtgaccaggagggcaaaacaggagaaagacagcagaaaaaccctgaggagaaaaccaggaaagagaaaagagattcagggccagctataggaaaggacaaaaaaaccatcacaggagagagaggtccaagggagaaggggaaaggattgggaagaagcttcagtctgagctccaacttcaccacccctgaagaagttcccacgggaacaaagtctcacagatgtgatgaatgtggtaaatgcttcacgagaagttcaagccttatccgccataaaataatccacactggagaaaagccctatgaatgtagtgagtgtgggaaagccttcagtcttaactccaaccttgtcctgcatcagaggatccacacaggagagaaacctcatgaatgtaacgagtgtggcaaggccttcagccacagttccaatctcatcctccatcagcgcatccactctggagagaaaccttatgaatgtaatgagtgcgggaaggccttcagccagagctcggacctcaccaagcatcagagaattcacacgggggagaaaccctatgaatgtagtgaatgtggaaaagctttcaaccgaaactcatacctgattttgcatcggagaattcacactcgagaaaagccctacaagtgcactaagtgtggcaaggccttcacccgcagctccaccctcactctgcatcacagaatccatgccagagagagagcctctgagtacagcccagcctcccttgatgcatttggcgcgttcctgaaaagttgtgtgtaaaggaagaatttgccatcaagccatttcccccttttgtttctaaaattatttcagagatgtgtgctcctggagggaaaaagaaatacagcctcaacagattaaaaaacaaaagtcacacttaaggatccttctagtcacatcagcagtgttctgcctttatgtagtagttgggcatataatccttccacacagcccctgcagggaaaggctaatcttacggataatccacgtgagatttccacacaagagaaaagcacacgcatagtgaaatgtcagtcttttcagtaatgaggatacctttaaggcactcttggactctcggcaaccacaacataatagttgaaagatcaagattggctccacgaaagtgatacggaggttaggatgctacttgctgcaaacaagccctactttggccaacatcctgcttatttctcaaaaaagagggacagtgaaaacaaaaacgacattgggacatgctgctcaaggtagttatatatacgataagttgtatatatgatcactggtagcctaccaaagctgtagaaatctaggactgtgctaatcagtatcaaaccaaagatttctatctcttcccgaaagagagggtatgtgcaccagtctacagttccaaaggactgcaacaaatgtagatggttctgtcctcatccctgagatcagttctactgaaatggcaacaacaactccaaatacatctctcccttcttgaaatccctaaagcactatcgcactcctaaatgcatttctccacaagttagcacttgattgtatactgtcttttaatccttcattgtttcatgtatgaagtttttaatcaccccctaacccccaaaaaagattcggttgtcaagggatatatttctatccctgccagcacagtgctggacatagtgagtactgaacacctaagaggcactcattcagactgacttctacaggacttctacgtgtgtgataaaagcctgtgaatcgtgagtccctgaaatatggtagcctggcccagcttctaaagaggaccttcgtagccacaaggcatgctaaacctctagggtctgatgctgtttttgttccaaatataaacgaaaggcactagtcagccgcctgcatagactttctaaacagtgagtaaataccatggaatgtcagaaatgactttatcatcgtcatcttgaagaaaaatatgaacactgatgaaggtcattttttttttttgacatctttctgtggcaaagctcttagaattctttgcagttagctgctgaacagtatgatgatttggggattttctgaatcatttgtacttagatactggagttcagaagatgtgatttttgttgcttttcagaaaaaggaacgtggtagggagtgttttttcccacgcttttccagtaactttgcaaaagcattaattgttcactggcaattactaaatgtattttgttgctctgagaaactcagcagtgtactgagatgtggctggctgtgccatcgtcatagtgcacagtgacttttctgtttcttatcactaaagactgaggtgaggttatgaaactttcattggtcccatcgttgtgcgcagggtgcaactggctacctagaagctgatggcaggagactgtttcacacacaggagattgtgagctgtgtaagtagtcatcgccactcaagtaggacaagggtcctacccaaggctaggaccgccctgcggaaacagaaacatagactgagaacaaacctcaagactatcagtgtgacctccccataacaagagaaccccatatatagtttgagactttcccttgagaaacttatactaaaactattactcatcagtcattcactgatcagcagctaaagtccatgagaccaaatggttttatatggaaccaacgaagtgggagctaaaactgcacagtggtcattctttggcctctccttggctttatgacttaaaccaactacaacttccctatagcttctaagcagtttcatcagcattacttgggaaaacgtgttgcaagtcaaccagtcactaggatatttctacccatgcaacggaagaaaaacccattactccagaagagtatatctaagtaactaaaatggaggcagaaaatgttttaaggattttcttcaaagaataagccacagcaatggttttgtagaaaactcctgtgcttttgagcaaggacttttgccctctagaaagcaactgaggccaggtgcggtggctcacgcctgtaatcccagcactttgggaggccgaggtgagcggatcacctgaggtcaggagttttgagaccagcctggccaacatggtaaaatcccgtctctactaaaattataaaaattagccgggcatgatggtgggcacctgtaatcccagctacttgggaggctgaggcaggagaatcacttgaacccaggaggcagaggttgcagtgagccaagattgcacactgcactccagcctgggtgactagcaaaactccatctcaaaaaaaaaaaaaagaaagaaagaaactgaaaagtgaggtgtggaactccaggcaacgacccaagcacttattttttaagagggaaaggactttggtcatgtttacattggcctttggtttttttttttctttcagccacaactatatgctgatataactcagccatcacttttgagttttgtttttaaatgaaggttaaatgtgacctgtgccctcacatttaattccgtttcatggagacatcttcctgactttgttggatagctgccactagggttgcttcgatcttcagccacatgctgtccttgaagcagctatttgaagatgtgttttctgaggaaaacaggctacaactgtttattaaaaccacttgcagtgcattcgtttatcagatgctcagtgcaaagtgtaattgggtcatggtcaaaaacgcttgcaacatctaattggcgttcaagatagtcattcaaaagttcttggcccgctgaagtctgttaacagttgaaacattctacagttaaccattagcatgctagttgtcctaatggaaatttttgaagagtttttcaatatataccctacccttgccaggaagagaagtaaaatcctcaggttgtggggtatttgtttctactccagcctggcaggcaaggctaaaacctgagattatcgatctatgagacatcttgatatgtaaagcacttaatattaaaggcataaaagtgaaactgctaaatatgtatagagaggttgacgtgtgatacgtgggacagttcacatagacatcagagaatttattccagaaaggagcctcctgaatgtgatgaatacggcaaagcctttaatcacatctcagcccttagcatcggaaagcttatactgtaaataaacttgatgaatattatatgtgaggaaaactttcatgtatagcactcattgcttcagacagaaaatgaattccgtcggtatgttccaatcgtgatgaatttgagaaacattgcaagagggagctcaatcttggccgggcgcagtggctcacgcctgtaatcgcagcactttgggaggccgaggcaggcggatcacgaggtcaggagtttgagaccagcctggccaacgtggtgaaagcctgtctctactaaaaatacaaaaattagccgggcgtggtggtgggcgcctgtagtcccagctactcaggaggctgaggcaggagaatcacctaaatctgggaggcagaggttgcagtgagccgagattgcaccactgcactccagcctgggtaacagagactctgtctcaaaaaaagaaaaaaagaaagaaagaaagaaagaaaattggggataggagaacagcaaggtgggcatttcccggaattgtgtgcagatgcatccagtcgtggcattgcaagaagtctgtctgatgaagctcgggaagcattttgcaatattccctttggctgtgttcctgtgttccctgctcccacttttcttcccctggtttgtgattattaggagagaggttttgcaaagactcgttgctgtgaaagaatctttttttaatttttatcctagagtcagtcacttttattccaggtagtcatgctgatctgcttatccaaagccagctaaccaggttcatcctaccatcctcatggaagactgtgtgtatgaattggagtaacagaactgaaatacacttaaacagtgacagcagtacttcccagggtgggggccatatttctctgtgtcctactctgagcaacttctcagagatacgagggggctagggttttcccatctgggaaatggggtgaaagtctgcagattgttaaatgaaatatagaatcagagaaaaagaaaagtcagtgatataaatagatcatttcatagaaattagggtagatttttatttcaactactactggagaatttaataaaaggcattatttgaaaagtttttctaacatagatttagggtttttttttttagagtggacacactacatttaaaagcaattattttgctattcagattttttattatctgaaaatgaaattatctgttttacttttcaaagctttgtgaaacaaacttgaagttatagggaggtaagccatctccaactctgcaggtcaaacgaaagtttgggaaatacttttgacatcccacaatacagaatgtcttaacatgagaattgaatttcatgatgtgtggttccatttaatagcggacaccaccccaatctcatgttttcctgttaccctaaaacagtggaaggaaactgggtgtttggtagacttctaaatcatggtctctgacaatttgaatctgagattctcacctccatttactaaagaatcgtgacttaattcaaattgcacagtaatcagtaaagtgaatacgtttttaaaatggaattttctcccttcagcaagcactcattaaggagtgaggctgagtattttaagatagagtgagatctgtgagtgattgaaaggtgatatttaaaaacttggatttcattccagtgtcaggtttgggttttaagttcctttggtccagggaagggtccaagcagccacagttgccctaaatctccatcattaagtcttccagcaaggttaagtgcagtatggaaggagaagggggaagaggacggtaacggccccacactccaggctgagaaagagtaattaggaggcctgaggaggggccgaggaaaggctgttggggtgtgctggggttggtacccgagcgccttcccctcacctcaaccagagaagagcatccggttgctttttaaagcttttagcctgccctagcaaggacaaagcatgttagattagagatgcttctgctgatcgcaggggttcttatttgaaaacatctatgatgggggtggggtgggaggagacaggttgtggttatgcaggaaaatcttgtcctaaaaatatatgagtttgggggtaaggggtgggatagccaagcaaaatcagtaattattttaaaatgaacatatgtatttttattaacttttagttaaatacagattttacaacgaggtcagcataagcctaaatctatatagagggctaactcaggcattgtcttgtttatttgtagactggattaaaaacaacctgtcctgttttgtcagttcccagcttcttcgtttagaataaattagaccaaaagaagaaacgtgcttgtctctgtatacccgcagaatgaagttactgttgttaaaactggattttttcattttactaggttccgaagagtccagatgcttggtagatgttcaatacgtgattttttttttaattgaatgtgttcatttaaaatcctccttaacatttctagaaagacttctttcaataaataatggaatcttagaggaaaagtggttttttaaaagctagggaactcctccactaaaagtaaccattggaaacctcgaatgagggctaaagttttaatcataagagaaaaggcagcataatgaaatgtgtacacatacatagtcagtggtccattttaggaagccagtggcgtctgataaagaaatgttaagagtagtgaggttgaggaaggaaattgtggggatttgaaatattctctttatgttgtttctcttctgagtcatggtaaaacaataaattatcatctcta

SEQ ID NO: 71956 - DNA, 9103 bp, Homo sapiens
tggcagtacagtgagactgtgttcaaaaaaacaaattacaagtatatcttacatagaagatgagatctacattatggatttctgccttgtgagagggcctaggaatgcacggtggttaaaaaaaacaaaaatctgctggctgggcgcggcggctcacgtctgtcatcccagcactttgggaggccgaggtcggctgatcacctgaggtcaggaattcaaaaacagccgggccaccacagcaaaaccctgtctctactacaaatacatggaggcggttgcctgggaggcagttctgctccgttcccatggattacaatttaggtgcctctgtcgggggaatatctctttcctagcagagatgaccaggcgaactgatcatccgtctaatcccaacccattgtcccggtaccacattcccgaaactaccaagcatccttctgttggctttctgtcttcttccatcctgtgtgattagtgtgattccaatacactgctttgtgtaattccacgaacttgcacctggactgtccttgtgatgaggattcccagcttccaaacttaatggtgattttctatgaagagctctgggtcctggatgtgtagtaagaacgaggaagttcaagaggcatcagccagataagacaaggtgacactgttggcagacatttccatttgtctctgctggatcttaacccctcaggacagtgctgcaaagaagccctcacgtggtgaaaacaggaatgagaacgaggagtcaacctcaaaggctgaaacctcggaagattcagcatcacgcggggagacaacaggaagatcccagaaagagtttggagagaaacgtgaccaggagggcaaaacaggagaaagacagcagaaaaaccctgaggagaaaaccaggaaagagaaaagagattcagggccagctataggaaaggacaaaaaaaccatcacaggagagagaggtccaagggagaaggggaaaggattgggaagaagcttcagtctgagctccaacttcaccacccctgaagaagttcccacgggaacaaagtctcacagatgtgatgaatgtggtaaatgcttcacgagaagttcaagccttatccgccataaaataatccacactggagaaaagccctatgaatgtagtgagtgtgggaaagccttcagtcttaactccaaccttgtcctgcatcagaggatccacacaggagagaaacctcatgaatgtaacgagtgtggcaaggccttcagccacagttccaatctcatcctccatcagcgcatccactctggagagaaaccttatgaatgtaatgagtgcgggaaggccttcagccagagctcggacctcaccaagcatcagagaattcacacgggggagaaaccctatgaatgtagtgaatgtggaaaagctttcaaccgaaactcatacctgattttgcatcggagaattcacactcgagaaaagccctacaagtgcactaagtgtggcaaggccttcacccgcagctccaccctcactctgcatcacagaatccatgccagagagagagcctctgagtacagcccagcctcccttgatgcatttggcgcgttcctgaaaagttgtgtgtaaaggaagaatttgccatcaagccatttcccccttttgtttctaaaattatttcagagatgtgtgctcctggagggaaaaagaaatacagcctcaacagattaaaaaacaaaagtcacacttaaggatccttctagtcacatcagcagtgttctgcctttatgtagtagttgggcatataatccttccacacagcccctgcagggaaaggctaatcttacggataatccacgtgagatttccacacaagagaaaagcacacgcatagtgaaatgtcagtcttttcagtaatgaggatacctttaaggcactcttggactctcggcaaccacaacataatagttgaaagatcaagattggctccacgaaagtgatacggaggttaggatgctacttgctgcaaacaagccctactttggccaacatcctgcttatttctcaaaaaagagggacagtgaaaacaaaaacgacattgggacatgctgctcaaggtagttatatatacgataagttgtatatatgatcactggtagcctaccaaagctgtagaaatctaggactgtgctaatcagtatcaaaccaaagatttctatctcttcccgaaagagagggtatgtgcaccagtctacagttccaaaggactgcaacaaatgtagatggttctgtcctcatccctgagatcagttctactgaaatggcaacaacaactccaaatacatctctcccttcttgaaatccctaaagcactatcgcactcctaaatgcatttctccacaagttagcacttgattgtatactgtcttttaatccttcattgtttcatgtatgaagtttttaatcaccccctaacccccaaaaaagattcggttgtcaagggatatatttctatccctgccagcacagtgctggacatagtgagtactgaacacctaagaggcactcattcagactgacttctacaggacttctacgtgtgtgataaaagcctgtgaatcgtgagtccctgaaatatggtagcctggcccagcttctaaagaggaccttcgtagccacaaggcatgctaaacctctagggtctgatgctgtttttgttccaaatataaacgaaaggcactagtcagccgcctgcatagactttctaaacagtgagtaaataccatggaatgtcagaaatgactttatcatcgtcatcttgaagaaaaatatgaacactgatgaaggtcattttttttttttgacatctttctgtggcaaagctcttagaattctttgcagttagctgctgaacagtatgatgatttggggattttctgaatcatttgtacttagatactggagttcagaagatgtgatttttgttgcttttcagaaaaaggaacgtggtagggagtgttttttcccacgcttttccagtaactttgcaaaagcattaattgttcactggcaattactaaatgtattttgttgctctgagaaactcagcagtgtactgagatgtggctggctgtgccatcgtcatagtgcacagtgacttttctgtttcttatcactaaagactgaggtgaggttatgaaactttcattggtcccatcgttgtgcgcagggtgcaactggctacctagaagctgatggcaggagactgtttcacacacaggagattgtgagctgtgtaagtagtcatcgccactcaagtaggacaagggtcctacccaaggctaggaccgccctgcggaaacagaaacatagactgagaacaaacctcaagactatcagtgtgacctccccataacaagagaaccccatatatagtttgagactttcccttgagaaacttatactaaaactattactcatcagtcattcactgatcagcagctaaagtccatgagaccaaatggttttatatggaaccaacgaagtgggagctaaaactgcacagtggtcattctttggcctctccttggctttatgacttaaaccaactacaacttccctatagcttctaagcagtttcatcagcattacttgggaaaacgtgttgcaagtcaaccagtcactaggatatttctacccatgcaacggaagaaaaacccattactccagaagagtatatctaagtaactaaaatggaggcagaaaatgttttaaggattttcttcaaagaataagccacagcaatggttttgtagaaaactcctgtgcttttgagcaaggacttttgccctctagaaagcaactgaggccaggtgcggtggctcacgcctgtaatcccagcactttgggaggccgaggtgagcggatcacctgaggtcaggagttttgagaccagcctggccaacatggtaaaatcccgtctctactaaaattataaaaattagccgggcatgatggtgggcacctgtaatcccagctacttgggaggctgaggcaggagaatcacttgaacccaggaggcagaggttgcagtgagccaagattgcacactgcactccagcctgggtgactagcaaaactccatctcaaaaaaaaaaaaaagaaagaaagaaactgaaaagtgaggtgtggaactccaggcaacgacccaagcacttattttttaagagggaaaggactttggtcatgtttacattggcctttggtttttttttttctttcagccacaactatatgctgatataactcagccatcacttttgagttttgtttttaaatgaaggttaaatgtgacctgtgccctcacatttaattccgtttcatggagacatcttcctgactttgttggatagctgccactagggttgcttcgatcttcagccacatgctgtccttgaagcagctatttgaagatgtgttttctgaggaaaacaggctacaactgtttattaaaaccacttgcagtgcattcgtttatcagatgctcagtgcaaagtgtaattgggtcatggtcaaaaacgcttgcaacatctaattggcgttcaagatagtcattcaaaagttcttggcccgctgaagtctgttaacagttgaaacattctacagttaaccattagcatgctagttgtcctaatggaaatttttgaagagtttttcaatatataccctacccttgccaggaagagaagtaaaatcctcaggttgtggggtatttgtttctactccagcctggcaggcaaggctaaaacctgagattatcgatctatgagacatcttgatatgtaaagcacttaatattaaaggcataaaagtgaaactgctaaatatgtatagagaggttgacgtgtgatacgtgggacagttcacatagacatcagagaatttattccagaaaggagcctcctgaatgtgatgaatacggcaaagcctttaatcacatctcagcccttagcatcggaaagcttatactgtaaataaacttgatgaatattatatgtgaggaaaactttcatgtatagcactcattgcttcagacagaaaatgaattccgtcggtatgttccaatcgtgatgaatttgagaaacattgcaagagggagctcaatcttggccgggcgcagtggctcacgcctgtaatcgcagcactttgggaggccgaggcaggcggatcacgaggtcagtagttcgagaccagcctggccaacatggtgaaaccttgtctctactaaaaatacaaaaaaaaattagctgggcacagtggcgcacgcctgtagtcccagctactcgggaggctgaggcaggagaatggcttgaacctgcgaggcggaggttgcagtgagctaagatcatgccactggcactccagccttgagtgacagagcgaggctctgtatcaaaaaaaaaagttgcgggggggtgctcaatcttaactgcagaggatctacagatgaaaaaaaatgtggggaaatgctttaaaaaaatagcaaaatgtgcaacttcttacaaaaattgttaacgttaggtacttctatatattttatatgaccataatgtccgtgtgtgttttgtaccttcagtcccttgttattgttccgtatattacctgtaagcagatactgtattttattttagcctatttgacagaacacatcactcagaaaaagtgaagtttcagagcaaacagtgaagaaatcagtgtgattgtagacaaaaagtcggttcacagaacggagcagcggggagaggaagggaaaagcttcatagtttggtgcttatcacatcaagagattggtaaatttctgaggaaagacaggctaatggggcactgaaatggaacaactcctttaaacgtgcagccttttgaatttttcctcaaaaccaagaagttgacctctgagctgtcaggtgaccactgtgtgcaaaggggatggattctcttgtcagtagacggtcttctccatgaagcgagagtaggaagtgtactggaatggccaagtgggactgcttcagctgaccaggttcttttaaaccgtagtcatgctttcccactaactcttaaatccttatgcttagaaaattgaggataaggctgggcacagtggctcaggcctgtaatcccagcactttgggagaccaaggcgggtggatcacaaggtcaggagatcgagaccatcctggctaacatggcgaaaccccgtctctactaaaaatacaaaaaaatagctgggcgtggtggcgggcgcctgtagtcccagctactcaggaggctgaggcaggaggatcacttgaacatgggaggcggaggttgcagtgagccaagatggcgccactgcactccagcctgggtgatggcgtgagactccatgtcaaaaaaaaaaacaaaggttggggggaggataggactggccaggcacggtggctcactcctgtaatctcagcactttgggaggcagaggtgggcggatcacttgaggtcaggagtttgagaccagcctggccaacgtggtgaaagcctgtctctactaaaaatacaaaaattagccgggcgtggtggtgggcgcctgtagtcccagctactcaggaggctgaggcaggagaatcacctaaatctgggaggcagaggttgcagtgagccgagattgcaccactgcactccagcctgggtaacagagactctgtctcaaaaaaagaaaaaaagaaagaaagaaagaaagaaaattggggataggagaacagcaaggtgggcatttcccggaattgtgtgcagatgcatccagtcgtggcattgcaagaagtctgtctgatgaagctcgggaagcattttgcaatattccctttggctgtgttcctgtgttccctgctcccacttttcttcccctggtttgtgattattaggagagaggttttgcaaagactcgttgctgtgaaagaatctttttttaatttttatcctagagtcagtcacttttattccaggtagtcatgctgatctgcttatccaaagccagctaaccaggttcatcctaccatcctcatggaagactgtgtgtatgaattggagtaacagaactgaaatacacttaaacagtgacagcagtacttcccagggtgggggccatatttctctgtgtcctactctgagcaacttctcagagatacgagggggctagggttttcccatctgggaaatggggtgaaagtctgcagattgttaaatgaaatatagaatcagagaaaaagaaaagtcagtgatataaatagatcatttcatagaaattagggtagatttttatttcaactactactggagaatttaataaaaggcattatttgaaaagtttttctaacatagatttagggtttttttttttagagtggacacactacatttaaaagcaattattttgctattcagattttttattatctgaaaatgaaattatctgttttacttttcaaagctttgtgaaacaaacttgaagttatagggaggtaagccatctccaactctgcaggtcaaacgaaagtttgggaaatacttttgacatcccacaatacagaatgtcttaacatgagaattgaatttcatgatgtgtggttccatttaatagcggacaccaccccaatctcatgttttcctgttaccctaaaacagtggaaggaaactgggtgtttggtagacttctaaatcatggtctctgacaatttgaatctgagattctcacctccatttactaaagaatcgtgacttaattcaaattgcacagtaatcagtaaagtgaatacgtttttaaaatggaattttctcccttcagcaagcactcattaaggagtgaggctgagtattttaagatagagtgagatctgtgagtgattgaaaggtgatatttaaaaacttggatttcattccagtgtcaggtttgggttttaagttcctttggtccagggaagggtccaagcagccacagttgccctaaatctccatcattaagtcttccagcaaggttaagtgcagtatggaaggagaagggggaagaggacggtaacggccccacactccaggctgagaaagagtaattaggaggcctgaggaggggccgaggaaaggctgttggggtgtgctggggttggtacccgagcgccttcccctcacctcaaccagagaagagcatccggttgctttttaaagcttttagcctgccctagcaaggacaaagcatgttagattagagatgcttctgctgatcgcaggggttcttatttgaaaacatctatgatgggggtggggtgggaggagacaggttgtggttatgcaggaaaatcttgtcctaaaaatatatgagtttgggggtaaggggtgggatagccaagcaaaatcagtaattattttaaaatgaacatatgtatttttattaacttttagttaaatacagattttacaacgaggtcagcataagcctaaatctatatagagggctaactcaggcattgtcttgtttatttgtagactggattaaaaacaacctgtcctgttttgtcagttcccagcttcttcgtttagaataaattagaccaaaagaagaaacgtgcttgtctctgtatacccgcagaatgaagttactgttgttaaaactggattttttcattttactaggttccgaagagtccagatgcttggtagatgttcaatacgtgattttttttttaattgaatgtgttcatttaaaatcctccttaacatttctagaaagacttctttcaataaataatggaatcttagaggaaaagtggttttttaaaagctagggaactcctccactaaaagtaaccattggaaacctcgaatgagggctaaagttttaatcataagagaaaaggcagcataatgaaatgtgtacacatacatagtcagtggtccattttaggaagccagtggcgtctgataaagaaatgttaagagtagtgaggttgaggaaggaaattgtggggatttgaaatattctctttatgttgtttctcttctgagtcatggtaaaacaataaattatcatctcta

SEQ ID NO: 71957 - DNA, 8665 bp, Homo sapiens
  misc_feature (2)..(2): n is a, c, g, or t
  misc_feature (8)..(8): n is a, c, g, or t
antctggntcggaggaatctcagtagggacaacaggcaggagaatatgggagcgcatttccccaggtggtgaaaacaggaatgagaacgaggagtcaacctcaaaggctgaaacctcggaagattcagcatcacgcggggagacaacaggaagatcccagaaagagtttggagagaaacgtgaccaggagggcaaaacaggagaaagacagcagaaaaaccctgaggagaaaaccaggaaagagaaaagagattcagggccagctataggaaaggacaaaaaaaccatcacaggagagagaggtccaagggagaaggggaaaggattgggaagaagcttcagtctgagctccaacttcaccacccctgaagaagttcccacgggaacaaagtctcacagatgtgatgaatgtggtaaatgcttcacgagaagttcaagccttatccgccataaaataatccacactggagaaaagccctatgaatgtagtgagtgtgggaaagccttcagtcttaactccaaccttgtcctgcatcagaggatccacacaggagagaaacctcatgaatgtaacgagtgtggcaaggccttcagccacagttccaatctcatcctccatcagcgcatccactctggagagaaaccttatgaatgtaatgagtgcgggaaggccttcagccagagctcggacctcaccaagcatcagagaattcacacgggggagaaaccctatgaatgtagtgaatgtggaaaagctttcaaccgaaactcatacctgattttgcatcggagaattcacactcgagaaaagccctacaagtgcactaagtgtggcaaggccttcacccgcagctccaccctcactctgcatcacagaatccatgccagagagagagcctctgagtacagcccagcctcccttgatgcatttggcgcgttcctgaaaagttgtgtgtaaaggaagaatttgccatcaagccatttcccccttttgtttctaaaattatttcagagatgtgtgctcctggagggaaaaagaaatacagcctcaacagattaaaaaacaaaagtcacacttaaggatccttctagtcacatcagcagtgttctgcctttatgtagtagttgggcatataatccttccacacagcccctgcagggaaaggctaatcttacggataatccacgtgagatttccacacaagagaaaagcacacgcatagtgaaatgtcagtcttttcagtaatgaggatacctttaaggcactcttggactctcggcaaccacaacataatagttgaaagatcaagattggctccacgaaagtgatacggaggttaggatgctacttgctgcaaacaagccctactttggccaacatcctgcttatttctcaaaaaagagggacagtgaaaacaaaaacgacattgggacatgctgctcaaggtagttatatatacgataagttgtatatatgatcactggtagcctaccaaagctgtagaaatctaggactgtgctaatcagtatcaaaccaaagatttctatctcttcccgaaagagagggtatgtgcaccagtctacagttccaaaggactgcaacaaatgtagatggttctgtcctcatccctgagatcagttctactgaaatggcaacaacaactccaaatacatctctcccttcttgaaatccctaaagcactatcgcactcctaaatgcatttctccacaagttagcacttgattgtatactgtcttttaatccttcattgtttcatgtatgaagtttttaatcaccccctaacccccaaaaaagattcggttgtcaagggatatatttctatccctgccagcacagtgctggacatagtgagtactgaacacctaagaggcactcattcagactgacttctacaggacttctacgtgtgtgataaaagcctgtgaatcgtgagtccctgaaatatggtagcctggcccagcttctaaagaggaccttcgtagccacaaggcatgctaaacctctagggtctgatgctgtttttgttccaaatataaacgaaaggcactagtcagccgcctgcatagactttctaaacagtgagtaaataccatggaatgtcagaaatgactttatcatcgtcatcttgaagaaaaatatgaacactgatgaaggtcattttttttttttgacatctttctgtggcaaagctcttagaattctttgcagttagctgctgaacagtatgatgatttggggattttctgaatcatttgtacttagatactggagttcagaagatgtgatttttgttgcttttcagaaaaaggaacgtggtagggagtgttttttcccacgcttttccagtaactttgcaaaagcattaattgttcactggcaattactaaatgtattttgttgctctgagaaactcagcagtgtactgagatgtggctggctgtgccatcgtcatagtgcacagtgacttttctgtttcttatcactaaagactgaggtgaggttatgaaactttcattggtcccatcgttgtgcgcagggtgcaactggctacctagaagctgatggcaggagactgtttcacacacaggagattgtgagctgtgtaagtagtcatcgccactcaagtaggacaagggtcctacccaaggctaggaccgccctgcggaaacagaaacatagactgagaacaaacctcaagactatcagtgtgacctccccataacaagagaaccccatatatagtttgagactttcccttgagaaacttatactaaaactattactcatcagtcattcactgatcagcagctaaagtccatgagaccaaatggttttatatggaaccaacgaagtgggagctaaaactgcacagtggtcattctttggcctctccttggctttatgacttaaaccaactacaacttccctatagcttctaagcagtttcatcagcattacttgggaaaacgtgttgcaagtcaaccagtcactaggatatttctacccatgcaacggaagaaaaacccattactccagaagagtatatctaagtaactaaaatggaggcagaaaatgttttaaggattttcttcaaagaataagccacagcaatggttttgtagaaaactcctgtgcttttgagcaaggacttttgccctctagaaagcaactgaggccaggtgcggtggctcacgcctgtaatcccagcactttgggaggccgaggtgagcggatcacctgaggtcaggagttttgagaccagcctggccaacatggtaaaatcccgtctctactaaaattataaaaattagccgggcatgatggtgggcacctgtaatcccagctacttgggaggctgaggcaggagaatcacttgaacccaggaggcagaggttgcagtgagccaagattgcacactgcactccagcctgggtgactagcaaaactccatctcaaaaaaaaaaaaaagaaagaaagaaactgaaaagtgaggtgtggaactccaggcaacgacccaagcacttattttttaagagggaaaggactttggtcatgtttacattggcctttggtttttttttttctttcagccacaactatatgctgatataactcagccatcacttttgagttttgtttttaaatgaaggttaaatgtgacctgtgccctcacatttaattccgtttcatggagacatcttcctgactttgttggatagctgccactagggttgcttcgatcttcagccacatgctgtccttgaagcagctatttgaagatgtgttttctgaggaaaacaggctacaactgtttattaaaaccacttgcagtgcattcgtttatcagatgctcagtgcaaagtgtaattgggtcatggtcaaaaacgcttgcaacatctaattggcgttcaagatagtcattcaaaagttcttggcccgctgaagtctgttaacagttgaaacattctacagttaaccattagcatgctagttgtcctaatggaaatttttgaagagtttttcaatatataccctacccttgccaggaagagaagtaaaatcctcaggttgtggggtatttgtttctactccagcctggcaggcaaggctaaaacctgagattatcgatctatgagacatcttgatatgtaaagcacttaatattaaaggcataaaagtgaaactgctaaatatgtatagagaggttgacgtgtgatacgtgggacagttcacatagacatcagagaatttattccagaaaggagcctcctgaatgtgatgaatacggcaaagcctttaatcacatctcagcccttagcatcggaaagcttatactgtaaataaacttgatgaatattatatgtgaggaaaactttcatgtatagcactcattgcttcagacagaaaatgaattccgtcggtatgttccaatcgtgatgaatttgagaaacattgcaagagggagctcaatcttggccgggcgcagtggctcacgcctgtaatcgcagcactttgggaggccgaggcaggcggatcacgaggtcagtagttcgagaccagcctggccaacatggtgaaaccttgtctctactaaaaatacaaaaaaaaattagctgggcacagtggcgcacgcctgtagtcccagctactcgggaggctgaggcaggagaatggcttgaacctgcgaggcggaggttgcagtgagctaagatcatgccactggcactccagccttgagtgacagagcgaggctctgtatcaaaaaaaaaagttgcgggggggtgctcaatcttaactgcagaggatctacagatgaaaaaaaatgtggggaaatgctttaaaaaaatagcaaaatgtgcaacttcttacaaaaattgttaacgttaggtacttctatatattttatatgaccataatgtccgtgtgtgttttgtaccttcagtcccttgttattgttccgtatattacctgtaagcagatactgtattttattttagcctatttgacagaacacatcactcagaaaaagtgaagtttcagagcaaacagtgaagaaatcagtgtgattgtagacaaaaagtcggttcacagaacggagcagcggggagaggaagggaaaagcttcatagtttggtgcttatcacatcaagagattggtaaatttctgaggaaagacaggctaatggggcactgaaatggaacaactcctttaaacgtgcagccttttgaatttttcctcaaaaccaagaagttgacctctgagctgtcaggtgaccactgtgtgcaaaggggatggattctcttgtcagtagacggtcttctccatgaagcgagagtaggaagtgtactggaatggccaagtgggactgcttcagctgaccaggttcttttaaaccgtagtcatgctttcccactaactcttaaatccttatgcttagaaaattgaggataaggctgggcacagtggctcaggcctgtaatcccagcactttgggagaccaaggcgggtggatcacaaggtcaggagatcgagaccatcctggctaacatggcgaaaccccgtctctactaaaaatacaaaaaaatagctgggcgtggtggcgggcgcctgtagtcccagctactcaggaggctgaggcaggaggatcacttgaacatgggaggcggaggttgcagtgagccaagatggcgccactgcactccagcctgggtgatggcgtgagactccatgtcaaaaaaaaaaacaaaggttggggggaggataggactggccaggcacggtggctcactcctgtaatctcagcactttgggaggcagaggtgggcggatcacttgaggtcaggagtttgagaccagcctggccaacgtggtgaaagcctgtctctactaaaaatacaaaaattagccgggcgtggtggtgggcgcctgtagtcccagctactcaggaggctgaggcaggagaatcacctaaatctgggaggcagaggttgcagtgagccgagattgcaccactgcactccagcctgggtaacagagactctgtctcaaaaaaagaaaaaaagaaagaaagaaagaaagaaaattggggataggagaacagcaaggtgggcatttcccggaattgtgtgcagatgcatccagtcgtggcattgcaagaagtctgtctgatgaagctcgggaagcattttgcaatattccctttggctgtgttcctgtgttccctgctcccacttttcttcccctggtttgtgattattaggagagaggttttgcaaagactcgttgctgtgaaagaatctttttttaatttttatcctagagtcagtcacttttattccaggtagtcatgctgatctgcttatccaaagccagctaaccaggttcatcctaccatcctcatggaagactgtgtgtatgaattggagtaacagaactgaaatacacttaaacagtgacagcagtacttcccagggtgggggccatatttctctgtgtcctactctgagcaacttctcagagatacgagggggctagggttttcccatctgggaaatggggtgaaagtctgcagattgttaaatgaaatatagaatcagagaaaaagaaaagtcagtgatataaatagatcatttcatagaaattagggtagatttttatttcaactactactggagaatttaataaaaggcattatttgaaaagtttttctaacatagatttagggtttttttttttagagtggacacactacatttaaaagcaattattttgctattcagattttttattatctgaaaatgaaattatctgttttacttttcaaagctttgtgaaacaaacttgaagttatagggaggtaagccatctccaactctgcaggtcaaacgaaagtttgggaaatacttttgacatcccacaatacagaatgtcttaacatgagaattgaatttcatgatgtgtggttccatttaatagcggacaccaccccaatctcatgttttcctgttaccctaaaacagtggaaggaaactgggtgtttggtagacttctaaatcatggtctctgacaatttgaatctgagattctcacctccatttactaaagaatcgtgacttaattcaaattgcacagtaatcagtaaagtgaatacgtttttaaaatggaattttctcccttcagcaagcactcattaaggagtgaggctgagtattttaagatagagtgagatctgtgagtgattgaaaggtgatatttaaaaacttggatttcattccagtgtcaggtttgggttttaagttcctttggtccagggaagggtccaagcagccacagttgccctaaatctccatcattaagtcttccagcaaggttaagtgcagtatggaaggagaagggggaagaggacggtaacggccccacactccaggctgagaaagagtaattaggaggcctgaggaggggccgaggaaaggctgttggggtgtgctggggttggtacccgagcgccttcccctcacctcaaccagagaagagcatccggttgctttttaaagcttttagcctgccctagcaaggacaaagcatgttagattagagatgcttctgctgatcgcaggggttcttatttgaaaacatctatgatgggggtggggtgggaggagacaggttgtggttatgcaggaaaatcttgtcctaaaaatatatgagtttgggggtaaggggtgggatagccaagcaaaatcagtaattattttaaaatgaacatatgtatttttattaacttttagttaaatacagattttacaacgaggtcagcataagcctaaatctatatagagggctaactcaggcattgtcttgtttatttgtagactggattaaaaacaacctgtcctgttttgtcagttcccagcttcttcgtttagaataaattagaccaaaagaagaaacgtgcttgtctctgtatacccgcagaatgaagttactgttgttaaaactggattttttcattttactaggttccgaagagtccagatgcttggtagatgttcaatacgtgattttttttttaattgaatgtgttcatttaaaatcctccttaacatttctagaaagacttctttcaataaataatggaatcttagaggaaaagtggttttttaaaagctagggaactcctccactaaaagtaaccattggaaacctcgaatgagggctaaagttttaatcataagagaaaaggcagcataatgaaatgtgtacacatacatagtcagtggtccattttaggaagccagtggcgtctgataaagaaatgttaagagtagtgaggttgaggaaggaaattgtggggatttgaaatattctctttatgttgtttctcttctgagtcatggtaaaacaataaattatcatctctaaaaaaagaaacaatatagaagaaactttttgcagataaaacaatatactaagtaatagcaattaacaaacgacaaaaagagaaaagaataaataacaaacaaaaaaggggggggatatatatacggggggaaattccaccctttagaaaaggccagtgtttaataaagggcggggagggaagaagttgtgttgaagcactctgtggtagacccaaagggatt

SEQ ID NO: 71958 - DNA, 8459 bp, Homo sapiens
  misc_feature (2)..(2): n is a, c, g, or t
  misc_feature (8)..(8): n is a, c, g, or t
antctggntcggaggaatctcagtagggacaacaggcaggagaatatgggagcgcatttccccaggtggtgaaaacaggaatgagaacgaggagtcaacctcaaaggctgaaacctcggaagattcagcatcacgcggggagacaacaggaagatcccagaaagagtttggagagaaacgtgaccaggagggcaaaacaggagaaagacagcagaaaaaccctgaggagaaaaccaggaaagagaaaagagattcagggccagctataggaaaggacaaaaaaaccatcacaggagagagaggtccaagggagaaggggaaaggattgggaagaagcttcagtctgagctccaacttcaccacccctgaagaagttcccacgggaacaaagtctcacagatgtgatgaatgtggtaaatgcttcacgagaagttcaagccttatccgccataaaataatccacactggagaaaagccctatgaatgtagtgagtgtgggaaagccttcagtcttaactccaaccttgtcctgcatcagaggatccacacaggagagaaacctcatgaatgtaacgagtgtggcaaggccttcagccacagttccaatctcatcctccatcagcgcatccactctggagagaaaccttatgaatgtaatgagtgcgggaaggccttcagccagagctcggacctcaccaagcatcagagaattcacacgggggagaaaccctatgaatgtagtgaatgtggaaaagctttcaaccgaaactcatacctgattttgcatcggagaattcacactcgagaaaagccctacaagtgcactaagtgtggcaaggccttcacccgcagctccaccctcactctgcatcacagaatccatgccagagagagagcctctgagtacagcccagcctcccttgatgcatttggcgcgttcctgaaaagttgtgtgtaaaggaagaatttgccatcaagccatttcccccttttgtttctaaaattatttcagagatgtgtgctcctggagggaaaaagaaatacagcctcaacagattaaaaaacaaaagtcacacttaaggatccttctagtcacatcagcagtgttctgcctttatgtagtagttgggcatataatccttccacacagcccctgcagggaaaggctaatcttacggataatccacgtgagatttccacacaagagaaaagcacacgcatagtgaaatgtcagtcttttcagtaatgaggatacctttaaggcactcttggactctcggcaaccacaacataatagttgaaagatcaagattggctccacgaaagtgatacggaggttaggatgctacttgctgcaaacaagccctactttggccaacatcctgcttatttctcaaaaaagagggacagtgaaaacaaaaacgacattgggacatgctgctcaaggtagttatatatacgataagttgtatatatgatcactggtagcctaccaaagctgtagaaatctaggactgtgctaatcagtatcaaaccaaagatttctatctcttcccgaaagagagggtatgtgcaccagtctacagttccaaaggactgcaacaaatgtagatggttctgtcctcatccctgagatcagttctactgaaatggcaacaacaactccaaatacatctctcccttcttgaaatccctaaagcactatcgcactcctaaatgcatttctccacaagttagcacttgattgtatactgtcttttaatccttcattgtttcatgtatgaagtttttaatcaccccctaacccccaaaaaagattcggttgtcaagggatatatttctatccctgccagcacagtgctggacatagtgagtactgaacacctaagaggcactcattcagactgacttctacaggacttctacgtgtgtgataaaagcctgtgaatcgtgagtccctgaaatatggtagcctggcccagcttctaaagaggaccttcgtagccacaaggcatgctaaacctctagggtctgatgctgtttttgttccaaatataaacgaaaggcactagtcagccgcctgcatagactttctaaacagtgagtaaataccatggaatgtcagaaatgactttatcatcgtcatcttgaagaaaaatatgaacactgatgaaggtcattttttttttttgacatctttctgtggcaaagctcttagaattctttgcagttagctgctgaacagtatgatgatttggggattttctgaatcatttgtacttagatactggagttcagaagatgtgatttttgttgcttttcagaaaaaggaacgtggtagggagtgttttttcccacgcttttccagtaactttgcaaaagcattaattgttcactggcaattactaaatgtattttgttgctctgagaaactcagcagtgtactgagatgtggctggctgtgccatcgtcatagtgcacagtgacttttctgtttcttatcactaaagactgaggtgaggttatgaaactttcattggtcccatcgttgtgcgcagggtgcaactggctacctagaagctgatggcaggagactgtttcacacacaggagattgtgagctgtgtaagtagtcatcgccactcaagtaggacaagggtcctacccaaggctaggaccgccctgcggaaacagaaacatagactgagaacaaacctcaagactatcagtgtgacctccccataacaagagaaccccatatatagtttgagactttcccttgagaaacttatactaaaactattactcatcagtcattcactgatcagcagctaaagtccatgagaccaaatggttttatatggaaccaacgaagtgggagctaaaactgcacagtggtcattctttggcctctccttggctttatgacttaaaccaactacaacttccctatagcttctaagcagtttcatcagcattacttgggaaaacgtgttgcaagtcaaccagtcactaggatatttctacccatgcaacggaagaaaaacccattactccagaagagtatatctaagtaactaaaatggaggcagaaaatgttttaaggattttcttcaaagaataagccacagcaatggttttgtagaaaactcctgtgcttttgagcaaggacttttgccctctagaaagcaactgaggccaggtgcggtggctcacgcctgtaatcccagcactttgggaggccgaggtgagcggatcacctgaggtcaggagttttgagaccagcctggccaacatggtaaaatcccgtctctactaaaattataaaaattagccgggcatgatggtgggcacctgtaatcccagctacttgggaggctgaggcaggagaatcacttgaacccaggaggcagaggttgcagtgagccaagattgcacactgcactccagcctgggtgactagcaaaactccatctcaaaaaaaaaaaaaagaaagaaagaaactgaaaagtgaggtgtggaactccaggcaacgacccaagcacttattttttaagagggaaaggactttggtcatgtttacattggcctttggtttttttttttctttcagccacaactatatgctgatataactcagccatcacttttgagttttgtttttaaatgaaggttaaatgtgacctgtgccctcacatttaattccgtttcatggagacatcttcctgactttgttggatagctgccactagggttgcttcgatcttcagccacatgctgtccttgaagcagctatttgaagatgtgttttctgaggaaaacaggctacaactgtttattaaaaccacttgcagtgcattcgtttatcagatgctcagtgcaaagtgtaattgggtcatggtcaaaaacgcttgcaacatctaattggcgttcaagatagtcattcaaaagttcttggcccgctgaagtctgttaacagttgaaacattctacagttaaccattagcatgctagttgtcctaatggaaatttttgaagagtttttcaatatataccctacccttgccaggaagagaagtaaaatcctcaggttgtggggtatttgtttctactccagcctggcaggcaaggctaaaacctgagattatcgatctatgagacatcttgatatgtaaagcacttaatattaaaggcataaaagtgaaactgctaaatatgtatagagaggttgacgtgtgatacgtgggacagttcacatagacatcagagaatttattccagaaaggagcctcctgaatgtgatgaatacggcaaagcctttaatcacatctcagcccttagcatcggaaagcttatactgtaaataaacttgatgaatattatatgtgaggaaaactttcatgtatagcactcattgcttcagacagaaaatgaattccgtcggtatgttccaatcgtgatgaatttgagaaacattgcaagagggagctcaatcttggccgggcgcagtggctcacgcctgtaatcgcagcactttgggaggccgaggcaggcggatcacgaggtcagtagttcgagaccagcctggccaacatggtgaaaccttgtctctactaaaaatacaaaaaaaaattagctgggcacagtggcgcacgcctgtagtcccagctactcgggaggctgaggcaggagaatggcttgaacctgcgaggcggaggttgcagtgagctaagatcatgccactggcactccagccttgagtgacagagcgaggctctgtatcaaaaaaaaaagttgcgggggggtgctcaatcttaactgcagaggatctacagatgaaaaaaaatgtggggaaatgctttaaaaaaatagcaaaatgtgcaacttcttacaaaaattgttaacgttaggtacttctatatattttatatgaccataatgtccgtgtgtgttttgtaccttcagtcccttgttattgttccgtatattacctgtaagcagatactgtattttattttagcctatttgacagaacacatcactcagaaaaagtgaagtttcagagcaaacagtgaagaaatcagtgtgattgtagacaaaaagtcggttcacagaacggagcagcggggagaggaagggaaaagcttcatagtttggtgcttatcacatcaagagattggtaaatttctgaggaaagacaggctaatggggcactgaaatggaacaactcctttaaacgtgcagccttttgaatttttcctcaaaaccaagaagttgacctctgagctgtcaggtgaccactgtgtgcaaaggggatggattctcttgtcagtagacggtcttctccatgaagcgagagtaggaagtgtactggaatggccaagtgggactgcttcagctgaccaggttcttttaaaccgtagtcatgctttcccactaactcttaaatccttatgcttagaaaattgaggataaggctgggcacagtggctcaggcctgtaatcccagcactttgggagaccaaggcgggtggatcacaaggtcaggagatcgagaccatcctggctaacatggcgaaaccccgtctctactaaaaatacaaaaaaatagctgggcgtggtggcgggcgcctgtagtcccagctactcaggaggctgaggcaggaggatcacttgaacatgggaggcggaggttgcagtgagccaagatggcgccactgcactccagcctgggtgatggcgtgagactccatgtcaaaaaaaaaaacaaaggttggggggaggataggactggccaggcacggtggctcactcctgtaatctcagcactttgggaggcagaggtgggcggatcacttgaggtcaggagtttgagaccagcctggccaacgtggtgaaagcctgtctctactaaaaatacaaaaattagccgggcgtggtggtgggcgcctgtagtcccagctactcaggaggctgaggcaggagaatcacctaaatctgggaggcagaggttgcagtgagccgagattgcaccactgcactccagcctgggtaacagagactctgtctcaaaaaaagaaaaaaagaaagaaagaaagaaagaaaattggggataggagaacagcaaggtgggcatttcccggaattgtgtgcagatgcatccagtcgtggcattgcaagaagtctgtctgatgaagctcgggaagcattttgcaatattccctttggctgtgttcctgtgttccctgctcccacttttcttcccctggtttgtgattattaggagagaggttttgcaaagactcgttgctgtgaaagaatctttttttaatttttatcctagagtcagtcacttttattccaggtagtcatgctgatctgcttatccaaagccagctaaccaggttcatcctaccatcctcatggaagactgtgtgtatgaattggagtaacagaactgaaatacacttaaacagtgacagcagtacttcccagggtgggggccatatttctctgtgtcctactctgagcaacttctcagagatacgagggggctagggttttcccatctgggaaatggggtgaaagtctgcagattgttaaatgaaatatagaatcagagaaaaagaaaagtcagtgatataaatagatcatttcatagaaattagggtagatttttatttcaactactactggagaatttaataaaaggcattatttgaaaagtttttctaacatagatttagggtttttttttttagagtggacacactacatttaaaagcaattattttgctattcagattttttattatctgaaaatgaaattatctgttttacttttcaaagctttgtgaaacaaacttgaagttatagggaggtaagccatctccaactctgcaggtcaaacgaaagtttgggaaatacttttgacatcccacaatacagaatgtcttaacatgagaattgaatttcatgatgtgtggttccatttaatagcggacaccaccccaatctcatgttttcctgttaccctaaaacagtggaaggaaactgggtgtttggtagacttctaaatcatggtctctgacaatttgaatctgagattctcacctccatttactaaagaatcgtgacttaattcaaattgcacagtaatcagtaaagtgaatacgtttttaaaatggaattttctcccttcagcaagcactcattaaggagtgaggctgagtattttaagatagagtgagatctgtgagtgattgaaaggtgatatttaaaaacttggatttcattccagtgtcaggtttgggttttaagttcctttggtccagggaagggtccaagcagccacagttgccctaaatctccatcattaagtcttccagcaaggttaagtgcagtatggaaggagaagggggaagaggacggtaacggccccacactccaggctgagaaagagtaattaggaggcctgaggaggggccgaggaaaggctgttggggtgtgctggggttggtacccgagcgccttcccctcacctcaaccagagaagagcatccggttgctttttaaagcttttagcctgccctagcaaggacaaagcatgttagattagagatgcttctgctgatcgcaggggttcttatttgaaaacatctatgatgggggtggggtgggaggagacaggttgtggttatgcaggaaaatcttgtcctaaaaatatatgagtttgggggtaaggggtgggatagccaagcaaaatcagtaattattttaaaatgaacatatgtatttttattaacttttagttaaatacagattttacaacgaggtcagcataagcctaaatctatatagagggctaactcaggcattgtcttgtttatttgtagactggattaaaaacaacctgtcctgttttgtcagttcccagcttcttcgtttagaataaattagaccaaaagaagaaacgtgcttgtctctgtatacccgcagaatgaagttactgttgttaaaactggattttttcattttactaggttccgaagagtccagatgcttggtagatgttcaatacgtgattttttttttaattgaatgtgttcatttaaaatcctccttaacatttctagaaagacttctttcaataaataatggaatcttagaggaaaagtggttttttaaaagctagggaactcctccactaaaagtaaccattggaaacctcgaatgagggctaaagttttaatcataagagaaaaggcagcataatgaaatgtgtacacatacatagtcagtggtccattttaggaagccagtggcgtctgataaagaaatgttaagagtagtgaggttgaggaaggaaattgtggggatttgaaatattctctttaaggggggtggtttttaaaactttggtaaaccattaatattcatttttaggtgaaaacaaaaggc

SEQ ID NO: 71959 - DNA, 9049 bp, Homo sapiens
tggcagtacagtgagactgtgttcaaaaaaacaaattacaagtatatcttacatagaagatgagatctacattatggatttctgccttgtgagagggcctaggaatgcacggtggttaaaaaaaacaaaaatctgctggctgggcgcggcggctcacgtctgtcatcccagcactttgggaggccgaggtcggctgatcacctgaggtcaggaattcaaaaacagccgggccaccacagcaaaaccctgtctctactacaaatacatggaggcggttgcctgggaggcagttctgctccgttcccatggattacaatttaggtgcctctgtcgggggaatatctctttcctagcagagatgaccaggcgaactgatcatccgtctaatcccaacccattgtcccggtaccacattcccgaaactaccaagcatccttctgttggctttctgtcttcttccatcctgtgtgattagtgtgattccaatacactgctttgtgtaattccacgaacttgcacctggactgtccttgtgatgaggattcccagcttccaaacttaatggtgattttctatgaagagctctgggtcctggatgtgtagtaagaacgaggaagttcaagaggcatcagccagataagacaaggtgacactgttggcagacatttccatttgtctctgctggatcttaacccctcaggacagtgctgcaaagaagccctcacgtggtgaaaacaggaatgagaacgaggagtcaacctcaaaggctgaaacctcggaagattcagcatcacgcggggagacaacaggaagatcccagaaagagtttggagagaaacgtgaccaggagggcaaaacaggagaaagacagcagaaaaaccctgaggagaaaaccaggaaagagaaaagagattcagggccagctataggaaaggacaaaaaaaccatcacaggagagagaggtccaagggagaaggggaaaggattgggaagaagcttcagtctgagctccaacttcaccacccctgaagaagttcccacgggaacaaagtctcacagatgtgatgaatgtggtaaatgcttcacgagaagttcaagccttatccgccataaaataatccacactggagaaaagccctatgaatgtagtgagtgtgggaaagccttcagtcttaactccaaccttgtcctgcatcagaggatccacacaggagagaaacctcatgaatgtaacgagtgtggcaaggccttcagccacagttccaatctcatcctccatcagcgcatccactctggagagaaaccttatgaatgtaatgagtgcgggaaggccttcagccagagctcggacctcaccaagcatcagagaattcacacgggggagaaaccctatgaatgtagtgaatgtggaaaagctttcaaccgaaactcatacctgattttgcatcggagaattcacactcgagaaaagccctacaagtgcactaagtgtggcaaggccttcacccgcagctccaccctcactctgcatcacagaatccatgccagagagagagcctctgagtacagcccagcctcccttgatgcatttggcgcgttcctgaaaagttgtgtgtaaaggaagaatttgccatcaagccatttcccccttttgtttctaaaattatttcagagatgtgtgctcctggagggaaaaagaaatacagcctcaacagattaaaaaacaaaagtcacacttaaggatccttctagtcacatcagcagtgttctgcctttatgtagtagttgggcatataatccttccacacagcccctgcagggaaaggctaatcttacggataatccacgtgagatttccacacaagagaaaagcacacgcatagtgaaatgtcagtcttttcagtaatgaggatacctttaaggcactcttggactctcggcaaccacaacataatagttgaaagatcaagattggctccacgaaagtgatacggaggttaggatgctacttgctgcaaacaagccctactttggccaacatcctgcttatttctcaaaaaagagggacagtgaaaacaaaaacgacattgggacatgctgctcaaggtagttatatatacgataagttgtatatatgatcactggtagcctaccaaagctgtagaaatctaggactgtgctaatcagtatcaaaccaaagatttctatctcttcccgaaagagagggtatgtgcaccagtctacagttccaaaggactgcaacaaatgtagatggttctgtcctcatccctgagatcagttctactgaaatggcaacaacaactccaaatacatctctcccttcttgaaatccctaaagcactatcgcactcctaaatgcatttctccacaagttagcacttgattgtatactgtcttttaatccttcattgtttcatgtatgaagtttttaatcaccccctaacccccaaaaaagattcggttgtcaagggatatatttctatccctgccagcacagtgctggacatagtgagtactgaacacctaagaggcactcattcagactgacttctacaggacttctacgtgtgtgataaaagaccttcgtagccacaaggcatgctaaacctctagggtctgatgctgtttttgttccaaatataaacgaaaggcactagtcagccgcctgcatagactttctaaacagtgagtaaataccatggaatgtcagaaatgactttatcatcgtcatcttgaagaaaaatatgaacactgatgaaggtcattttttttttttgacatctttctgtggcaaagctcttagaattctttgcagttagctgctgaacagtatgatgatttggggattttctgaatcatttgtacttagatactggagttcagaagatgtgatttttgttgcttttcagaaaaaggaacgtggtagggagtgttttttcccacgcttttccagtaactttgcaaaagcattaattgttcactggcaattactaaatgtattttgttgctctgagaaactcagcagtgtactgagatgtggctggctgtgccatcgtcatagtgcacagtgacttttctgtttcttatcactaaagactgaggtgaggttatgaaactttcattggtcccatcgttgtgcgcagggtgcaactggctacctagaagctgatggcaggagactgtttcacacacaggagattgtgagctgtgtaagtagtcatcgccactcaagtaggacaagggtcctacccaaggctaggaccgccctgcggaaacagaaacatagactgagaacaaacctcaagactatcagtgtgacctccccataacaagagaaccccatatatagtttgagactttcccttgagaaacttatactaaaactattactcatcagtcattcactgatcagcagctaaagtccatgagaccaaatggttttatatggaaccaacgaagtgggagctaaaactgcacagtggtcattctttggcctctccttggctttatgacttaaaccaactacaacttccctatagcttctaagcagtttcatcagcattacttgggaaaacgtgttgcaagtcaaccagtcactaggatatttctacccatgcaacggaagaaaaacccattactccagaagagtatatctaagtaactaaaatggaggcagaaaatgttttaaggattttcttcaaagaataagccacagcaatggttttgtagaaaactcctgtgcttttgagcaaggacttttgccctctagaaagcaactgaggccaggtgcggtggctcacgcctgtaatcccagcactttgggaggccgaggtgagcggatcacctgaggtcaggagttttgagaccagcctggccaacatggtaaaatcccgtctctactaaaattataaaaattagccgggcatgatggtgggcacctgtaatcccagctacttgggaggctgaggcaggagaatcacttgaacccaggaggcagaggttgcagtgagccaagattgcacactgcactccagcctgggtgactagcaaaactccatctcaaaaaaaaaaaaaagaaagaaagaaactgaaaagtgaggtgtggaactccaggcaacgacccaagcacttattttttaagagggaaaggactttggtcatgtttacattggcctttggtttttttttttctttcagccacaactatatgctgatataactcagccatcacttttgagttttgtttttaaatgaaggttaaatgtgacctgtgccctcacatttaattccgtttcatggagacatcttcctgactttgttggatagctgccactagggttgcttcgatcttcagccacatgctgtccttgaagcagctatttgaagatgtgttttctgaggaaaacaggctacaactgtttattaaaaccacttgcagtgcattcgtttatcagatgctcagtgcaaagtgtaattgggtcatggtcaaaaacgcttgcaacatctaattggcgttcaagatagtcattcaaaagttcttggcccgctgaagtctgttaacagttgaaacattctacagttaaccattagcatgctagttgtcctaatggaaatttttgaagagtttttcaatatataccctacccttgccaggaagagaagtaaaatcctcaggttgtggggtatttgtttctactccagcctggcaggcaaggctaaaacctgagattatcgatctatgagacatcttgatatgtaaagcacttaatattaaaggcataaaagtgaaactgctaaatatgtatagagaggttgacgtgtgatacgtgggacagttcacatagacatcagagaatttattccagaaaggagcctcctgaatgtgatgaatacggcaaagcctttaatcacatctcagcccttagcatcggaaagcttatactgtaaataaacttgatgaatattatatgtgaggaaaactttcatgtatagcactcattgcttcagacagaaaatgaattccgtcggtatgttccaatcgtgatgaatttgagaaacattgcaagagggagctcaatcttggccgggcgcagtggctcacgcctgtaatcgcagcactttgggaggccgaggcaggcggatcacgaggtcagtagttcgagaccagcctggccaacatggtgaaaccttgtctctactaaaaatacaaaaaaaaattagctgggcacagtggcgcacgcctgtagtcccagctactcgggaggctgaggcaggagaatggcttgaacctgcgaggcggaggttgcagtgagctaagatcatgccactggcactccagccttgagtgacagagcgaggctctgtatcaaaaaaaaaagttgcgggggggtgctcaatcttaactgcagaggatctacagatgaaaaaaaatgtggggaaatgctttaaaaaaatagcaaaatgtgcaacttcttacaaaaattgttaacgttaggtacttctatatattttatatgaccataatgtccgtgtgtgttttgtaccttcagtcccttgttattgttccgtatattacctgtaagcagatactgtattttattttagcctatttgacagaacacatcactcagaaaaagtgaagtttcagagcaaacagtgaagaaatcagtgtgattgtagacaaaaagtcggttcacagaacggagcagcggggagaggaagggaaaagcttcatagtttggtgcttatcacatcaagagattggtaaatttctgaggaaagacaggctaatggggcactgaaatggaacaactcctttaaacgtgcagccttttgaatttttcctcaaaaccaagaagttgacctctgagctgtcaggtgaccactgtgtgcaaaggggatggattctcttgtcagtagacggtcttctccatgaagcgagagtaggaagtgtactggaatggccaagtgggactgcttcagctgaccaggttcttttaaaccgtagtcatgctttcccactaactcttaaatccttatgcttagaaaattgaggataaggctgggcacagtggctcaggcctgtaatcccagcactttgggagaccaaggcgggtggatcacaaggtcaggagatcgagaccatcctggctaacatggcgaaaccccgtctctactaaaaatacaaaaaaatagctgggcgtggtggcgggcgcctgtagtcccagctactcaggaggctgaggcaggaggatcacttgaacatgggaggcggaggttgcagtgagccaagatggcgccactgcactccagcctgggtgatggcgtgagactccatgtcaaaaaaaaaaacaaaggttggggggaggataggactggccaggcacggtggctcactcctgtaatctcagcactttgggaggcagaggtgggcggatcacttgaggtcaggagtttgagaccagcctggccaacgtggtgaaagcctgtctctactaaaaatacaaaaattagccgggcgtggtggtgggcgcctgtagtcccagctactcaggaggctgaggcaggagaatcacctaaatctgggaggcagaggttgcagtgagccgagattgcaccactgcactccagcctgggtaacagagactctgtctcaaaaaaagaaaaaaagaaagaaagaaagaaagaaaattggggataggagaacagcaaggtgggcatttcccggaattgtgtgcagatgcatccagtcgtggcattgcaagaagtctgtctgatgaagctcgggaagcattttgcaatattccctttggctgtgttcctgtgttccctgctcccacttttcttcccctggtttgtgattattaggagagaggttttgcaaagactcgttgctgtgaaagaatctttttttaatttttatcctagagtcagtcacttttattccaggtagtcatgctgatctgcttatccaaagccagctaaccaggttcatcctaccatcctcatggaagactgtgtgtatgaattggagtaacagaactgaaatacacttaaacagtgacagcagtacttcccagggtgggggccatatttctctgtgtcctactctgagcaacttctcagagatacgagggggctagggttttcccatctgggaaatggggtgaaagtctgcagattgttaaatgaaatatagaatcagagaaaaagaaaagtcagtgatataaatagatcatttcatagaaattagggtagatttttatttcaactactactggagaatttaataaaaggcattatttgaaaagtttttctaacatagatttagggtttttttttttagagtggacacactacatttaaaagcaattattttgctattcagattttttattatctgaaaatgaaattatctgttttacttttcaaagctttgtgaaacaaacttgaagttatagggaggtaagccatctccaactctgcaggtcaaacgaaagtttgggaaatacttttgacatcccacaatacagaatgtcttaacatgagaattgaatttcatgatgtgtggttccatttaatagcggacaccaccccaatctcatgttttcctgttaccctaaaacagtggaaggaaactgggtgtttggtagacttctaaatcatggtctctgacaatttgaatctgagattctcacctccatttactaaagaatcgtgacttaattcaaattgcacagtaatcagtaaagtgaatacgtttttaaaatggaattttctcccttcagcaagcactcattaaggagtgaggctgagtattttaagatagagtgagatctgtgagtgattgaaaggtgatatttaaaaacttggatttcattccagtgtcaggtttgggttttaagttcctttggtccagggaagggtccaagcagccacagttgccctaaatctccatcattaagtcttccagcaaggttaagtgcagtatggaaggagaagggggaagaggacggtaacggccccacactccaggctgagaaagagtaattaggaggcctgaggaggggccgaggaaaggctgttggggtgtgctggggttggtacccgagcgccttcccctcacctcaaccagagaagagcatccggttgctttttaaagcttttagcctgccctagcaaggacaaagcatgttagattagagatgcttctgctgatcgcaggggttcttatttgaaaacatctatgatgggggtggggtgggaggagacaggttgtggttatgcaggaaaatcttgtcctaaaaatatatgagtttgggggtaaggggtgggatagccaagcaaaatcagtaattattttaaaatgaacatatgtatttttattaacttttagttaaatacagattttacaacgaggtcagcataagcctaaatctatatagagggctaactcaggcattgtcttgtttatttgtagactggattaaaaacaacctgtcctgttttgtcagttcccagcttcttcgtttagaataaattagaccaaaagaagaaacgtgcttgtctctgtatacccgcagaatgaagttactgttgttaaaactggattttttcattttactaggttccgaagagtccagatgcttggtagatgttcaatacgtgattttttttttaattgaatgtgttcatttaaaatcctccttaacatttctagaaagacttctttcaataaataatggaatcttagaggaaaagtggttttttaaaagctagggaactcctccactaaaagtaaccattggaaacctcgaatgagggctaaagttttaatcataagagaaaaggcagcataatgaaatgtgtacacatacatagtcagtggtccattttaggaagccagtggcgtctgataaagaaatgttaagagtagtgaggttgaggaaggaaattgtggggatttgaaatattctctttatgttgtttctcttctgagtcatggtaaaacaataaattatcatctcta

SEQ ID NO: 71960 - DNA, 7260 bp, Homo sapiens
  misc_feature (2)..(2): n is a, c, g, or t
  misc_feature (8)..(8): n is a, c, g, or t
antctggntcggaggaatctcagtagggacaacaggcaggagaatatgggagcgcatttccccaggtggtgaaaacaggaatgagaacgaggagtcaacctcaaaggctgaaacctcggaagattcagcatcacgcggggagacaacaggaagatcccagaaagagtttggagagaaacgtgaccaggagggcaaaacaggagaaagacagcagaaaaaccctgaggagaaaaccaggaaagagaaaagagattcagggccagctataggaaaggacaaaaaaaccatcacaggagagagaggtccaagggagaaggggaaaggattgggaagaagcttcagtctgagctccaacttcaccacccctgaagaagttcccacgggaacaaagtctcacagatgtgatgaatgtggtaaatgcttcacgagaagttcaagccttatccgccataaaataatccacactggagaaaagccctatgaatgtagtgagtgtgggaaagccttcagtcttaactccaaccttgtcctgcatcagaggatccacacaggagagaaacctcatgaatgtaacgagtgtggcaaggccttcagccacagttccaatctcatcctccatcagcgcatccactctggagagaaaccttatgaatgtaatgagtgcgggaaggccttcagccagagctcggacctcaccaagcatcagagaattcacacgggggagaaaccctatgaatgtagtgaatgtggaaaagctttcaaccgaaactcatacctgattttgcatcggagaattcacactcgagaaaagccctacaagtgcactaagtgtggcaaggccttcacccgcagctccaccctcactctgcatcacagaatccatgccagagagagagcctctgagtacagcccagcctcccttgatgcatttggcgcgttcctgaaaagttgtgtgtaaaggaagaatttgccatcaagccatttcccccttttgtttctaaaattatttcagagatgtgtgctcctggagggaaaaagaaatacagcctcaacagattaaaaaacaaaagtcacacttaaggatccttctagtcacatcagcagtgttctgcctttatgtagtagttgggcatataatccttccacacagcccctgcagggaaaggctaatcttacggataatccacgtgagatttccacacaagagaaaagcacacgcatagtgaaatgtcagtcttttcagtaatgaggatacctttaaggcactcttggactctcggcaaccacaacataatagttgaaagatcaagattggctccacgaaagtgatacggaggttaggatgctacttgctgcaaacaagccctactttggccaacatcctgcttatttctcaaaaaagagggacagtgaaaacaaaaacgacattgggacatgctgctcaaggtagttatatatacgataagttgtatatatgatcactggtagcctaccaaagctgtagaaatctaggactgtgctaatcagtatcaaaccaaagatttctatctcttcccgaaagagagggtatgtgcaccagtctacagttccaaaggactgcaacaaatgtagatggttctgtcctcatccctgagatcagttctactgaaatggcaacaacaactccaaatacatctctcccttcttgaaatccctaaagcactatcgcactcctaaatgcatttctccacaagttagcacttgattgtatactgtcttttaatccttcattgtttcatgtatgaagtttttaatcaccccctaacccccaaaaaagattcggttgtcaagggatatatttctatccctgccagcacagtgctggacatagtgagtactgaacacctaagaggcactcattcagactgacttctacaggacttctacgtgtgtgataaaagcctgtgaatcgtgagtccctgaaatatggtagcctggcccagcttctaaagaggaccttcgtagccacaaggcatgctaaacctctagggtctgatgctgtttttgttccaaatataaacgaaaggcactagtcagccgcctgcatagactttctaaacagtgagtaaataccatggaatgtcagaaatgactttatcatcgtcatcttgaagaaaaatatgaacactgatgaaggtcattttttttttttgacatctttctgtggcaaagctcttagaattctttgcagttagctgctgaacagtatgatgatttggggattttctgaatcatttgtacttagatactggagttcagaagatgtgatttttgttgcttttcagaaaaaggaacgtggtagggagtgttttttcccacgcttttccagtaactttgcaaaagcattaattgttcactggcaattactaaatgtattttgttgctctgagaaactcagcagtgtactgagatgtggctggctgtgccatcgtcatagtgcacagtgacttttctgtttcttatcactaaagactgaggtgaggttatgaaactttcattggtcccatcgttgtgcgcagggtgcaactggctacctagaagctgatggcaggagactgtttcacacacaggagattgtgagctgtgtaagtagtcatcgccactcaagtaggacaagggtcctacccaaggctaggaccgccctgcggaaacagaaacatagactgagaacaaacctcaagactatcagtgtgacctccccataacaagagaaccccatatatagtttgagactttcccttgagaaacttatactaaaactattactcatcagtcattcactgatcagcagctaaagtccatgagaccaaatggttttatatggaaccaacgaagtgggagctaaaactgcacagtggtcattctttggcctctccttggctttatgacttaaaccaactacaacttccctatagcttctaagcagtttcatcagcattacttgggaaaacgtgttgcaagtcaaccagtcactaggatatttctacccatgcaacggaagaaaaacccattactccagaagagtatatctaagtaactaaaatggaggcagaaaatgttttaaggattttcttcaaagaataagccacagcaatggttttgtagaaaactcctgtgcttttgagcaaggacttttgccctctagaaagcaactgaggccaggtgcggtggctcacgcctgtaatcccagcactttgggaggccgaggtgagcggatcacctgaggtcaggagttttgagaccagcctggccaacatggtaaaatcccgtctctactaaaattataaaaattagccgggcatgatggtgggcacctgtaatcccagctacttgggaggctgaggcaggagaatcacttgaacccaggaggcagaggttgcagtgagccaagattgcacactgcactccagcctgggtgactagcaaaactccatctcaaaaaaaaaaaaaagaaagaaagaaactgaaaagtgaggtgtggaactccaggcaacgacccaagcacttattttttaagagggaaaggactttggtcatgtttacattggcctttggtttttttttttctttcagccacaactatatgctgatataactcagccatcacttttgagttttgtttttaaatgaaggttaaatgtgacctgtgccctcacatttaattccgtttcatggagacatcttcctgactttgttggatagctgccactagggttgcttcgatcttcagccacatgctgtccttgaagcagctatttgaagatgtgttttctgaggaaaacaggctacaactgtttattaaaaccacttgcagtgcattcgtttatcagatgctcagtgcaaagtgtaattgggtcatggtcaaaaacgcttgcaacatctaattggcgttcaagatagtcattcaaaagttcttggcccgctgaagtctgttaacagttgaaacattctacagttaaccattagcatgctagttgtcctaatggaaatttttgaagagtttttcaatatataccctacccttgccaggaagagaagtaaaatcctcaggttgtggggtatttgtttctactccagcctggcaggcaaggctaaaacctgagattatcgatctatgagacatcttgatatgtaaagcacttaatattaaaggcataaaagtgaaactgctaaatatgtatagagaggttgacgtgtgatacgtgggacagttcacatagacatcagagaatttattccagaaaggagcctcctgaatgtgatgaatacggcaaagcctttaatcacatctcagcccttagcatcggaaagcttatactgtaaataaacttgatgaatattatatgtgaggaaaactttcatgtatagcactcattgcttcagacagaaaatgaattccgtcggtatgttccaatcgtgatgaatttgagaaacattgcaagagggagctcaatcttggccgggcgcagtggctcacgcctgtaatcgcagcactttgggaggccgaggcaggcggatcacgaggtcagtagttcgagaccagcctggccaacatggtgaaaccttgtctctactaaaaatacaaaaaaaaattagctgggcacagtggcgcacgcctgtagtcccagctactcgggaggctgaggcaggagaatggcttgaacctgcgaggcggaggttgcagtgagctaagatcatgccactggcactccagccttgagtgacagagcgaggctctgtatcaaaaaaaaaagttgcgggggggtgctcaatcttaactgcagaggatctacagatgaaaaaaaatgtggggaaatgctttaaaaaaatagcaaaatgtgcaacttcttacaaaaattgttaacgttaggtacttctatatattttatatgaccataatgtccgtgtgtgttttgtaccttcagtcccttgttattgttccgtatattacctgtaagcagatactgtattttattttagcctatttgacagaacacatcactcagaaaaagtgaagtttcagagcaaacagtgaagaaatcagtgtgattgtagacaaaaagtcggttcacagaacggagcagcggggagaggaagggaaaagcttcatagtttggtgcttatcacatcaagagattggtaaatttctgaggaaagacaggctaatggggcactgaaatggaacaactcctttaaacgtgcagccttttgaatttttcctcaaaaccaagaagttgacctctgagctgtcaggtgaccactgtgtgcaaaggggatggattctcttgtcagtagacggtcttctccatgaagcgagagtaggaagtgtactggaatggccaagtgggactgcttcagctgaccaggttcttttaaaccgtagtcatgctttcccactaactcttaaatccttatgcttagaaaattgaggataaggctgggcacagtggctcaggcctgtaatcccagcactttgggagaccaaggcgggtggatcacaaggtcaggagatcgagaccatcctggctaacatggcgaaaccccgtctctactaaaaatacaaaaaaatagctgggcgtggtggcgggcgcctgtagtcccagctactcaggaggctgaggcaggaggatcacttgaacatgggaggcggaggttgcagtgagccaagatggcgccactgcactccagcctgggtgatggcgtgagactccatgtcaaaaaaaaaaacaaaggttggggggaggataggactggccaggcacggtggctcactcctgtaatctcagcactttgggaggcagaggtgggcggatcacttgaggtcaggagtttgagaccagcctggccaacgtggtgaaagcctgtctctactaaaaatacaaaaattagccgggcgtggtggtgggcgcctgtagtcccagctactcaggaggctgaggcaggagaatcacctaaatctgggaggcagaggttgcagtgagccgagattgcaccactgcactccagcctgggtaacagagactctgtctcaaaaaaagaaaaaaagaaagaaagaaagaaagaaaattggggataggagaacagcaaggtgggcatttcccggaattgtgtgcagatgcatccagtcgtggcattgcaagaagtctgtctgatgaagctcgggaagcattttgcaatattccctttggctgtgttcctgtgttccctgctcccacttttcttcccctggtttgtgattattaggagagaggttttgcaaagactcgttgctgtgaaagaatctttttttaatttttatcctagagtcagtcacttttattccaggtagtcatgctgatctgcttatccaaagccagctaaccaggttcatcctaccatcctcatggaagactgtgtgtatgaattggagtaacagaactgaaatacacttaaacagtgacagcagtacttcccagggtgggggccatatttctctgtgtcctactctgagcaacttctcagagatacgagggggctagggttttcccatctgggaaatggggtgaaagtctgcagattgttaaatgaaatatagaatcagagaaaaagaaaagtcagtgatataaatagatcatttcatagaaattagggtagatttttatttcaactactactggagaatttaataaaaggcattatttgaaaagtttttctaacatagatttagggtttttttttttagagtggacacactacatttaaaagcaattattttgctattcagattttttattatctgaaaatgaaattatctgttttacttttcaaagctttgtgaaacaaacttgaagttatagggaggtaagccatctccaactctgcaggtcaaacgaaagtttgggaaatacttttgacatcccacaatacagaatgtcttaacatgagaattgaatttcatgatgtgtggttccatttaatagcggacaccaccccaatctcatgttttcctgttaccctaaaacagtggaaggaaactgggtgtttggtagacttctaaatcatggtctctgacaatttgaatctgagattctcacctccatttactaaagaatcgtgacttaattcaaattgcacagtaatcagtaaagtgaatacgtttttaaaatggaattttctcccttcagcaagacctgggatattagctttggggtttgagagcatcatggggcagaagcagaagcg

SEQ ID NO: 71961 - DNA, 9049 bp, Homo sapiens
tggcagtacagtgagactgtgttcaaaaaaacaaattacaagtatatcttacatagaagatgagatctacattatggatttctgccttgtgagagggcctaggaatgcacggtggttaaaaaaaacaaaaatctgctggctgggcgcggcggctcacgtctgtcatcccagcactttgggaggccgaggtcggctgatcacctgaggtcaggaattcaaaaacagccgggccaccacagcaaaaccctgtctctactacaaatacatggaggcggttgcctgggaggcagttctgctccgttcccatggattacaatttaggtgcctctgtcgggggaatatctctttcctagcagagatgaccaggcgaactgatcatccgtctaatcccaacccattgtcccggtaccacattcccgaaactaccaagcatccttctgttggctttctgtcttcttccatcctgtgtgattagtgtgattccaatacactgctttgtgtaattccacgaacttgcacctggactgtccttgtgatgaggattcccagcttccaaacttaatggtgattttctatgaagagctctgggtcctggatgtgtagtaagaacgaggaagttcaagaggcatcagccagataagacaaggtgacactgttggcagacatttccatttgtctctgctggatcttaacccctcaggacagtgctgcaaagaagccctcacgtggtgaaaacaggaatgagaacgaggagtcaacctcaaaggctgaaacctcggaagattcagcatcacgcggggagacaacaggaagatcccagaaagagtttggagagaaacgtgaccaggagggcaaaacaggagaaagacagcagaaaaaccctgaggagaaaaccaggaaagagaaaagagattcagggccagctataggaaaggacaaaaaaaccatcacaggagagagaggtccaagggagaaggggaaaggattgggaagaagcttcagtctgagctccaacttcaccacccctgaagaagttcccacgggaacaaagtctcacagatgtgatgaatgtggtaaatgcttcacgagaagttcaagccttatccgccataaaataatccacactggagaaaagccctatgaatgtagtgagtgtgggaaagccttcagtcttaactccaaccttgtcctgcatcagaggatccacacaggagagaaacctcatgaatgtaacgagtgtggcaaggccttcagccacagttccaatctcatcctccatcagcgcatccactctggagagaaaccttatgaatgtaatgagtgcgggaaggccttcagccagagctcggacctcaccaagcatcagagaattcacacgggggagaaaccctatgaatgtagtgaatgtggaaaagctttcaaccgaaactcatacctgattttgcatcggagaattcacactcgagaaaagccctacaagtgcactaagtgtggcaaggccttcacccgcagctccaccctcactctgcatcacagaatccatgccagagagagagcctctgagtacagcccagcctcccttgatgcatttggcgcgttcctgaaaagttgtgtgtaaaggaagaatttgccatcaagccatttcccccttttgtttctaaaattatttcagagatgtgtgctcctggagggaaaaagaaatacagcctcaacagattaaaaaacaaaagtcacacttaaggatccttctagtcacatcagcagtgttctgcctttatgtagtagttgggcatataatccttccacacagcccctgcagggaaaggctaatcttacggataatccacgtgagatttccacacaagagaaaagcacacgcatagtgaaatgtcagtcttttcagtaatgaggatacctttaaggcactcttggactctcggcaaccacaacataatagttgaaagatcaagattggctccacgaaagtgatacggaggttaggatgctacttgctgcaaacaagccctactttggccaacatcctgcttatttctcaaaaaagagggacagtgaaaacaaaaacgacattgggacatgctgctcaaggtagttatatatacgataagttgtatatatgatcactggtagcctaccaaagctgtagaaatctaggactgtgctaatcagtatcaaaccaaagatttctatctcttcccgaaagagagggtatgtgcaccagtctacagttccaaaggactgcaacaaatgtagatggttctgtcctcatccctgagatcagttctactgaaatggcaacaacaactccaaatacatctctcccttcttgaaatccctaaagcactatcgcactcctaaatgcatttctccacaagttagcacttgattgtatactgtcttttaatccttcattgtttcatgtatgaagtttttaatcaccccctaacccccaaaaaagattcggttgtcaagggatatatttctatccctgccagcacagtgctggacatagtgagtactgaacacctaagaggcactcattcagactgacttctacaggacttctacgtgtgtgataaaagcctgtgaatcgtgagtccctgaaatatggtagcctggcccagcttctaaagaggaccttcgtagccacaaggcatgctaaacctctagggtctgatgctgtttttgttccaaatataaacgaaaggcactagtcagccgcctgcatagactttctaaacagtgagtaaataccatggaatgtcagaaatgactttatcatcgtcatcttgaagaaaaatatgaacactgatgaaggtcattttttttttttgacatctttctgtggcaaagctcttagaattctttgcagttagctgctgaacagtatgatgatttggggattttctgaatcatttgtacttagatactggagttcagaagatgtgatttttgttgcttttcagaaaaaggaacgtggtagggagtgttttttcccacgcttttccagtaactttgcaatcagcagtgtactgagatgtggctggctgtgccatcgtcatagtgcacagtgacttttctgtttcttatcactaaagactgaggtgaggttatgaaactttcattggtcccatcgttgtgcgcagggtgcaactggctacctagaagctgatggcaggagactgtttcacacacaggagattgtgagctgtgtaagtagtcatcgccactcaagtaggacaagggtcctacccaaggctaggaccgccctgcggaaacagaaacatagactgagaacaaacctcaagactatcagtgtgacctccccataacaagagaaccccatatatagtttgagactttcccttgagaaacttatactaaaactattactcatcagtcattcactgatcagcagctaaagtccatgagaccaaatggttttatatggaaccaacgaagtgggagctaaaactgcacagtggtcattctttggcctctccttggctttatgacttaaaccaactacaacttccctatagcttctaagcagtttcatcagcattacttgggaaaacgtgttgcaagtcaaccagtcactaggatatttctacccatgcaacggaagaaaaacccattactccagaagagtatatctaagtaactaaaatggaggcagaaaatgttttaaggattttcttcaaagaataagccacagcaatggttttgtagaaaactcctgtgcttttgagcaaggacttttgccctctagaaagcaactgaggccaggtgcggtggctcacgcctgtaatcccagcactttgggaggccgaggtgagcggatcacctgaggtcaggagttttgagaccagcctggccaacatggtaaaatcccgtctctactaaaattataaaaattagccgggcatgatggtgggcacctgtaatcccagctacttgggaggctgaggcaggagaatcacttgaacccaggaggcagaggttgcagtgagccaagattgcacactgcactccagcctgggtgactagcaaaactccatctcaaaaaaaaaaaaaagaaagaaagaaactgaaaagtgaggtgtggaactccaggcaacgacccaagcacttattttttaagagggaaaggactttggtcatgtttacattggcctttggtttttttttttctttcagccacaactatatgctgatataactcagccatcacttttgagttttgtttttaaatgaaggttaaatgtgacctgtgccctcacatttaattccgtttcatggagacatcttcctgactttgttggatagctgccactagggttgcttcgatcttcagccacatgctgtccttgaagcagctatttgaagatgtgttttctgaggaaaacaggctacaactgtttattaaaaccacttgcagtgcattcgtttatcagatgctcagtgcaaagtgtaattgggtcatggtcaaaaacgcttgcaacatctaattggcgttcaagatagtcattcaaaagttcttggcccgctgaagtctgttaacagttgaaacattctacagttaaccattagcatgctagttgtcctaatggaaatttttgaagagtttttcaatatataccctacccttgccaggaagagaagtaaaatcctcaggttgtggggtatttgtttctactccagcctggcaggcaaggctaaaacctgagattatcgatctatgagacatcttgatatgtaaagcacttaatattaaaggcataaaagtgaaactgctaaatatgtatagagaggttgacgtgtgatacgtgggacagttcacatagacatcagagaatttattccagaaaggagcctcctgaatgtgatgaatacggcaaagcctttaatcacatctcagcccttagcatcggaaagcttatactgtaaataaacttgatgaatattatatgtgaggaaaactttcatgtatagcactcattgcttcagacagaaaatgaattccgtcggtatgttccaatcgtgatgaatttgagaaacattgcaagagggagctcaatcttggccgggcgcagtggctcacgcctgtaatcgcagcactttgggaggccgaggcaggcggatcacgaggtcagtagttcgagaccagcctggccaacatggtgaaaccttgtctctactaaaaatacaaaaaaaaattagctgggcacagtggcgcacgcctgtagtcccagctactcgggaggctgaggcaggagaatggcttgaacctgcgaggcggaggttgcagtgagctaagatcatgccactggcactccagccttgagtgacagagcgaggctctgtatcaaaaaaaaaagttgcgggggggtgctcaatcttaactgcagaggatctacagatgaaaaaaaatgtggggaaatgctttaaaaaaatagcaaaatgtgcaacttcttacaaaaattgttaacgttaggtacttctatatattttatatgaccataatgtccgtgtgtgttttgtaccttcagtcccttgttattgttccgtatattacctgtaagcagatactgtattttattttagcctatttgacagaacacatcactcagaaaaagtgaagtttcagagcaaacagtgaagaaatcagtgtgattgtagacaaaaagtcggttcacagaacggagcagcggggagaggaagggaaaagcttcatagtttggtgcttatcacatcaagagattggtaaatttctgaggaaagacaggctaatggggcactgaaatggaacaactcctttaaacgtgcagccttttgaatttttcctcaaaaccaagaagttgacctctgagctgtcaggtgaccactgtgtgcaaaggggatggattctcttgtcagtagacggtcttctccatgaagcgagagtaggaagtgtactggaatggccaagtgggactgcttcagctgaccaggttcttttaaaccgtagtcatgctttcccactaactcttaaatccttatgcttagaaaattgaggataaggctgggcacagtggctcaggcctgtaatcccagcactttgggagaccaaggcgggtggatcacaaggtcaggagatcgagaccatcctggctaacatggcgaaaccccgtctctactaaaaatacaaaaaaatagctgggcgtggtggcgggcgcctgtagtcccagctactcaggaggctgaggcaggaggatcacttgaacatgggaggcggaggttgcagtgagccaagatggcgccactgcactccagcctgggtgatggcgtgagactccatgtcaaaaaaaaaaacaaaggttggggggaggataggactggccaggcacggtggctcactcctgtaatctcagcactttgggaggcagaggtgggcggatcacttgaggtcaggagtttgagaccagcctggccaacgtggtgaaagcctgtctctactaaaaatacaaaaattagccgggcgtggtggtgggcgcctgtagtcccagctactcaggaggctgaggcaggagaatcacctaaatctgggaggcagaggttgcagtgagccgagattgcaccactgcactccagcctgggtaacagagactctgtctcaaaaaaagaaaaaaagaaagaaagaaagaaagaaaattggggataggagaacagcaaggtgggcatttcccggaattgtgtgcagatgcatccagtcgtggcattgcaagaagtctgtctgatgaagctcgggaagcattttgcaatattccctttggctgtgttcctgtgttccctgctcccacttttcttcccctggtttgtgattattaggagagaggttttgcaaagactcgttgctgtgaaagaatctttttttaatttttatcctagagtcagtcacttttattccaggtagtcatgctgatctgcttatccaaagccagctaaccaggttcatcctaccatcctcatggaagactgtgtgtatgaattggagtaacagaactgaaatacacttaaacagtgacagcagtacttcccagggtgggggccatatttctctgtgtcctactctgagcaacttctcagagatacgagggggctagggttttcccatctgggaaatggggtgaaagtctgcagattgttaaatgaaatatagaatcagagaaaaagaaaagtcagtgatataaatagatcatttcatagaaattagggtagatttttatttcaactactactggagaatttaataaaaggcattatttgaaaagtttttctaacatagatttagggtttttttttttagagtggacacactacatttaaaagcaattattttgctattcagattttttattatctgaaaatgaaattatctgttttacttttcaaagctttgtgaaacaaacttgaagttatagggaggtaagccatctccaactctgcaggtcaaacgaaagtttgggaaatacttttgacatcccacaatacagaatgtcttaacatgagaattgaatttcatgatgtgtggttccatttaatagcggacaccaccccaatctcatgttttcctgttaccctaaaacagtggaaggaaactgggtgtttggtagacttctaaatcatggtctctgacaatttgaatctgagattctcacctccatttactaaagaatcgtgacttaattcaaattgcacagtaatcagtaaagtgaatacgtttttaaaatggaattttctcccttcagcaagcactcattaaggagtgaggctgagtattttaagatagagtgagatctgtgagtgattgaaaggtgatatttaaaaacttggatttcattccagtgtcaggtttgggttttaagttcctttggtccagggaagggtccaagcagccacagttgccctaaatctccatcattaagtcttccagcaaggttaagtgcagtatggaaggagaagggggaagaggacggtaacggccccacactccaggctgagaaagagtaattaggaggcctgaggaggggccgaggaaaggctgttggggtgtgctggggttggtacccgagcgccttcccctcacctcaaccagagaagagcatccggttgctttttaaagcttttagcctgccctagcaaggacaaagcatgttagattagagatgcttctgctgatcgcaggggttcttatttgaaaacatctatgatgggggtggggtgggaggagacaggttgtggttatgcaggaaaatcttgtcctaaaaatatatgagtttgggggtaaggggtgggatagccaagcaaaatcagtaattattttaaaatgaacatatgtatttttattaacttttagttaaatacagattttacaacgaggtcagcataagcctaaatctatatagagggctaactcaggcattgtcttgtttatttgtagactggattaaaaacaacctgtcctgttttgtcagttcccagcttcttcgtttagaataaattagaccaaaagaagaaacgtgcttgtctctgtatacccgcagaatgaagttactgttgttaaaactggattttttcattttactaggttccgaagagtccagatgcttggtagatgttcaatacgtgattttttttttaattgaatgtgttcatttaaaatcctccttaacatttctagaaagacttctttcaataaataatggaatcttagaggaaaagtggttttttaaaagctagggaactcctccactaaaagtaaccattggaaacctcgaatgagggctaaagttttaatcataagagaaaaggcagcataatgaaatgtgtacacatacatagtcagtggtccattttaggaagccagtggcgtctgataaagaaatgttaagagtagtgaggttgaggaaggaaattgtggggatttgaaatattctctttatgttgtttctcttctgagtcatggtaaaacaataaattatcatctcta

SEQ ID NO: 71962 - DNA, 7261 bp, Homo sapiens
  misc_feature (12)..(12): n is a, c, g, or t
  misc_feature (24)..(24): n is a, c, g, or t
  misc_feature (47)..(47): n is a, c, g, or t
  misc_feature (61)..(61): n is a, c, g, or t
gggttttaaaancgccgcccaggnccaaagttggcaagccttgcagntcgacttttaaagnttccccggtcaaggttacggcactcttggactctcggcaaccacaacataatagttgaaagatcaagattggctccacgaaagtgatacggaggttaggatgctacttgctgcaaacaagccctactttggccaacatcctgcttatttctcaaaaaagagggacagtgaaaacaaaaacgacattgggacatgctgctcaaggtagttatatatacgataagttgtatatatgatcactggtagcctaccaaagctgtagaaatctaggactgtgctaatcagtatcaaaccaaagatttctatctcttcccgaaagagagggtatgtgcaccagtctacagttccaaaggactgcaacaaatgtagatggttctgtcctcatccctgagatcagttctactgaaatggcaacaacaactccaaatacatctctcccttcttgaaatccctaaagcactatcgcactcctaaatgcatttctccacaagttagcacttgattgtatactgtcttttaatccttcattgtttcatgtatgaagtttttaatcaccccctaacccccaaaaaagattcggttgtcaagggatatatttctatccctgccagcacagtgctggacatagtgagtactgaacacctaagaggcactcattcagactgacttctacaggacttctacgtgtgtgataaaagcctgtgaatcgtgagtccctgaaatatggtagcctggcccagcttctaaagaggaccttcgtagccacaaggcatgctaaacctctagggtctgatgctgtttttgttccaaatataaacgaaaggcactagtcagccgcctgcatagactttctaaacagtgagtaaataccatggaatgtcagaaatgactttatcatcgtcatcttgaagaaaaatatgaacactgatgaaggtcattttttttttttgacatctttctgtggcaaagctcttagaattctttgcagttagctgctgaacagtatgatgatttggggattttctgaatcatttgtacttagatactggagttcagaagatgtgatttttgttgcttttcagaaaaaggaacgtggtagggagtgttttttcccacgcttttccagtaactttgcaaaagcattaattgttcactggcaattactaaatgtattttgttgctctgagaaactcagcagtgtactgagatgtggctggctgtgccatcgtcatagtgcacagtgacttttctgtttcttatcactaaagactgaggtgaggttatgaaactttcattggtcccatcgttgtgcgcagggtgcaactggctacctagaagctgatggcaggagactgtttcacacacaggagattgtgagctgtgtaagtagtcatcgccactcaagtaggacaagggtcctacccaaggctaggaccgccctgcggaaacagaaacatagactgagaacaaacctcaagactatcagtgtgacctccccataacaagagaaccccatatatagtttgagactttcccttgagaaacttatactaaaactattactcatcagtcattcactgatcagcagctaaagtccatgagaccaaatggttttatatggaaccaacgaagtgggagctaaaactgcacagtggtcattctttggcctctccttggctttatgacttaaaccaactacaacttccctatagcttctaagcagtttcatcagcattacttgggaaaacgtgttgcaagtcaaccagtcactaggatatttctacccatgcaacggaagaaaaacccattactccagaagagtatatctaagtaactaaaatggaggcagaaaatgttttaaggattttcttcaaagaataagccacagcaatggttttgtagaaaactcctgtgcttttgagcaaggacttttgccctctagaaagcaactgaggccaggtgcggtggctcacgcctgtaatcccagcactttgggaggccgaggtgagcggatcacctgaggtcaggagttttgagaccagcctggccaacatggtaaaatcccgtctctactaaaattataaaaattagccgggcatgatggtgggcacctgtaatcccagctacttgggaggctgaggcaggagaatcacttgaacccaggaggcagaggttgcagtgagccaagattgcacactgcactccagcctgggtgactagcaaaactccatctcaaaaaaaaaaaaaagaaagaaagaaactgaaaagtgaggtgtggaactccaggcaacgacccaagcacttattttttaagagggaaaggactttggtcatgtttacattggcctttggtttttttttttctttcagccacaactatatgctgatataactcagccatcacttttgagttttgtttttaaatgaaggttaaatgtgacctgtgccctcacatttaattccgtttcatggagacatcttcctgactttgttggatagctgccactagggttgcttcgatcttcagccacatgctgtccttgaagcagctatttgaagatgtgttttctgaggaaaacaggctacaactgtttattaaaaccacttgcagtgcattcgtttatcagatgctcagtgcaaagtgtaattgggtcatggtcaaaaacgcttgcaacatctaattggcgttcaagatagtcattcaaaagttcttggcccgctgaagtctgttaacagttgaaacattctacagttaaccattagcatgctagttgtcctaatggaaatttttgaagagtttttcaatatataccctacccttgccaggaagagaagtaaaatcctcaggttgtggggtatttgtttctactccagcctggcaggcaaggctaaaacctgagattatcgatctatgagacatcttgatatgtaaagcacttaatattaaaggcataaaagtgaaactgctaaatatgtatagagaggttgacgtgtgatacgtgggacagttcacatagacatcagagaatttattccagaaaggagcctcctgaatgtgatgaatacggcaaagcctttaatcacatctcagcccttagcatcggaaagcttatactgtaaataaacttgatgaatattatatgtgaggaaaactttcatgtatagcactcattgcttcagacagaaaatgaattccgtcggtatgttccaatcgtgatgaatttgagaaacattgcaagagggagctcaatcttggccgggcgcagtggctcacgcctgtaatcgcagcactttgggaggccgaggcaggcggatcacgaggtcagtagttcgagaccagcctggccaacatggtgaaaccttgtctctactaaaaatacaaaaaaaaattagctgggcacagtggcgcacgcctgtagtcccagctactcgggaggctgaggcaggagaatggcttgaacctgcgaggcggaggttgcagtgagctaagatcatgccactggcactccagccttgagtgacagagcgaggctctgtatcaaaaaaaaaagttgcgggggggtgctcaatcttaactgcagaggatctacagatgaaaaaaaatgtggggaaatgctttaaaaaaatagcaaaatgtgcaacttcttacaaaaattgttaacgttaggtacttctatatattttatatgaccataatgtccgtgtgtgttttgtaccttcagtcccttgttattgttccgtatattacctgtaagcagatactgtattttattttagcctatttgacagaacacatcactcagaaaaagtgaagtttcagagcaaacagtgaagaaatcagtgtgattgtagacaaaaagtcggttcacagaacggagcagcggggagaggaagggaaaagcttcatagtttggtgcttatcacatcaagagattggtaaatttctgaggaaagacaggctaatggggcactgaaatggaacaactcctttaaacgtgcagccttttgaatttttcctcaaaaccaagaagttgacctctgagctgtcaggtgaccactgtgtgcaaaggggatggattctcttgtcagtagacggtcttctccatgaagcgagagtaggaagtgtactggaatggccaagtgggactgcttcagctgaccaggttcttttaaaccgtagtcatgctttcccactaactcttaaatccttatgcttagaaaattgaggataaggctgggcacagtggctcaggcctgtaatcccagcactttgggagaccaaggcgggtggatcacaaggtcaggagatcgagaccatcctggctaacatggcgaaaccccgtctctactaaaaatacaaaaaaatagctgggcgtggtggcgggcgcctgtagtcccagctactcaggaggctgaggcaggaggatcacttgaacatgggaggcggaggttgcagtgagccaagatggcgccactgcactccagcctgggtgatggcgtgagactccatgtcaaaaaaaaaaacaaaggttggggggaggataggactggccaggcacggtggctcactcctgtaatctcagcactttgggaggcagaggtgggcggatcacttgaggtcaggagtttgagaccagcctggccaacgtggtgaaagcctgtctctactaaaaatacaaaaattagccgggcgtggtggtgggcgcctgtagtcccagctactcaggaggctgaggcaggagaatcacctaaatctgggaggcagaggttgcagtgagccgagattgcaccactgcactccagcctgggtaacagagactctgtctcaaaaaaagaaaaaaagaaagaaagaaagaaagaaaattggggataggagaacagcaaggtgggcatttcccggaattgtgtgcagatgcatccagtcgtggcattgcaagaagtctgtctgatgaagctcgggaagcattttgcaatattccctttggctgtgttcctgtgttccctgctcccacttttcttcccctggtttgtgattattaggagagaggttttgcaaagactcgttgctgtgaaagaatctttttttaatttttatcctagagtcagtcacttttattccaggtagtcatgctgatctgcttatccaaagccagctaaccaggttcatcctaccatcctcatggaagactgtgtgtatgaattggagtaacagaactgaaatacacttaaacagtgacagcagtacttcccagggtgggggccatatttctctgtgtcctactctgagcaacttctcagagatacgagggggctagggttttcccatctgggaaatggggtgaaagtctgcagattgttaaatgaaatatagaatcagagaaaaagaaaagtcagtgatataaatagatcatttcatagaaattagggtagatttttatttcaactactactggagaatttaataaaaggcattatttgaaaagtttttctaacatagatttagggtttttttttttagagtggacacactacatttaaaagcaattattttgctattcagattttttattatctgaaaatgaaattatctgttttacttttcaaagctttgtgaaacaaacttgaagttatagggaggtaagccatctccaactctgcaggtcaaacgaaagtttgggaaatacttttgacatcccacaatacagaatgtcttaacatgagaattgaatttcatgatgtgtggttccatttaatagcggacaccaccccaatctcatgttttcctgttaccctaaaacagtggaaggaaactgggtgtttggtagacttctaaatcatggtctctgacaatttgaatctgagattctcacctccatttactaaagaatcgtgacttaattcaaattgcacagtaatcagtaaagtgaatacgtttttaaaatggaattttctcccttcagcaagcactcattaaggagtgaggctgagtattttaagatagagtgagatctgtgagtgattgaaaggtgatatttaaaaacttggatttcattccagtgtcaggtttgggttttaagttcctttggtccagggaagggtccaagcagccacagttgccctaaatctccatcattaagtcttccagcaaggttaagtgcagtatggaaggagaagggggaagaggacggtaacggccccacactccaggctgagaaagagtaattaggaggcctgaggaggggccgaggaaaggctgttggggtgtgctggggttggtacccgagcgccttcccctcacctcaaccagagaagagcatccggttgctttttaaagcttttagcctgccctagcaaggacaaagcatgttagattagagatgcttctgctgatcgcaggggttcttatttgaaaacatctatgatgggggtggggtgggaggagacaggttgtggttatgcaggaaaatcttgtcctaaaaatatatgagtttgggggtaaggggtgggatagccaagcaaaatcagtaattattttaaaatgaacatatgtatttttattaacttttagttaaatacagattttacaacgaggtcagcataagcctaaatctatatagagggctaactcaggcattgtcttgtttatttgtagactggattaaaaacaacctgtcctgttttgtcagttcccagcttcttcgtttagaataaattagaccaaaagaagaaacgtgcttgtctctgtatacccgcagaatgaagttactgttgttaaaactggattttttcattttactaggttccgaagagtccagatgcttggtagatgttcaatacgtgattttttttttaattgaatgtgttcatttaaaatcctccttaacatttctagaaagacttctttcaataaataatggaatcttagaggaaaagtggttttttaaaagctagggaactcctccactaaaagtaaccattggaaacctcgaatgagggctaaagttttaatcataagagaaaaggcagcataatgaaatgtgtacacatacatagtcagtggtccattttaggaagccagtggcgtctgataaagaaatgttaagagtagtgaggttgaggaaggaaattgtggggatttgaaatattctctttatgttgtttctcttctgagtcatggtaaaacaataaattatcatctcta

SEQ ID NO: 71963 - DNA, 7159 bp, Homo sapiens
tgaggaccccaaacacgcatatcaagattggctccacgaaagtgatacggaggttaggatgctacttgctgcaaacaagccctactttggccaacatcctgcttatttctcaaaaaagagggacagtgaaaacaaaaacgacattgggacatgctgctcaaggtagttatatatacgataagttgtatatatgatcactggtagcctaccaaagctgtagaaatctaggactgtgctaatcagtatcaaaccaaagatttctatctcttcccgaaagagagggtatgtgcaccagtctacagttccaaaggactgcaacaaatgtagatggttctgtcctcatccctgagatcagttctactgaaatggcaacaacaactccaaatacatctctcccttcttgaaatccctaaagcactatcgcactcctaaatgcatttctccacaagttagcacttgattgtatactgtcttttaatccttcattgtttcatgtatgaagtttttaatcaccccctaacccccaaaaaagattcggttgtcaagggatatatttctatccctgccagcacagtgctggacatagtgagtactgaacacctaagaggcactcattcagactgacttctacaggacttctacgtgtgtgataaaagcctgtgaatcgtgagtccctgaaatatggtagcctggcccagcttctaaagaggaccttcgtagccacaaggcatgctaaacctctagggtctgatgctgtttttgttccaaatataaacgaaaggcactagtcagccgcctgcatagactttctaaacagtgagtaaataccatggaatgtcagaaatgactttatcatcgtcatcttgaagaaaaatatgaacactgatgaaggtcattttttttttttgacatctttctgtggcaaagctcttagaattctttgcagttagctgctgaacagtatgatgatttggggattttctgaatcatttgtacttagatactggagttcagaagatgtgatttttgttgcttttcagaaaaaggaacgtggtagggagtgttttttcccacgcttttccagtaactttgcaaaagcattaattgttcactggcaattactaaatgtattttgttgctctgagaaactcagcagtgtactgagatgtggctggctgtgccatcgtcatagtgcacagtgacttttctgtttcttatcactaaagactgaggtgaggttatgaaactttcattggtcccatcgttgtgcgcagggtgcaactggctacctagaagctgatggcaggagactgtttcacacacaggagattgtgagctgtgtaagtagtcatcgccactcaagtaggacaagggtcctacccaaggctaggaccgccctgcggaaacagaaacatagactgagaacaaacctcaagactatcagtgtgacctccccataacaagagaaccccatatatagtttgagactttcccttgagaaacttatactaaaactattactcatcagtcattcactgatcagcagctaaagtccatgagaccaaatggttttatatggaaccaacgaagtgggagctaaaactgcacagtggtcattctttggcctctccttggctttatgacttaaaccaactacaacttccctatagcttctaagcagtttcatcagcattacttgggaaaacgtgttgcaagtcaaccagtcactaggatatttctacccatgcaacggaagaaaaacccattactccagaagagtatatctaagtaactaaaatggaggcagaaaatgttttaaggattttcttcaaagaataagccacagcaatggttttgtagaaaactcctgtgcttttgagcaaggacttttgccctctagaaagcaactgaggccaggtgcggtggctcacgcctgtaatcccagcactttgggaggccgaggtgagcggatcacctgaggtcaggagttttgagaccagcctggccaacatggtaaaatcccgtctctactaaaattataaaaattagccgggcatgatggtgggcacctgtaatcccagctacttgggaggctgaggcaggagaatcacttgaacccaggaggcagaggttgcagtgagccaagattgcacactgcactccagcctgggtgactagcaaaactccatctcaaaaaaaaaaaaaagaaagaaagaaactgaaaagtgaggtgtggaactccaggcaacgacccaagcacttattttttaagagggaaaggactttggtcatgtttacattggcctttggtttttttttttctttcagccacaactatatgctgatataactcagccatcacttttgagttttgtttttaaatgaaggttaaatgtgacctgtgccctcacatttaattccgtttcatggagacatcttcctgactttgttggatagctgccactagggttgcttcgatcttcagccacatgctgtccttgaagcagctatttgaagatgtgttttctgaggaaaacaggctacaactgtttattaaaaccacttgcagtgcattcgtttatcagatgctcagtgcaaagtgtaattgggtcatggtcaaaaacgcttgcaacatctaattggcgttcaagatagtcattcaaaagttcttggcccgctgaagtctgttaacagttgaaacattctacagttaaccattagcatgctagttgtcctaatggaaatttttgaagagtttttcaatatataccctacccttgccaggaagagaagtaaaatcctcaggttgtggggtatttgtttctactccagcctggcaggcaaggctaaaacctgagattatcgatctatgagacatcttgatatgtaaagcacttaatattaaaggcataaaagtgaaactgctaaatatgtatagagaggttgacgtgtgatacgtgggacagttcacatagacatcagagaatttattccagaaaggagcctcctgaatgtgatgaatacggcaaagcctttaatcacatctcagcccttagcatcggaaagcttatactgtaaataaacttgatgaatattatatgtgaggaaaactttcatgtatagcactcattgcttcagacagaaaatgaattccgtcggtatgttccaatcgtgatgaatttgagaaacattgcaagagggagctcaatcttggccgggcgcagtggctcacgcctgtaatcgcagcactttgggaggccgaggcaggcggatcacgaggtcagtagttcgagaccagcctggccaacatggtgaaaccttgtctctactaaaaatacaaaaaaaaattagctgggcacagtggcgcacgcctgtagtcccagctactcgggaggctgaggcaggagaatggcttgaacctgcgaggcggaggttgcagtgagctaagatcatgccactggcactccagccttgagtgacagagcgaggctctgtatcaaaaaaaaaagttgcgggggggtgctcaatcttaactgcagaggatctacagatgaaaaaaaatgtggggaaatgctttaaaaaaatagcaaaatgtgcaacttcttacaaaaattgttaacgttaggtacttctatatattttatatgaccataatgtccgtgtgtgttttgtaccttcagtcccttgttattgttccgtatattacctgtaagcagatactgtattttattttagcctatttgacagaacacatcactcagaaaaagtgaagtttcagagcaaacagtgaagaaatcagtgtgattgtagacaaaaagtcggttcacagaacggagcagcggggagaggaagggaaaagcttcatagtttggtgcttatcacatcaagagattggtaaatttctgaggaaagacaggctaatggggcactgaaatggaacaactcctttaaacgtgcagccttttgaatttttcctcaaaaccaagaagttgacctctgagctgtcaggtgaccactgtgtgcaaaggggatggattctcttgtcagtagacggtcttctccatgaagcgagagtaggaagtgtactggaatggccaagtgggactgcttcagctgaccaggttcttttaaaccgtagtcatgctttcccactaactcttaaatccttatgcttagaaaattgaggataaggctgggcacagtggctcaggcctgtaatcccagcactttgggagaccaaggcgggtggatcacaaggtcaggagatcgagaccatcctggctaacatggcgaaaccccgtctctactaaaaatacaaaaaaatagctgggcgtggtggcgggcgcctgtagtcccagctactcaggaggctgaggcaggaggatcacttgaacatgggaggcggaggttgcagtgagccaagatggcgccactgcactccagcctgggtgatggcgtgagactccatgtcaaaaaaaaaaacaaaggttggggggaggataggactggccaggcacggtggctcactcctgtaatctcagcactttgggaggcagaggtgggcggatcacttgaggtcaggagtttgagaccagcctggccaacgtggtgaaagcctgtctctactaaaaatacaaaaattagccgggcgtggtggtgggcgcctgtagtcccagctactcaggaggctgaggcaggagaatcacctaaatctgggaggcagaggttgcagtgagccgagattgcaccactgcactccagcctgggtaacagagactctgtctcaaaaaaagaaaaaaagaaagaaagaaagaaagaaaattggggataggagaacagcaaggtgggcatttcccggaattgtgtgcagatgcatccagtcgtggcattgcaagaagtctgtctgatgaagctcgggaagcattttgcaatattccctttggctgtgttcctgtgttccctgctcccacttttcttcccctggtttgtgattattaggagagaggttttgcaaagactcgttgctgtgaaagaatctttttttaatttttatcctagagtcagtcacttttattccaggtagtcatgctgatctgcttatccaaagccagctaaccaggttcatcctaccatcctcatggaagactgtgtgtatgaattggagtaacagaactgaaatacacttaaacagtgacagcagtacttcccagggtgggggccatatttctctgtgtcctactctgagcaacttctcagagatacgagggggctagggttttcccatctgggaaatggggtgaaagtctgcagattgttaaatgaaatatagaatcagagaaaaagaaaagtcagtgatataaatagatcatttcatagaaattagggtagatttttatttcaactactactggagaatttaataaaaggcattatttgaaaagtttttctaacatagatttagggtttttttttttagagtggacacactacatttaaaagcaattattttgctattcagattttttattatctgaaaatgaaattatctgttttacttttcaaagctttgtgaaacaaacttgaagttatagggaggtaagccatctccaactctgcaggtcaaacgaaagtttgggaaatacttttgacatcccacaatacagaatgtcttaacatgagaattgaatttcatgatgtgtggttccatttaatagcggacaccaccccaatctcatgttttcctgttaccctaaaacagtggaaggaaactgggtgtttggtagacttctaaatcatggtctctgacaatttgaatctgagattctcacctccatttactaaagaatcgtgacttaattcaaattgcacagtaatcagtaaagtgaatacgtttttaaaatggaattttctcccttcagcaagcactcattaaggagtgaggctgagtattttaagatagagtgagatctgtgagtgattgaaaggtgatatttaaaaacttggatttcattccagtgtcaggtttgggttttaagttcctttggtccagggaagggtccaagcagccacagttgccctaaatctccatcattaagtcttccagcaaggttaagtgcagtatggaaggagaagggggaagaggacggtaacggccccacactccaggctgagaaagagtaattaggaggcctgaggaggggccgaggaaaggctgttggggtgtgctggggttggtacccgagcgccttcccctcacctcaaccagagaagagcatccggttgctttttaaagcttttagcctgccctagcaaggacaaagcatgttagattagagatgcttctgctgatcgcaggggttcttatttgaaaacatctatgatgggggtggggtgggaggagacaggttgtggttatgcaggaaaatcttgtcctaaaaatatatgagtttgggggtaaggggtgggatagccaagcaaaatcagtaattattttaaaatgaacatatgtatttttattaacttttagttaaatacagattttacaacgaggtcagcataagcctaaatctatatagagggctaactcaggcattgtcttgtttatttgtagactggattaaaaacaacctgtcctgttttgtcagttcccagcttcttcgtttagaataaattagaccaaaagaagaaacgtgcttgtctctgtatacccgcagaatgaagttactgttgttaaaactggattttttcattttactaggttccgaagagtccagatgcttggtagatgttcaatacgtgattttttttttaattgaatgtgttcatttaaaatcctccttaacatttctagaaagacttctttcaataaataatggaatcttagaggaaaagtggttttttaaaagctagggaactcctccactaaaagtaaccattggaaacctcgaatgagggctaaagttttaatcataagagaaaaggcagcataatgaaatgtgtacacatacatagtcagtggtccattttaggaagccagtggcgtctgataaagaaatgttaagagtagtgaggttgaggaaggaaattgtggggatttgaaatattctctttatgttgtttctcttctgagtcatggtaaaacaataaattatcatctcta

SEQ ID NO: 71964 - DNA, 5565 bp, Homo sapiens
tgatctagaggatcccgatttgacgcgtctcctctccttggctttatgacttaaaccaactacaacttccctatagcttctaagcagtttcatcagcattacttgggaaaacgtgttgcaagtcaaccagtcactaggatatttctacccatgcaacggaagaaaaacccattactccagaagagtatatctaagtaactaaaatggaggcagaaaatgttttaaggattttcttcaaagaataagccacagcaatggttttgtagaaaactcctgtgcttttgagcaaggacttttgccctctagaaagcaactgaggccaggtgcggtggctcacgcctgtaatcccagcactttgggaggccgaggtgagcggatcacctgaggtcaggagttttgagaccagcctggccaacatggtaaaatcccgtctctactaaaattataaaaattagccgggcatgatggtgggcacctgtaatcccagctacttgggaggctgaggcaggagaatcacttgaacccaggaggcagaggttgcagtgagccaagattgcacactgcactccagcctgggtgactagcaaaactccatctcaaaaaaaaaaaaaagaaagaaagaaactgaaaagtgaggtgtggaactccaggcaacgacccaagcacttattttttaagagggaaaggactttggtcatgtttacattggcctttggtttttttttttctttcagccacaactatatgctgatataactcagccatcacttttgagttttgtttttaaatgaaggttaaatgtgacctgtgccctcacatttaattccgtttcatggagacatcttcctgactttgttggatagctgccactagggttgcttcgatcttcagccacatgctgtccttgaagcagctatttgaagatgtgttttctgaggaaaacaggctacaactgtttattaaaaccacttgcagtgcattcgtttatcagatgctcagtgcaaagtgtaattgggtcatggtcaaaaacgcttgcaacatctaattggcgttcaagatagtcattcaaaagttcttggcccgctgaagtctgttaacagttgaaacattctacagttaaccattagcatgctagttgtcctaatggaaatttttgaagagtttttcaatatataccctacccttgccaggaagagaagtaaaatcctcaggttgtggggtatttgtttctactccagcctggcaggcaaggctaaaacctgagattatcgatctatgagacatcttgatatgtaaagcacttaatattaaaggcataaaagtgaaactgctaaatatgtatagagaggttgacgtgtgatacgtgggacagttcacatagacatcagagaatttattccagaaaggagcctcctgaatgtgatgaatacggcaaagcctttaatcacatctcagcccttagcatcggaaagcttatactgtaaataaacttgatgaatattatatgtgaggaaaactttcatgtatagcactcattgcttcagacagaaaatgaattccgtcggtatgttccaatcgtgatgaatttgagaaacattgcaagagggagctcaatcttggccgggcgcagtggctcacgcctgtaatcgcagcactttgggaggccgaggcaggcggatcacgaggtcagtagttcgagaccagcctggccaacatggtgaaaccttgtctctactaaaaatacaaaaaaaaattagctgggcacagtggcgcacgcctgtagtcccagctactcgggaggctgaggcaggagaatggcttgaacctgcgaggcggaggttgcagtgagctaagatcatgccactggcactccagccttgagtgacagagcgaggctctgtatcaaaaaaaaaagttgcgggggggtgctcaatcttaactgcagaggatctacagatgaaaaaaaatgtggggaaatgctttaaaaaaatagcaaaatgtgcaacttcttacaaaaattgttaacgttaggtacttctatatattttatatgaccataatgtccgtgtgtgttttgtaccttcagtcccttgttattgttccgtatattacctgtaagcagatactgtattttattttagcctatttgacagaacacatcactcagaaaaagtgaagtttcagagcaaacagtgaagaaatcagtgtgattgtagacaaaaagtcggttcacagaacggagcagcggggagaggaagggaaaagcttcatagtttggtgcttatcacatcaagagattggtaaatttctgaggaaagacaggctaatggggcactgaaatggaacaactcctttaaacgtgcagccttttgaatttttcctcaaaaccaagaagttgacctctgagctgtcaggtgaccactgtgtgcaaaggggatggattctcttgtcagtagacggtcttctccatgaagcgagagtaggaagtgtactggaatggccaagtgggactgcttcagctgaccaggttcttttaaaccgtagtcatgctttcccactaactcttaaatccttatgcttagaaaattgaggataaggctgggcacagtggctcaggcctgtaatcccagcactttgggagaccaaggcgggtggatcacaaggtcaggagatcgagaccatcctggctaacatggcgaaaccccgtctctactaaaaatacaaaaaaatagctgggcgtggtggcgggcgcctgtagtcccagctactcaggaggctgaggcaggaggatcacttgaacatgggaggcggaggttgcagtgagccaagatggcgccactgcactccagcctgggtgatggcgtgagactccatgtcaaaaaaaaaaacaaaggttggggggaggataggactggccaggcacggtggctcactcctgtaatctcagcactttgggaggcagaggtgggcggatcacttgaggtcaggagtttgagaccagcctggccaacgtggtgaaagcctgtctctactaaaaatacaaaaattagccgggcgtggtggtgggcgcctgtagtcccagctactcaggaggctgaggcaggagaatcacctaaatctgggaggcagaggttgcagtgagccgagattgcaccactgcactccagcctgggtaacagagactctgtctcaaaaaaagaaaaaaagaaagaaagaaagaaagaaaattggggataggagaacagcaaggtgggcatttcccggaattgtgtgcagatgcatccagtcgtggcattgcaagaagtctgtctgatgaagctcgggaagcattttgcaatattccctttggctgtgttcctgtgttccctgctcccacttttcttcccctggtttgtgattattaggagagaggttttgcaaagactcgttgctgtgaaagaatctttttttaatttttatcctagagtcagtcacttttattccaggtagtcatgctgatctgcttatccaaagccagctaaccaggttcatcctaccatcctcatggaagactgtgtgtatgaattggagtaacagaactgaaatacacttaaacagtgacagcagtacttcccagggtgggggccatatttctctgtgtcctactctgagcaacttctcagagatacgagggggctagggttttcccatctgggaaatggggtgaaagtctgcagattgttaaatgaaatatagaatcagagaaaaagaaaagtcagtgatataaatagatcatttcatagaaattagggtagatttttatttcaactactactggagaatttaataaaaggcattatttgaaaagtttttctaacatagatttagggtttttttttttagagtggacacactacatttaaaagcaattattttgctattcagattttttattatctgaaaatgaaattatctgttttacttttcaaagctttgtgaaacaaacttgaagttatagggaggtaagccatctccaactctgcaggtcaaacgaaagtttgggaaatacttttgacatcccacaatacagaatgtcttaacatgagaattgaatttcatgatgtgtggttccatttaatagcggacaccaccccaatctcatgttttcctgttaccctaaaacagtggaaggaaactgggtgtttggtagacttctaaatcatggtctctgacaatttgaatctgagattctcacctccatttactaaagaatcgtgacttaattcaaattgcacagtaatcagtaaagtgaatacgtttttaaaatggaattttctcccttcagcaagcactcattaaggagtgaggctgagtattttaagatagagtgagatctgtgagtgattgaaaggtgatatttaaaaacttggatttcattccagtgtcaggtttgggttttaagttcctttggtccagggaagggtccaagcagccacagttgccctaaatctccatcattaagtcttccagcaaggttaagtgcagtatggaaggagaagggggaagaggacggtaacggccccacactccaggctgagaaagagtaattaggaggcctgaggaggggccgaggaaaggctgttggggtgtgctggggttggtacccgagcgccttcccctcacctcaaccagagaagagcatccggttgctttttaaagcttttagcctgccctagcaaggacaaagcatgttagattagagatgcttctgctgatcgcaggggttcttatttgaaaacatctatgatgggggtggggtgggaggagacaggttgtggttatgcaggaaaatcttgtcctaaaaatatatgagtttgggggtaaggggtgggatagccaagcaaaatcagtaattattttaaaatgaacatatgtatttttattaacttttagttaaatacagattttacaacgaggtcagcataagcctaaatctatatagagggctaactcaggcattgtcttgtttatttgtagactggattaaaaacaacctgtcctgttttgtcagttcccagcttcttcgtttagaataaattagaccaaaagaagaaacgtgcttgtctctgtatacccgcagaatgaagttactgttgttaaaactggattttttcattttactaggttccgaagagtccagatgcttggtagatgttcaatacgtgattttttttttaattgaatgtgttcatttaaaatcctccttaacatttctagaaagacttctttcaataaataatggaatcttagaggaaaagtggttttttaaaagctagggaactcctccactaaaagtaaccattggaaacctcgaatgagggctaaagttttaatcataagagaaaaggcagcataatgaaatgtgtacacatacatagtcagtggtccattttaggaagccagtggcgtctgataaagaaatgttaagagtagtgaggttgaggaaggaaattgtggggatttgaaatattctctttatgttgtttctcttctgagtcatggtaaaacaataaattatcatctcta

SEQ ID NO: 71965 - DNA, 5324 bp, Homo sapiens
tggcagtacagtgagactgtgttcaaaaaaacaaattacaagtatatcttacatagaagatgagatctacattatggatttctgccttgtgagagggcctaggaatgcacggtggttaaaaaaaacaaaaatctgctggctgggcgcggcggctcacgtctgtcatcccagcactttgggaggccgaggtcggctgatcacctgaggtcaggaattcaaaaacagccgggccaccacagcaaaaccctgtctctactacaaatacatggaggcggttgcctgggaggcagttctgctccgttcccatggattacaatttaggtgcctctgtcgggggaatatctctttcctagcagagatgaccaggcgaactgatcatccgtctaatcccaacccattgtcccggtaccacattcccgaaactaccaagcatccttctgttggctttctgtcttcttccatcctgtgtgattagtgtgattccaatacactgctttgtgtaattccacgaacttgcacctggactgtccttgtgatgaggattcccagcttccaaacttaatggtgattttctatgaagagctctgggtcctggatgtgtagtaagaacgaggaagttcaagaggcatcagccagataagacaaggtgacactgttggcagacatttccatttgtctctgctggatcttaacccctcaggacagtgctgcaaagaagccctcacgtggtgaaaacaggaatgagaacgaggagtcaacctcaaaggctgaaacctcggaagattcagcatcacgcggggagacaacaggaagatcccagaaagagtttggagagaaacgtgaccaggagggcaaaacaggagaaagacagcagaaaaaccctgaggagaaaaccaggaaagagaaaagagattcagggccagctataggaaaggacaaaaaaaccatcacaggagagagaggtccaagggagaaggggaaaggattgggaagaagcttcagtctgagctccaacttcaccacccctgaagaagttcccacgggaacaaagtctcacagatgtgatgaatgtggtaaatgcttcacgagaagttcaagccttatccgccataaaataatccacactggagaaaagccctatgaatgtagtgagtgtgggaaagccttcagtcttaactccaaccttgtcctgcatcagaggatccacacaggagagaaacctcatgaatgtaacgagtgtggcaaggccttcagccacagttccaatctcatcctccatcagcgcatccactctggagagaaaccttatgaatgtaatgagtgcgggaaggccttcagccagagctcggacctcaccaagcatcagagaattcacacgggggagaaaccctatgaatgtagtgaatgtggaaaagctttcaaccgaaactcatacctgattttgcatcggagaattcacactcgagaaaagccctacaagtgcactaagtgtggcaaggccttcacccgcagctccaccctcactctgcatcacagaatccatgccagagagagagcctgctgaggcaggagaatggcttgaacctgcgaggcggaggttgcagtgagctaagatcatgccactggcactccagccttgagtgacagagcgaggctctgtatcaaaaaaaaaagttgcgggggggtgctcaatcttaactgcagaggatctacagatgaaaaaaaatgtggggaaatgctttaaaaaaatagcaaaatgtgcaacttcttacaaaaattgttaacgttaggtacttctatatattttatatgaccataatgtccgtgtgtgttttgtaccttcagtcccttgttattgttccgtatattacctgtaagcagatactgtattttattttagcctatttgacagaacacatcactcagaaaaagtgaagtttcagagcaaacagtgaagaaatcagtgtgattgtagacaaaaagtcggttcacagaacggagcagcggggagaggaagggaaaagcttcatagtttggtgcttatcacatcaagagattggtaaatttctgaggaaagacaggctaatggggcactgaaatggaacaactcctttaaacgtgcagccttttgaatttttcctcaaaaccaagaagttgacctctgagctgtcaggtgaccactgtgtgcaaaggggatggattctcttgtcagtagacggtcttctccatgaagcgagagtaggaagtgtactggaatggccaagtgggactgcttcagctgaccaggttcttttaaaccgtagtcatgctttcccactaactcttaaatccttatgcttagaaaattgaggataaggctgggcacagtggctcaggcctgtaatcccagcactttgggagaccaaggcgggtggatcacaaggtcaggagatcgagaccatcctggctaacatggcgaaaccccgtctctactaaaaatacaaaaaaatagctgggcgtggtggcgggcgcctgtagtcccagctactcaggaggctgaggcaggaggatcacttgaacatgggaggcggaggttgcagtgagccaagatggcgccactgcactccagcctgggtgatggcgtgagactccatgtcaaaaaaaaaaacaaaggttggggggaggataggactggccaggcacggtggctcactcctgtaatctcagcactttgggaggcagaggtgggcggatcacttgaggtcaggagtttgagaccagcctggccaacgtggtgaaagcctgtctctactaaaaatacaaaaattagccgggcgtggtggtgggcgcctgtagtcccagctactcaggaggctgaggcaggagaatcacctaaatctgggaggcagaggttgcagtgagccgagattgcaccactgcactccagcctgggtaacagagactctgtctcaaaaaaagaaaaaaagaaagaaagaaagaaagaaaattggggataggagaacagcaaggtgggcatttcccggaattgtgtgcagatgcatccagtcgtggcattgcaagaagtctgtctgatgaagctcgggaagcattttgcaatattccctttggctgtgttcctgtgttccctgctcccacttttcttcccctggtttgtgattattaggagagaggttttgcaaagactcgttgctgtgaaagaatctttttttaatttttatcctagagtcagtcacttttattccaggtagtcatgctgatctgcttatccaaagccagctaaccaggttcatcctaccatcctcatggaagactgtgtgtatgaattggagtaacagaactgaaatacacttaaacagtgacagcagtacttcccagggtgggggccatatttctctgtgtcctactctgagcaacttctcagagatacgagggggctagggttttcccatctgggaaatggggtgaaagtctgcagattgttaaatgaaatatagaatcagagaaaaagaaaagtcagtgatataaatagatcatttcatagaaattagggtagatttttatttcaactactactggagaatttaataaaaggcattatttgaaaagtttttctaacatagatttagggtttttttttttagagtggacacactacatttaaaagcaattattttgctattcagattttttattatctgaaaatgaaattatctgttttacttttcaaagctttgtgaaacaaacttgaagttatagggaggtaagccatctccaactctgcaggtcaaacgaaagtttgggaaatacttttgacatcccacaatacagaatgtcttaacatgagaattgaatttcatgatgtgtggttccatttaatagcggacaccaccccaatctcatgttttcctgttaccctaaaacagtggaaggaaactgggtgtttggtagacttctaaatcatggtctctgacaatttgaatctgagattctcacctccatttactaaagaatcgtgacttaattcaaattgcacagtaatcagtaaagtgaatacgtttttaaaatggaattttctcccttcagcaagcactcattaaggagtgaggctgagtattttaagatagagtgagatctgtgagtgattgaaaggtgatatttaaaaacttggatttcattccagtgtcaggtttgggttttaagttcctttggtccagggaagggtccaagcagccacagttgccctaaatctccatcattaagtcttccagcaaggttaagtgcagtatggaaggagaagggggaagaggacggtaacggccccacactccaggctgagaaagagtaattaggaggcctgaggaggggccgaggaaaggctgttggggtgtgctggggttggtacccgagcgccttcccctcacctcaaccagagaagagcatccggttgctttttaaagcttttagcctgccctagcaaggacaaagcatgttagattagagatgcttctgctgatcgcaggggttcttatttgaaaacatctatgatgggggtggggtgggaggagacaggttgtggttatgcaggaaaatcttgtcctaaaaatatatgagtttgggggtaaggggtgggatagccaagcaaaatcagtaattattttaaaatgaacatatgtatttttattaacttttagttaaatacagattttacaacgaggtcagcataagcctaaatctatatagagggctaactcaggcattgtcttgtttatttgtagactggattaaaaacaacctgtcctgttttgtcagttcccagcttcttcgtttagaataaattagaccaaaagaagaaacgtgcttgtctctgtatacccgcagaatgaagttactgttgttaaaactggattttttcattttactaggttccgaagagtccagatgcttggtagatgttcaatacgtgattttttttttaattgaatgtgttcatttaaaatcctccttaacatttctagaaagacttctttcaataaataatggaatcttagaggaaaagtggttttttaaaagctagggaactcctccactaaaagtaaccattggaaacctcgaatgagggctaaagttttaatcataagagaaaaggcagcataatgaaatgtgtacacatacatagtcagtggtccattttaggaagccagtggcgtctgataaagaaatgttaagagtagtgaggttgaggaaggaaattgtggggatttgaaatattctctttatgttgtttctcttctgagtcatggtaaaacaataaattatcatctcta

SEQ ID NO: 71966 - DNA, 4099 bp, Homo sapiens
  misc_feature (12)..(12): n is a, c, g, or t
  misc_feature (23)..(23): n is a, c, g, or t
tacggctaggtncgaggctgggngttgatgaatattatatgtgaggaaaactttcatgtatagcactcattgcttcagacagaaaatgaattccgtcggtatgttccaatcgtgatgaatttgagaaacattgcaagagggagctcaatcttggccgggcgcagtggctcacgcctgtaatcgcagcactttgggaggccgaggcaggcggatcacgaggtcagtagttcgagaccagcctggccaacatggtgaaaccttgtctctactaaaaatacaaaaaaaaattagctgggcacagtggcgcacgcctgtagtcccagctactcgggaggctgaggcaggagaatggcttgaacctgcgaggcggaggttgcagtgagctaagatcatgccactggcactccagccttgagtgacagagcgaggctctgtatcaaaaaaaaaagttgcgggggggtgctcaatcttaactgcagaggatctacagatgaaaaaaaatgtggggaaatgctttaaaaaaatagcaaaatgtgcaacttcttacaaaaattgttaacgttaggtacttctatatattttatatgaccataatgtccgtgtgtgttttgtaccttcagtcccttgttattgttccgtatattacctgtaagcagatactgtattttattttagcctatttgacagaacacatcactcagaaaaagtgaagtttcagagcaaacagtgaagaaatcagtgtgattgtagacaaaaagtcggttcacagaacggagcagcggggagaggaagggaaaagcttcatagtttggtgcttatcacatcaagagattggtaaatttctgaggaaagacaggctaatggggcactgaaatggaacaactcctttaaacgtgcagccttttgaatttttcctcaaaaccaagaagttgacctctgagctgtcaggtgaccactgtgtgcaaaggggatggattctcttgtcagtagacggtcttctccatgaagcgagagtaggaagtgtactggaatggccaagtgggactgcttcagctgaccaggttcttttaaaccgtagtcatgctttcccactaactcttaaatccttatgcttagaaaattgaggataaggctgggcacagtggctcaggcctgtaatcccagcactttgggagaccaaggcgggtggatcacaaggtcaggagatcgagaccatcctggctaacatggcgaaaccccgtctctactaaaaatacaaaaaaatagctgggcgtggtggcgggcgcctgtagtcccagctactcaggaggctgaggcaggaggatcacttgaacatgggaggcggaggttgcagtgagccaagatggcgccactgcactccagcctgggtgatggcgtgagactccatgtcaaaaaaaaaaacaaaggttggggggaggataggactggccaggcacggtggctcactcctgtaatctcagcactttgggaggcagaggtgggcggatcacttgaggtcaggagtttgagaccagcctggccaacgtggtgaaagcctgtctctactaaaaatacaaaaattagccgggcgtggtggtgggcgcctgtagtcccagctactcaggaggctgaggcaggagaatcacctaaatctgggaggcagaggttgcagtgagccgagattgcaccactgcactccagcctgggtaacagagactctgtctcaaaaaaagaaaaaaagaaagaaagaaagaaagaaaattggggataggagaacagcaaggtgggcatttcccggaattgtgtgcagatgcatccagtcgtggcattgcaagaagtctgtctgatgaagctcgggaagcattttgcaatattccctttggctgtgttcctgtgttccctgctcccacttttcttcccctggtttgtgattattaggagagaggttttgcaaagactcgttgctgtgaaagaatctttttttaatttttatcctagagtcagtcacttttattccaggtagtcatgctgatctgcttatccaaagccagctaaccaggttcatcctaccatcctcatggaagactgtgtgtatgaattggagtaacagaactgaaatacacttaaacagtgacagcagtacttcccagggtgggggccatatttctctgtgtcctactctgagcaacttctcagagatacgagggggctagggttttcccatctgggaaatggggtgaaagtctgcagattgttaaatgaaatatagaatcagagaaaaagaaaagtcagtgatataaatagatcatttcatagaaattagggtagatttttatttcaactactactggagaatttaataaaaggcattatttgaaaagtttttctaacatagatttagggtttttttttttagagtggacacactacatttaaaagcaattattttgctattcagattttttattatctgaaaatgaaattatctgttttacttttcaaagctttgtgaaacaaacttgaagttatagggaggtaagccatctccaactctgcaggtcaaacgaaagtttgggaaatacttttgacatcccacaatacagaatgtcttaacatgagaattgaatttcatgatgtgtggttccatttaatagcggacaccaccccaatctcatgttttcctgttaccctaaaacagtggaaggaaactgggtgtttggtagacttctaaatcatggtctctgacaatttgaatctgagattctcacctccatttactaaagaatcgtgacttaattcaaattgcacagtaatcagtaaagtgaatacgtttttaaaatggaattttctcccttcagcaagcactcattaaggagtgaggctgagtattttaagatagagtgagatctgtgagtgattgaaaggtgatatttaaaaacttggatttcattccagtgtcaggtttgggttttaagttcctttggtccagggaagggtccaagcagccacagttgccctaaatctccatcattaagtcttccagcaaggttaagtgcagtatggaaggagaagggggaagaggacggtaacggccccacactccaggctgagaaagagtaattaggaggcctgaggaggggccgaggaaaggctgttggggtgtgctggggttggtacccgagcgccttcccctcacctcaaccagagaagagcatccggttgctttttaaagcttttagcctgccctagcaaggacaaagcatgttagattagagatgcttctgctgatcgcaggggttcttatttgaaaacatctatgatgggggtggggtgggaggagacaggttgtggttatgcaggaaaatcttgtcctaaaaatatatgagtttgggggtaaggggtgggatagccaagcaaaatcagtaattattttaaaatgaacatatgtatttttattaacttttagttaaatacagattttacaacgaggtcagcataagcctaaatctatatagagggctaactcaggcattgtcttgtttatttgtagactggattaaaaacaacctgtcctgttttgtcagttcccagcttcttcgtttagaataaattagaccaaaagaagaaacgtgcttgtctctgtatacccgcagaatgaagttactgttgttaaaactggattttttcattttactaggttccgaagagtccagatgcttggtagatgttcaatacgtgattttttttttaattgaatgtgttcatttaaaatcctccttaacatttctagaaagacttctttcaataaataatggaatcttagaggaaaagtggttttttaaaagctagggaactcctccactaaaagtaaccattggaaacctcgaatgagggctaaagttttaatcataagagaaaaggcagcataatgaaatgtgtacacatacatagtcagtggtccattttaggaagccagtggcgtctgataaagaaatgttaagagtagtgaggttgaggaaggaaattgtggggatttgaaatattctctttatgttgtttctcttctgagtcatggtaaaacaataaattatcatctcta

SEQ ID NO: 71967 - DNA, 4107 bp, Homo sapiens
aaagggaaaaacggccataggacgagcgcgtgttgatgaatattatatgtgaggaaaactttcatgtatagcactcattgcttcagacagaaaatgaattccgtcggtatgttccaatcgtgatgaatttgagaaacattgcaagagggagctcaatcttggccgggcgcagtggctcacgcctgtaatcgcagcactttgggaggccgaggcaggcggatcacgaggtcagtagttcgagaccagcctggccaacatggtgaaaccttgtctctactaaaaatacaaaaaaaaattagctgggcacagtggcgcacgcctgtagtcccagctactcgggaggctgaggcaggagaatggcttgaacctgcgaggcggaggttgcagtgagctaagatcatgccactggcactccagccttgagtgacagagcgaggctctgtatcaaaaaaaaaagttgcgggggggtgctcaatcttaactgcagaggatctacagatgaaaaaaaatgtggggaaatgctttaaaaaaatagcaaaatgtgcaacttcttacaaaaattgttaacgttaggtacttctatatattttatatgaccataatgtccgtgtgtgttttgtaccttcagtcccttgttattgttccgtatattacctgtaagcagatactgtattttattttagcctatttgacagaacacatcactcagaaaaagtgaagtttcagagcaaacagtgaagaaatcagtgtgattgtagacaaaaagtcggttcacagaacggagcagcggggagaggaagggaaaagcttcatagtttggtgcttatcacatcaagagattggtaaatttctgaggaaagacaggctaatggggcactgaaatggaacaactcctttaaacgtgcagccttttgaatttttcctcaaaaccaagaagttgacctctgagctgtcaggtgaccactgtgtgcaaaggggatggattctcttgtcagtagacggtcttctccatgaagcgagagtaggaagtgtactggaatggccaagtgggactgcttcagctgaccaggttcttttaaaccgtagtcatgctttcccactaactcttaaatccttatgcttagaaaattgaggataaggctgggcacagtggctcaggcctgtaatcccagcactttgggagaccaaggcgggtggatcacaaggtcaggagatcgagaccatcctggctaacatggcgaaaccccgtctctactaaaaatacaaaaaaatagctgggcgtggtggcgggcgcctgtagtcccagctactcaggaggctgaggcaggaggatcacttgaacatgggaggcggaggttgcagtgagccaagatggcgccactgcactccagcctgggtgatggcgtgagactccatgtcaaaaaaaaaaacaaaggttggggggaggataggactggccaggcacggtggctcactcctgtaatctcagcactttgggaggcagaggtgggcggatcacttgaggtcaggagtttgagaccagcctggccaacgtggtgaaagcctgtctctactaaaaatacaaaaattagccgggcgtggtggtgggcgcctgtagtcccagctactcaggaggctgaggcaggagaatcacctaaatctgggaggcagaggttgcagtgagccgagattgcaccactgcactccagcctgggtaacagagactctgtctcaaaaaaagaaaaaaagaaagaaagaaagaaagaaaattggggataggagaacagcaaggtgggcatttcccggaattgtgtgcagatgcatccagtcgtggcattgcaagaagtctgtctgatgaagctcgggaagcattttgcaatattccctttggctgtgttcctgtgttccctgctcccacttttcttcccctggtttgtgattattaggagagaggttttgcaaagactcgttgctgtgaaagaatctttttttaatttttatcctagagtcagtcacttttattccaggtagtcatgctgatctgcttatccaaagccagctaaccaggttcatcctaccatcctcatggaagactgtgtgtatgaattggagtaacagaactgaaatacacttaaacagtgacagcagtacttcccagggtgggggccatatttctctgtgtcctactctgagcaacttctcagagatacgagggggctagggttttcccatctgggaaatggggtgaaagtctgcagattgttaaatgaaatatagaatcagagaaaaagaaaagtcagtgatataaatagatcatttcatagaaattagggtagatttttatttcaactactactggagaatttaataaaaggcattatttgaaaagtttttctaacatagatttagggtttttttttttagagtggacacactacatttaaaagcaattattttgctattcagattttttattatctgaaaatgaaattatctgttttacttttcaaagctttgtgaaacaaacttgaagttatagggaggtaagccatctccaactctgcaggtcaaacgaaagtttgggaaatacttttgacatcccacaatacagaatgtcttaacatgagaattgaatttcatgatgtgtggttccatttaatagcggacaccaccccaatctcatgttttcctgttaccctaaaacagtggaaggaaactgggtgtttggtagacttctaaatcatggtctctgacaatttgaatctgagattctcacctccatttactaaagaatcgtgacttaattcaaattgcacagtaatcagtaaagtgaatacgtttttaaaatggaattttctcccttcagcaagcactcattaaggagtgaggctgagtattttaagatagagtgagatctgtgagtgattgaaaggtgatatttaaaaacttggatttcattccagtgtcaggtttgggttttaagttcctttggtccagggaagggtccaagcagccacagttgccctaaatctccatcattaagtcttccagcaaggttaagtgcagtatggaaggagaagggggaagaggacggtaacggccccacactccaggctgagaaagagtaattaggaggcctgaggaggggccgaggaaaggctgttggggtgtgctggggttggtacccgagcgccttcccctcacctcaaccagagaagagcatccggttgctttttaaagcttttagcctgccctagcaaggacaaagcatgttagattagagatgcttctgctgatcgcaggggttcttatttgaaaacatctatgatgggggtggggtgggaggagacaggttgtggttatgcaggaaaatcttgtcctaaaaatatatgagtttgggggtaaggggtgggatagccaagcaaaatcagtaattattttaaaatgaacatatgtatttttattaacttttagttaaatacagattttacaacgaggtcagcataagcctaaatctatatagagggctaactcaggcattgtcttgtttatttgtagactggattaaaaacaacctgtcctgttttgtcagttcccagcttcttcgtttagaataaattagaccaaaagaagaaacgtgcttgtctctgtatacccgcagaatgaagttactgttgttaaaactggattttttcattttactaggttccgaagagtccagatgcttggtagatgttcaatacgtgattttttttttaattgaatgtgttcatttaaaatcctccttaacatttctagaaagacttctttcaataaataatggaatcttagaggaaaagtggttttttaaaagctagggaactcctccactaaaagtaaccattggaaacctcgaatgagggctaaagttttaatcataagagaaaaggcagcataatgaaatgtgtacacatacatagtcagtggtccattttaggaagccagtggcgtctgataaagaaatgttaagagtagtgaggttgaggaaggaaattgtggggatttgaaatattctctttatgttgtttctcttctgagtcatggtaaaacaataaattatcatctcta

SEQ ID NO: 71968 - DNA, 3661 bp, Homo sapiens
tctagagtatccccggtcatcttgctacaccattactgcagaggatctacagatgaaaaaaaatgtggggaaatgctttaaaaaaatagcaaaatgtgcaacttcttacaaaaattgttaacgttaggtacttctatatattttatatgaccataatgtccgtgtgtgttttgtaccttcagtcccttgttattgttccgtatattacctgtaagcagatactgtattttattttagcctatttgacagaacacatcactcagaaaaagtgaagtttcagagcaaacagtgaagaaatcagtgtgattgtagacaaaaagtcggttcacagaacggagcagcggggagaggaagggaaaagcttcatagtttggtgcttatcacatcaagagattggtaaatttctgaggaaagacaggctaatggggcactgaaatggaacaactcctttaaacgtgcagccttttgaatttttcctcaaaaccaagaagttgacctctgagctgtcaggtgaccactgtgtgcaaaggggatggattctcttgtcagtagacggtcttctccatgaagcgagagtaggaagtgtactggaatggccaagtgggactgcttcagctgaccaggttcttttaaaccgtagtcatgctttcccactaactcttaaatccttatgcttagaaaattgaggataaggctgggcacagtggctcaggcctgtaatcccagcactttgggagaccaaggcgggtggatcacaaggtcaggagatcgagaccatcctggctaacatggcgaaaccccgtctctactaaaaatacaaaaaaatagctgggcgtggtggcgggcgcctgtagtcccagctactcaggaggctgaggcaggaggatcacttgaacatgggaggcggaggttgcagtgagccaagatggcgccactgcactccagcctgggtgatggcgtgagactccatgtcaaaaaaaaaaacaaaggttggggggaggataggactggccaggcacggtggctcactcctgtaatctcagcactttgggaggcagaggtgggcggatcacttgaggtcaggagtttgagaccagcctggccaacgtggtgaaagcctgtctctactaaaaatacaaaaattagccgggcgtggtggtgggcgcctgtagtcccagctactcaggaggctgaggcaggagaatcacctaaatctgggaggcagaggttgcagtgagccgagattgcaccactgcactccagcctgggtaacagagactctgtctcaaaaaaagaaaaaaagaaagaaagaaagaaagaaaattggggataggagaacagcaaggtgggcatttcccggaattgtgtgcagatgcatccagtcgtggcattgcaagaagtctgtctgatgaagctcgggaagcattttgcaatattccctttggctgtgttcctgtgttccctgctcccacttttcttcccctggtttgtgattattaggagagaggttttgcaaagactcgttgctgtgaaagaatctttttttaatttttatcctagagtcagtcacttttattccaggtagtcatgctgatctgcttatccaaagccagctaaccaggttcatcctaccatcctcatggaagactgtgtgtatgaattggagtaacagaactgaaatacacttaaacagtgacagcagtacttcccagggtgggggccatatttctctgtgtcctactctgagcaacttctcagagatacgagggggctagggttttcccatctgggaaatggggtgaaagtctgcagattgttaaatgaaatatagaatcagagaaaaagaaaagtcagtgatataaatagatcatttcatagaaattagggtagatttttatttcaactactactggagaatttaataaaaggcattatttgaaaagtttttctaacatagatttagggtttttttttttagagtggacacactacatttaaaagcaattattttgctattcagattttttattatctgaaaatgaaattatctgttttacttttcaaagctttgtgaaacaaacttgaagttatagggaggtaagccatctccaactctgcaggtcaaacgaaagtttgggaaatacttttgacatcccacaatacagaatgtcttaacatgagaattgaatttcatgatgtgtggttccatttaatagcggacaccaccccaatctcatgttttcctgttaccctaaaacagtggaaggaaactgggtgtttggtagacttctaaatcatggtctctgacaatttgaatctgagattctcacctccatttactaaagaatcgtgacttaattcaaattgcacagtaatcagtaaagtgaatacgtttttaaaatggaattttctcccttcagcaagcactcattaaggagtgaggctgagtattttaagatagagtgagatctgtgagtgattgaaaggtgatatttaaaaacttggatttcattccagtgtcaggtttgggttttaagttcctttggtccagggaagggtccaagcagccacagttgccctaaatctccatcattaagtcttccagcaaggttaagtgcagtatggaaggagaagggggaagaggacggtaacggccccacactccaggctgagaaagagtaattaggaggcctgaggaggggccgaggaaaggctgttggggtgtgctggggttggtacccgagcgccttcccctcacctcaaccagagaagagcatccggttgctttttaaagcttttagcctgccctagcaaggacaaagcatgttagattagagatgcttctgctgatcgcaggggttcttatttgaaaacatctatgatgggggtggggtgggaggagacaggttgtggttatgcaggaaaatcttgtcctaaaaatatatgagtttgggggtaaggggtgggatagccaagcaaaatcagtaattattttaaaatgaacatatgtatttttattaacttttagttaaatacagattttacaacgaggtcagcataagcctaaatctatatagagggctaactcaggcattgtcttgtttatttgtagactggattaaaaacaacctgtcctgttttgtcagttcccagcttcttcgtttagaataaattagaccaaaagaagaaacgtgcttgtctctgtatacccgcagaatgaagttactgttgttaaaactggattttttcattttactaggttccgaagagtccagatgcttggtagatgttcaatacgtgattttttttttaattgaatgtgttcatttaaaatcctccttaacatttctagaaagacttctttcaataaataatggaatcttagaggaaaagtggttttttaaaagctagggaactcctccactaaaagtaaccattggaaacctcgaatgagggctaaagttttaatcataagagaaaaggcagcataatgaaatgtgtacacatacatagtcagtggtccattttaggaagccagtggcgtctgataaagaaatgttaagagtagtgaggttgaggaaggaaattgtggggatttgaaatattctctttatgttgtttctcttctgagtcatggtaaaacaataaattatcatctcta

SEQ ID NO: 71969 - DNA, 3292 bp, Homo sapiens
taccccaccaacccacaaggctagcagccgggtgcatgaacgagggtcaaaaacgcttgcaacatctaattggcgttcaagatagtcattcaaaagttcttggcccgctgaagtctgttaacagttgaaacattctacagttaaccattagcatgctagttgtcctaatggaaatttttgaagagtttttcaatatataccctacccttgccaggaagagaagtaaaatcctcaggttgtggggtatttgtttctactccagcctggcaggcaaggctaaaacctgagattatcgatctatgagacatcttgatatgtaaagcacttaatattaaaggcataaaagtgaaactgctaaatatgtatagagaggttgacgtgtgatacgtgggacagttcacatagacatcagagaatttattccagaaaggagcctcctgaatgtgatgaatacggcaaagcctttaatcacatctcagcccttagcatcggaaagcttatactgtaaataaacttgatgaatattatatgtgaggaaaactttcatgtatagcactcattgcttcagacagaaaatgaattccgtcggtatgttccaatcgtgatgaatttgagaaacattgcaagagggagctcaatcttggccgggcgcagtggctcacgcctgtaatcgcagcactttgggaggccgaggcaggcggatcacgaggtcaggagtttgagaccagcctggccaacgtggtgaaagcctgtctctactaaaaatacaaaaattagccgggcgtggtggtgggcgcctgtagtcccagctactcaggaggctgaggcaggagaatcacctaaatctgggaggcagaggttgcagtgagccgagattgcaccactgcactccagcctgggtaacagagactctgtctcaaaaaaagaaaaaaagaaagaaagaaagaaagaaaattggggataggagaacagcaaggtgggcatttcccggaattgtgtgcagatgcatccagtcgtggcattgcaagaagtctgtctgatgaagctcgggaagcattttgcaatattccctttggctgtgttcctgtgttccctgctcccacttttcttcccctggtttgtgattattaggagagaggttttgcaaagactcgttgctgtgaaagaatctttttttaatttttatcctagagtcagtcacttttattccaggtagtcatgctgatctgcttatccaaagccagctaaccaggttcatcctaccatcctcatggaagactgtgtgtatgaattggagtaacagaactgaaatacacttaaacagtgacagcagtacttcccagggtgggggccatatttctctgtgtcctactctgagcaacttctcagagatacgagggggctagggttttcccatctgggaaatggggtgaaagtctgcagattgttaaatgaaatatagaatcagagaaaaagaaaagtcagtgatataaatagatcatttcatagaaattagggtagatttttatttcaactactactggagaatttaataaaaggcattatttgaaaagtttttctaacatagatttagggtttttttttttagagtggacacactacatttaaaagcaattattttgctattcagattttttattatctgaaaatgaaattatctgttttacttttcaaagctttgtgaaacaaacttgaagttatagggaggtaagccatctccaactctgcaggtcaaacgaaagtttgggaaatacttttgacatcccacaatacagaatgtcttaacatgagaattgaatttcatgatgtgtggttccatttaatagcggacaccaccccaatctcatgttttcctgttaccctaaaacagtggaaggaaactgggtgtttggtagacttctaaatcatggtctctgacaatttgaatctgagattctcacctccatttactaaagaatcgtgacttaattcaaattgcacagtaatcagtaaagtgaatacgtttttaaaatggaattttctcccttcagcaagcactcattaaggagtgaggctgagtattttaagatagagtgagatctgtgagtgattgaaaggtgatatttaaaaacttggatttcattccagtgtcaggtttgggttttaagttcctttggtccagggaagggtccaagcagccacagttgccctaaatctccatcattaagtcttccagcaaggttaagtgcagtatggaaggagaagggggaagaggacggtaacggccccacactccaggctgagaaagagtaattaggaggcctgaggaggggccgaggaaaggctgttggggtgtgctggggttggtacccgagcgccttcccctcacctcaaccagagaagagcatccggttgctttttaaagcttttagcctgccctagcaaggacaaagcatgttagattagagatgcttctgctgatcgcaggggttcttatttgaaaacatctatgatgggggtggggtgggaggagacaggttgtggttatgcaggaaaatcttgtcctaaaaatatatgagtttgggggtaaggggtgggatagccaagcaaaatcagtaattattttaaaatgaacatatgtatttttattaacttttagttaaatacagattttacaacgaggtcagcataagcctaaatctatatagagggctaactcaggcattgtcttgtttatttgtagactggattaaaaacaacctgtcctgttttgtcagttcccagcttcttcgtttagaataaattagaccaaaagaagaaacgtgcttgtctctgtatacccgcagaatgaagttactgttgttaaaactggattttttcattttactaggttccgaagagtccagatgcttggtagatgttcaatacgtgattttttttttaattgaatgtgttcatttaaaatcctccttaacatttctagaaagacttctttcaataaataatggaatcttagaggaaaagtggttttttaaaagctagggaactcctccactaaaagtaaccattggaaacctcgaatgagggctaaagttttaatcataagagaaaaggcagcataatgaaatgtgtacacatacatagtcagtggtccattttaggaagccagtggcgtctgataaagaaatgttaagagtagtgaggttgaggaaggaaattgtggggatttgaaatattctctttatgttgtttctcttctgagtcatggtaaaacaataaattatcatctcta

SEQ ID NO: 71970 - DNA, 2496 bp, Homo sapiens
cgtgtagtgcaggttatttggggggccaaggtgggaggatcagttgagcccaggaggtcgaggttgcagtgagccgagattgcaccactgcactccagcctgggtaacagagactctgtctcaaaaaaagaaaaaaagaaagaaagaaagaaagaaaattggggataggagaacagcaaggtgggcatttcccggaattgtgtgcagatgcatccagtcgtggcattgcaagaagtctgtctgatgaagctcgggaagcattttgcaatattccctttggctgtgttcctgtgttccctgctcccacttttcttcccctggtttgtgattattaggagagaggttttgcaaagactcgttgctgtgaaagaatctttttttaatttttatcctagagtcagtcacttttattccaggtagtcatgctgatctgcttatccaaagccagctaaccaggttcatcctaccatcctcatggaagactgtgtgtatgaattggagtaacagaactgaaatacacttaaacagtgacagcagtacttcccagggtgggggccatatttctctgtgtcctactctgagcaacttctcagagatacgagggggctagggttttcccatctgggaaatggggtgaaagtctgcagattgttaaatgaaatatagaatcagagaaaaagaaaagtcagtgatataaatagatcatttcatagaaattagggtagatttttatttcaactactactggagaatttaataaaaggcattatttgaaaagtttttctaacatagatttagggtttttttttttagagtggacacactacatttaaaagcaattattttgctattcagattttttattatctgaaaatgaaattatctgttttacttttcaaagctttgtgaaacaaacttgaagttatagggaggtaagccatctccaactctgcaggtcaaacgaaagtttgggaaatacttttgacatcccacaatacagaatgtcttaacatgagaattgaatttcatgatgtgtggttccatttaatagcggacaccaccccaatctcatgttttcctgttaccctaaaacagtggaaggaaactgggtgtttggtagacttctaaatcatggtctctgacaatttgaatctgagattctcacctccatttactaaagaatcgtgacttaattcaaattgcacagtaatcagtaaagtgaatacgtttttaaaatggaattttctcccttcagcaagcactcattaaggagtgaggctgagtattttaagatagagtgagatctgtgagtgattgaaaggtgatatttaaaaacttggatttcattccagtgtcaggtttgggttttaagttcctttggtccagggaagggtccaagcagccacagttgccctaaatctccatcattaagtcttccagcaaggttaagtgcagtatggaaggagaagggggaagaggacggtaacggccccacactccaggctgagaaagagtaattaggaggcctgaggaggggccgaggaaaggctgttggggtgtgctggggttggtacccgagcgccttcccctcacctcaaccagagaagagcatccggttgctttttaaagcttttagcctgccctagcaaggacaaagcatgttagattagagatgcttctgctgatcgcaggggttcttatttgaaaacatctatgatgggggtggggtgggaggagacaggttgtggttatgcaggaaaatcttgtcctaaaaatatatgagtttgggggtaaggggtgggatagccaagcaaaatcagtaattattttaaaatgaacatatgtatttttattaacttttagttaaatacagattttacaacgaggtcagcataagcctaaatctatatagagggctaactcaggcattgtcttgtttatttgtagactggattaaaaacaacctgtcctgttttgtcagttcccagcttcttcgtttagaataaattagaccaaaagaagaaacgtgcttgtctctgtatacccgcagaatgaagttactgttgttaaaactggattttttcattttactaggttccgaagagtccagatgcttggtagatgttcaatacgtgattttttttttaattgaatgtgttcatttaaaatcctccttaacatttctagaaagacttctttcaataaataatggaatcttagaggaaaagtggttttttaaaagctagggaactcctccactaaaagtaaccattggaaacctcgaatgagggctaaagttttaatcataagagaaaaggcagcataatgaaatgtgtacacatacatagtcagtggtccattttaggaagccagtggcgtctgataaagaaatgttaagagtagtgaggttgaggaaggaaattgtggggatttgaaatattctctttatgttgtttctcttctgagtcatggtaaaacaataaattatcatctcta

SEQ ID NO: 71971 - DNA, 1582 bp, Homo sapiens
ttaattctgcaaaggagaatgaagttgactgtgtggagatatttcttcttgtgtccatccctagcaacctcagatgactttaacttgaccctgggtcctgccaggtgactctgtcccccagatagttgtaaatggccgccatttacaactatcttcatgttttcctgttaccctaaaacagtggaaggaaactgggtgtttggtagacttctaaatcatggtctctgacaatttgaatctgagattctcacctccatttactaaagaatcgtgacttaattcaaattgcacagtaatcagtaaagtgaatacgtttttaaaatggaattttctcccttcagcaagcactcattaaggagtgaggctgagtattttaagatagagtgagatctgtgagtgattgaaaggtgatatttaaaaacttggatttcattccagtgtcaggtttgggttttaagttcctttggtccagggaagggtccaagcagccacagttgccctaaatctccatcattaagtcttccagcaaggttaagtgcagtatggaaggagaagggggaagaggacggtaacggccccacactccaggctgagaaagagtaattaggaggcctgaggaggggccgaggaaaggctgttggggtgtgctggggttggtacccgagcgccttcccctcacctcaaccagagaagagcatccggttgctttttaaagcttttagcctgccctagcaaggacaaagcatgttagattagagatgcttctgctgatcgcaggggttcttatttgaaaacatctatgatgggggtggggtgggaggagacaggttgtggttatgcaggaaaatcttgtcctaaaaatatatgagtttgggggtaaggggtgggatagccaagcaaaatcagtaattattttaaaatgaacatatgtatttttattaacttttagttaaatacagattttacaacgaggtcagcataagcctaaatctatatagagggctaactcaggcattgtcttgtttatttgtagactggattaaaaacaacctgtcctgttttgtcagttcccagcttcttcgtttagaataaattagaccaaaagaagaaacgtgcttgtctctgtatacccgcagaatgaagttactgttgttaaaactggattttttcattttactaggttccgaagagtccagatgcttggtagatgttcaatacgtgattttttttttaattgaatgtgttcatttaaaatcctccttaacatttctagaaagacttctttcaataaataatggaatcttagaggaaaagtggttttttaaaagctagggaactcctccactaaaagtaaccattggaaacctcgaatgagggctaaagttttaatcataagagaaaaggcagcataatgaaatgtgtacacatacatagtcagtggtccattttaggaagccagtggcgtctgataaagaaatgttaagagtagtgaggttgaggaaggaaattgtggggatttgaaatattctctttatgttgtttctcttctgagtcatggtaaaacaataaattatcatctcta

SEQ ID NO: 71972 - DNA, 829 bp, Homo sapiens
ttgagagctcagccagcgttagggctgcttagttctcatggcccagtggctggtctcacccaactgcagtttactattgctatcttttctggatgatcagtcagattttcttatcctacactcgcttgtcctgttcgcgccaagcaaaatcagtaattattttaaaatgaacatatgtatttttattaacttttagttaaatacagattttacaacgaggtcagcataagcctaaatctatatagagggctaactcaggcattgtcttgtttatttgtagactggattaaaaacaacctgtcctgttttgtcagttcccagcttcttcgtttagaataaattagaccaaaagaagaaacgtgcttgtctctgtatacccgcagaatgaagttactgttgttaaaactggattttttcattttactaggttccgaagagtccagatgcttggtagatgttcaatacgtgattttttttttaattgaatgtgttcatttaaaatcctccttaacatttctagaaagacttctttcaataaataatggaatcttagaggaaaagtggttttttaaaagctagggaactcctccactaaaagtaaccattggaaacctcgaatgagggctaaagttttaatcataagagaaaaggcagcataatgaaatgtgtacacatacatagtcagtggtccattttaggaagccagtggcgtctgataaagaaatgttaagagtagtgaggttgaggaaggaaattgtggggatttgaaatattctctttatgttgtttctcttctgagtcatggtaaaacaataaattatcatctcta

SEQ ID NO: 71973 - DNA, 187 bp, Homo sapiens
agtagtttttgctctttaaaatcagaaataattgagttccaagtcctcacctcttcagccactcagttgcctgggaggcagttctgctccgttcccatggattacaatttaggtgcctctgtcgggggaatatctctttcctagcagagatgaccaggcgaactgatcatccgtctaatcccaaccc

SEQ ID NO: 71974 - DNA, 139 bp, Homo sapiens
aaaaaggtgcgatttgaattttctatttattatgtcaggtggtgaaaacaggaatgagaacgaggagtcaacctcaaaggctgaaacctcggaagattcagcatcacgcggggagacaacaggaagatcccagaaagag

SEQ ID NO: 71975 - DNA, 375 bp, Homo sapiens
tactcacgtgagggcttctttgcagcactgtcctgaggggttaagatccagcagagacaaatggaaatgtctgccaacagtgtcaccttgtcttatctggctgatgcctcttgaacttcctcgttcttactacacatccaggacccagagctcttcatagaaaatcaccattaagtttggaagctgggaatcctcatcacaaggacagtccaggtgcaagttcgtggaattacacaaagcagtgtattggaatcacactaatcacacaggatggaagaagacagaaagccaacagaaggatgcttggtagtttcgggaatgtggtaccgggacaatgggttgggattagacggatgatcagttcgcctggtcatc

SEQ ID NO: 71976 - DNA, 1847 bp, Homo sapiens
actaattggatgtggggattaaggaaaggtaagcatcaaagattacctccaagtttgttagaaggttagtagcaggattctgatgccattcaagtaaatacaggtctcagtcagatgaaccccaggagccacatgtatttgaggggtactttgtctcacacttttacctgttacatggttttcagtaatttagaatttaagccagtagtggggcgactgtacatctatcgacatggtgaggtagagcatgtttgggaggaaagacgttgaatcccatttggtgacagtgagcttgaggtgctgccagaacactgcactgaagataggaggagactgtaggaaatacaagataggaaaggtctccactgaaatgttaactctttctctctaaacggccatccaggcctcaatgtctgcagtttctgatctgtgattatgacttatccaaatcttacatttcttaaaaatagtcatagatgaagggaatcacagttgatagttatatggtgacattagtggcttaaattctaaataactggaaactgtataataggcaaaactgtgaggcaaataaaatgcttctcaaatctgtgtggctcttatggggttaatttgatttggacctgtattaatttcttatggctgctataactaacaaattaccacaaacttggtggtttaaaacaacacacatttattctctttctgttctggaggccagaagtctaaaatgagattcactgggctgcagttcactgggcaaggccatgctcctctggaggcttccatgatgcatcccatattcagtgtttcccgagtaagccccacccatgcaggtctgcagttttacctcaacaggcttttgcactcagtggctctctcctgtggtttctatctgaaattctcttcattttttttttaataactgctttattgagatataattcacatgccacacaattcacctatacagtatacaattcagtagtgtttactatattcagagttgtgcaactatcatttttctcacccccaaaagaaaccctatgcccgttagtattcactctgttttctcacaactctaggtaaccactaatctactctccatctctatagatttgcccatgctagacatttcatataaatggaatcatacatgtggtctttttcactgagtatattttcaaggtgcatcccagctgtggcatgaatcagcatctcattcctttttattgccaaataatattctatcatatggatatgtcgcattttatgtatccattcatcagctgatggacatttgggttgtttgtactttttggctaccatgaataatgctactatgaacttttgtgtacaaatcttatgtggacttgttttcatttctcttggatgtatattcctaggagaatggctggattatacagtaactctttcctcataactttgcatatcaaaattatatccatctttcagaacccaaattcagtgttatttccaaagtgttccaacatctcccactcaaaatgaatcttctccctagtactcccattgtttagtacctaattgttcttaccagtttgtcttagagctcagtcattcctacacagcacttttcttcattatactgctaatttcattacactgtaagagtggggacaagctgttcttcttgtataccagaaagtagtgagtgcactgctgtgaagaaagcaggaactcaaaagttaagaattttgaatgagcctataaaatgtgtctaataaataataatgttcattttcaaatctcaacaattaaatgtttaacaaataacacttgaaataaatgtttattagaaaaaccaa

SEQ ID NO: 71977 - DNA, 725 bp, Homo sapiens
gggggggggttaccaaaaaaaaaaattttaaaaaaaaaaaaaaaccttgttggccggggtactcccattgtttagtacctaattgttcttaccagtttgtcttagagctcagtcattcctacacagcacttttcttcattatactgctaatttcattacactgtaagagtggggacaagctgttcttcttgtataccagaaagtagtgagtgcactgctgtgaagaaagcaggaactcaaaagttaagaattttgaatgagcctataaaatgtgtctaataaataataatgttcattttcaaatctcaacaattaaatgtttaacaaataacacttgaaataaatgtttattagaaaaaccaaaccaaaaaataaaaaatataaaaaaacaagaacatgaaaaaagaaggaaaaataactaaaaatatttacgaataataggttataaactctaatctttatggcgtcaaagtttctgtttcgtaatgaggaatatcttgtattctttattgtcacagatttttttatactttgacacgttatttgtctgggcccctaatggttgttctattggataaacttccctattttggtgtggtatataaaattggttgccttagatttactacctttctctctggtcctctgggtccttccactattattggctcgtgtatcctctttttttgaatctggtgtttttctattggtctccatcttcttct

SEQ ID NO: 71978 - DNA, 3578 bp, Homo sapiens
actaattggatgtggggattaaggaaaggtaagcatcaaagattacctccaagtttgttagaaggttagtagcaggattctgatgccattcaagtaaatacaggtctcagtcagatgaaccccaggagccacatgtatttgaggggtactttgtctcacacttttacctgttacatggttttcagtaatttagaatttaagccagtagtggggcgactgtacatctatcgacatggtgaggtagagcatgtttgggaggaaagacgttgaatcccatttggtgacagtgagcttgaggtgctgccagaacactgcactgaagataggaggagactgtaggaaatacaagataggaaaggtctccactgaaatgttaactctttctctctaaacggccatccaggcctcaatgtctgcagtttctgatctgtgattatgacttatccaaatcttacatttcttaaaaatagtcatagatgaagggaatcacagttgatagttatatggtgacattagtggcttaaattctaaataactggaaactgtataataggcaaaactgtgaggcaaataaaatgcttctcaaatctgtgtggctcttatggggttaatttgatttggacctgtattaatttcttatggctgctataactaacaaattaccacaaacttggtggtttaaaacaacacacatttattctctttctgttctggaggccagaagtctaaaatgagattcactgggctgcagttcactgggcaaggccatgctcctctggaggcttccatgatgcatcccatattcagtgtttcccgagtaagccccacccatgcaggtctgcagttttacctcaacaggcttttgcactcagtggctctctcctgtggtttctatctgaaattctcttcattttttttttaataactgctttattgagatataattcacatgccacacaattcacctatacagtatacaattcagtagtgtttactatattcagagttgtgcaactatcatttttctcacccccaaaagaaaccctatgcccgttagtattcactctgttttctcacaactctaggtaaccactaatctactctccatctctatagatttgcccatgctagacatttcatataaatggaatcatacatgtggtctttttcactgagtatattttcaaggtgcatcccagctgtggcatgaatcagcatctcattcctttttattgccaaataatattctatcatatggatatgtcgcattttatgtatccattcatcagctgatggacatttgggttgtttgtactttttggctaccatgaataatgctactatgaacttttgtgtacaaatcttatgtggacttgttttcatttctcttggatgtatattcctaggagaatggctggattatacagtaactctttcctcataactttgcatatcaaaattatatccatctttcagaacccaaattcagtgttatttccaaagtgttccaacatctcccactcaaaatgaatcttctccctagtactcccattgtttagtacctaattgttcttaccagtttgtcttagagctcagtcattcctacacagcacttttcttcattatactgctaatttcattacactgtaagagtggggacaagctgttcttcttgtataccagaaagtagtgagtgcactgctgtgaagaaagcaggaactcaaaagttaagaattttgaatgagcctataaaatgtgtctaataaataataatgttcattttcaaatctcaacaattaaatgtttaacaaataacacttgaaataaatgtttattagaaaaaccaatttggtatgttaaagtatttattttgaatttcagaaactacagaattctggatttttaattaagaaaattagacattttagaatttctagataggactttgaaaataaacatggcacaatatacacaaaagtaaatgacaacatgacattaaattttacattgttttgcagtttcaaatttcgtattaatgttctacaacaaattttaaaattcttttcagtgttttgcttcccttggtgttcattattgcctatttataaagtcataaaaggcctaaaaataacttgttactcatattgaaagtctgattttttttttattcccttaagatggaggtctctcactatgttgcccaggctggtttcaaacttctgggctcaaaggattccccatctcagccccctgagtagctgggaccaaaggcatgcaccactgcacccggctgaaagcctgtatttttatctttcgatggacaacagagggatatctcccactctctaagccggtctagttctagtactaggcctgtaaatgtagaccacaatcctggtgaagtcatgggttccatcagtgttatcctggcattctcagcataattgtcatgaacatatttaaaatattttaggccactgagcaggtgtgggttgtcctcatagtaacaggagaaagggaagccagttcctgtctaactccattccatctgaaattatccatttggctttgggatttgactgaatgttggtatgttggctgaaatgacaccacagtattgactggaattgcaagggtaaaatgtactcctctgttttattaatagctctctctctctctctctctctatatatatatatatatacatacatatatatatataatttttttttttgagacagggtcttgctctgtcacccaggctggagtgcagcagcatgatctcagctcactgcaatatctgcctcccaggttcaagcaattctcatgcctccgccttctgagtagctgggattacaggcgaatgccaccacgcccagctaatttttgtatttttagtagagatggggtttcaccatgttggccaggttggtcttgaactcctggcttcaagtgatctgcctgccttggcgtcctaaagtgctgggattacaggagtgaaccactgcgctcagccaattttataatttttttaaaaacaaaaaagtaaatattaaacaatagcatccaaacatataaatattatatatatacacatatttacattcataaaaataatgattagttttctggatgaagaactgaggcccagaagttaactagattagtggctcaaggtaggctgcattttagaatcaagggcagtgatgcccaagtcacagtgactaatggcatcagaatctcttgggatgggacccttttattactattttgtaaagctccccaagttaaacttgaaaagtgaattaggtcatattaggtcagagattaatacaaattgtactactgattatcttaccctagcaagtgtaggttaatttttacaatcttcttatgtatgctgtttctaataaaaggggttgttctcttgctcaatctaactaacaggtgagctataaaatcacacaggtgatcacaactctatccaaagaatggtggtgctccatccttaacctcagtactagttcttatcctcaggtgcttatcactcattcttgggacttcaaaataaatatata

SEQ ID NO: 71979 - DNA, 3426 bp, Homo sapiens
  misc_feature (3214)..(3214): n is a, c, g, or t
  misc_feature (3374)..(3374): n is a, c, g, or t
gacgcccacgagttcctcatcgcggccctggacgtgctccaccgacactgcaaaggtgatgacaatgggaagaaggccaacaaccccaaccactgcaactgcatcatagaccagatcttcacaggcgggttgcagtcagacgtcacctgccaagtctgccatggagtctccaccaccatcgaccccttctgggacatcagcttggatctccccggctcttccaccccattctggcccctgagcccagggagcgagggcaacgtggtaaacggggaaagccacgtgtcgggaaccaccacgctcacggactgcctgcgacgattcaccagaccagagcacttgggcagcagcgccaagatcaagtgcagcggttgccatagctaccaggagtccacaaagcagctcactatgaagaaactgcccatagtagcctgttttcatctcaaacgatttgaacactcagccaagctgcggcggaagatcaccacgtatgtgtccttccccctggagctggacatgacccctttcatggcctccagcaaagagagcaggatgaatggacagtaccagcagcccacggacagtctcaacaatgacaacaagtattccctgtttgctgttgttaaccatcaagggaccttggagagtggccactacaccagctttatccggcagcacaaagaccagtggttcaagtgtgacgatgccatcatcaccaaggccagcatcaaggacgtcctggacagcgaagggtacttgctgttctatcacaaacagttcctggaatacgagtagccttatctgcagctggtcagaaaaacaaaggcaatgcattggcaagcctcacaaagtgatcctccctggccacccccctcccccaagcctcccgccgcctccccggcctggtgacaccacctcccatgcagatgtggcccctctgcacctgggacccatcgggtcgggatggaccacacggacggggaggctcctggagctgctttgaagatggatgagatgaggggtgtgctctgggtgggaggagcagcgtacacccgtcaccagaacatctcttgtgtcatgacatgggggtgcaacgggggcctcacagcacagagtgaccgctgcctggcgttccccagcactcggtgtggaaaggcccctacctgctgtaagattatgggtccatgaaagcagtaagctggacacagaggtgtagtgtgcgggacagagggccttgcagatgcctttctgttggtgttttagtgttaaaatacggagagtatggaactcttcacctccattttctcagcggctgtgaagcagcctcctagcttcggaagtacggacactacgtcgcgttttcaagcgtgtctgttctgcaggtaacagcatcaagctgcacgtggaagcatctcgcggttttctagaaacaggcattttcttatccctctcccgctcctttttccacaaaggtgaatttcataaatgtaatactagtaaagtgaatgaattactgagtttatacagaaatttaggtaacttctcctttagtctcaagagcgagtcttgctttttaatgggtgccgtttatgttgctgcccgccctgtgtgcctggctcctctgggtgccttggtgtctgctggtggctggcagtgggcgcagcggaggagagttgtgctgcagctcatacggtgtgtctgtcatctcagtctggagtaaatgcagtgtctgccggtgtctgatgggttctgtccctcgtattttctttgccttctatcccattgcctggctaccgctgcctggcagccaagggtgttggtcgcgaagctggagtggcctctggtggagcctgcatcttgtctcgtctgcctctgctttacatttggtgtactttcgggcgtggtggcagtaaaatgacaccgtgattgagcttgtcagcagagctgaaagagaaagtagaaggatgtgcattgtttcttgtaagatatcttgcatgtatctgtgtattcaaattcaaacagagatggtttgtccatttgtccactgagaaattataaactagggacaagggggaggaaaagtactgaaatacagtttatgaagcaagtgtgtctcgggctgtgcttgtcccaggagccccagcagcatctgaactgaggcttcttcagtcctgcaggaacaggatcatctgtctcagcggtgggcagatgttttcatagacagccagggagtaaacactgttggctctgtgggctgtatggtctctgccataaatagtacagagatgtggctgtgtctagtacaacttttagacacagaaatctgaatgacatatattgttctgtgtcaagaaacttagattttttttttaactatttaaaaacgtgaaacctattcttagctcacaggccatggagaagctggtggggaccagacccagctccttagctggctgggctggggagggggcagtgacagtggcagctgctactcactgctcagtgtggaaaacacaggacttggcaatcacagcccgcagaaccatcatgtgtggcagaagcctgagggatgcggtttcttgcccacgtgctctgttcattttctgttgtttttctgcacttaaagaattcacatggaagcatgttttataaatgaattaccagagaaacagagatgggccgagattctcagaaatggtcccatgtgaccaagttctgctgtttgggtgacagtgctttgaagatctcctttgaggatgtgcagtcttttttttttttttttttttgagatggagtttgttgcccaggctggagtgagtggcacagtctcggctcactgcaacctccacctcctgggttcaagcagttctcgtgccgcagctactcaggaggccgagacatgagaatcgcttgaaccggggaggcagaggttgcagtgagctgagatcacaccatcgcactccagcctgggcaacagagcaagactccatctcaaaaaaaaaaaagaagtactaacttaatacaaaaaaaaaagtacaaaatgctaagaaagagattttatctgatggactctgagatttcatatgaaaatggtggtatctgaactcctttcagtgtagctgctgtaagaattctaatccctagccgggtgcagtggctcacacctgtaatcccagcactttgggatgctgaggcaggtggatcgcctgaggtnaggagttcaaaacaagcctagccaacatagtaaaaccccatctctactaaaaatacaaaaaattagctgggtgtggtggtgggagcctgtaatcccagctactagggaggctgaggcaggagaatcacttgaacccaggaggcagaggttgcagtgagcngaaattgtgccatcgcactccagcctgggcaacaagagcaaaactccgtctc

SEQ ID NO: 71980 - DNA, 941 bp, Homo sapiens
  misc_feature (729)..(729): n is a, c, g, or t
  misc_feature (889)..(889): n is a, c, g, or t
ttagatcttattattagtagaaatgagcaatttttgagttctagtctttctttgccctcctcccaaaatttacagatttatcttactatccttaatgttttggaaattgaggttccttaattcaatttaacacatagttattaaacacattctaagtatcaggtctataagggagacaaagatgaattaacatcatgcctccttgcccttaagaagtactaacttggccaggcacggtggctcacgcctgtaatcccagcactttgggagaccaaggcagttggatcacttgaggtcaggagttcgagaccagcctggccaacatggtgaaaccctgtttctactaaaaatacaaaaaattagctgggcgtggtggcaggcacctgtaatcccagctactcaggaggccgagacatgagaatcgcttgaaccggggaggcagaggttgcagtgagctgagatcacaccatcgcactccagcctgggcaacagagcaagactccatctcaaaaaaaaaaaagaagtactaacttaatacaaaaaaaaaagtacaaaatgctaagaaagagattttatctgatggactctgagatttcatatgaaaatggtggtatctgaactcctttcagtgtagctgctgtaagaattctaatccctagccgggtgcagtggctcacacctgtaatcccagcactttgggatgctgaggcaggtggatcgcctgaggtnaggagttcaaaacaagcctagccaacatagtaaaaccccatctctactaaaaatacaaaaaattagctgggtgtggtggtgggagcctgtaatcccagctactagggaggctgaggcaggagaatcacttgaacccaggaggcagaggttgcagtgagcngaaattgtgccatcgcactccagcctgggcaacaagagcaaaactccgtctc

SEQ ID NO: 71981 - DNA, 2073 bp, Homo sapiens
agattctgaaactctcccacctccccactcccacctacccccgatataaatcactggactgtttgtacgtgaaacagaagaggctaagcttcctttttttacacttatgagacaaaaagtgcagtgtttggttcgtatgtttagcacatgattttcataaagaatctatatatttttgccctacagagaattgttatacaggtcaagtgtgttttcctgatgttcctatgcagttacagtatgttgaaagtgttttaacactaagaagaaaactttaaagattcatgtgattaattggatttgaggataattattattatttggtttttagatttgaaaagtagaatttccattgagacaattgatttgaataggcctgcatttgattcttcatatcaatagaaactaaaatgatttgggagattcatttgaaaaatgattgtatacttgttcacaaagcgaaaagtgatacatgaaggtaatggttatcatttaaagcccacattttacactatcaggtcacaggagtctaatttttttttcagttagataaactgaccaaacgtctattcaagaatatatgtcaatatcatcctaatgtggaaggtccgaagaaccagaaaagtgagaagggccgtttacctccctctgtagctatcacctgttggtccacagagtttcttgagaaatgagcaaacattttatgattaggtaaccctttcacatgaacgggaagatgggaaaggtggaatgaccataagagttggcctgagaccagtttgttttctggggatttggtaagataggcagttcccatgggaaattgcttaaattgctttgttgcctatgatttgattctaaacaagtggtgctatcttctccctcaatatggctgtcttgagtttgtcttgcagtatcacaccattataccaattctttgggttgcttctgacacattcaaagtgaactctggctgatgttgctgtttcaggtataccatctggagttaatttcctagcagaaggtgaaagtccaggagaattgtcctctttcattgaacatgattgaaaatgtaactggctctgaacttcaagaagatagatgcccaagtgatgcattaaagtaagggaaataaagtcaagtttttcaactgccatccatattctcattggcagaattctgatttttttccaagcactgtttggtgagcctggaagcaccgtatcctgtcccagggagtacagtgaaatttccaagcaagagctgaggtgccaataccaaaagaccatggggagtctgcacggttctggttagatcaatagaaaatccatgtgtacaactgttaattcctcatcctccactagcactaaatttgtcactttaaattttgaaaccagggaaacaccacctgtcattctgtccccattctccatagctcttcaatctttacatgccgcaagacttttttgatagctcgtactcatcccagtgtctcctgaaaccccatcatgtaatgtactgggcaccttcttttaaacaaatgtttactctgtgggtttggttcatttcaatttctgcgttctgacacatatttttttaataaagatgagaaagagaaaatgactgttgcagtacctttctagacctactttaactttacctcagatgacagtttgttaacatatatggacacattatttttaactttatgtacaatgcattcaacagaacagcaaaatttttagaaattttccattaatttctgtaacacaccatgtaaaactgttacaaataaacatgtttgagacaacaaaaaaaaagaaaagtcgtattagcgccgagctatccgtaggtaggtatttgctgccagccgtcgttacagggctggaaccgggccgcttatgctggggtccgttcgccggctagggagcgaagtcggccaagtcgctggtgtggagtggccgttgggcgggacgcgtgtgtggcgagcacgcctggtttcttgtggcgctagagggctgttcacccaaaggtgcggcggcgttggatagccacatttggagaacacgtacg

SEQ ID NO: 71982 - DNA, 1812 bp, Homo sapiens
agattctgaaactctcccacctccccactcccacctacccccgatataaatcactggactgtttgtacgtgaaacagaagaggctaagcttcctttttttacacttatgagacaaaaagtgcagtgtttggttcgtatgtttagcacatgattttcataaagaatctatatatttttgccctacagagaattgttatacaggtcaagtgtgttttcctgatgttcctatgcagttacagtatgttgaaagtgttttaacactaagaagaaaactttaaagattcatgtgattaattggatttgaggataattattattatttggtttttagatttgaaaagtagaatttccattgagacaattgatttgaataggcctgcatttgattcttcatatcaatagaaactaaaatgatttgggagattcatttgaaaaatgattgtatacttgttcacaaagcgaaaagtgatacatgaaggtaatggttatcatttaaagcccacattttacactatcaggtcacaggagtctaatttttttttcagttagataaactgaccaaacgtctattcaagaatatatgtcaatatcatcctaatgtggaaggtccgaagaaccagaaaagtgagaagggccgtttacctccctctgtagctatcacctgttggtccacagagtttcttgagaaatgagcaaacattttatgattaggtaaccctttcacatgaacgggaagatgggaaaggtggaatgaccataagagttggcctgagaccagtttgttttctggggatttggtaagataggcagttcccatgggaaattgcttaaattgctttgttgcctatgatttgattctaaacaagtggtgctatcttctccctcaatatggctgtcttgagtttgtcttgcagtatcacaccattataccaattctttgggttgcttctgacacattcaaagtgaactctggctgatgttgctgtttcaggtataccatctggagttaatttcctagcagaaggtgaaagtccaggagaattgtcctctttcattgaacatgattgaaaatgtaactggctctgaacttcaagaagatagatgcccaagtgatgcattaaagtaagggaaataaagtcaagtttttcaactgccatccatattctcattggcagaattctgatttttttccaagcactgtttggtgagcctggaagcaccgtatcctgtcccagggagtacagtgaaatttccaagcaagagctgaggtgccaataccaaaagaccatggggagtctgcacggttctggttagatcaatagaaaatccatgtgtacaactgttaattcctcatcctccactagcactaaatttgtcactttaaattttgaaaccagggaaacaccacctgtcattctgtccccattctccatagctcttcaatctttacatgccgcaagacttttttgatagctcgtactcatcccagtgtctcctgaaaccccatcatgtaatgtactgggcaccttcttttaaacaaatgtttactctgtgggtttggttcatttcaatttctgcgttctgacacatatttttttaataaagatgagaaagagaaaatgactgttgcagtacctttctagacctactttaactttacctcagatgacagtttgttaacatatatggacacattatttttaactttatgtacaatgcattcaacagaacagcaaaatttttagaaattttccattaatttctgtaacacaccatgtaaaactgttacaaataaacatgtttgagacaaca

SEQ ID NO: 71983 - DNA, 1758 bp, Homo sapiens
agattctgaaactctcccacctccccactcccacctacccccgatataaatcactggactgtttgtacgtgaaacagaagaggctaagcttcctttttttacacttatgagacaaaaagtgcagtgtttggttcgtatgtttagcacatgattttcataaagaatctatatatttttgccctacagagaattgttatacaggtcaagtgtgttttcctgatgttcctatgcagttacagtatgttgaaagtgttttaacactaagaagaaaactttaaagattcatgtgattaattggatttgaggataattattattatttggtttttagatttgaaaagtagaatttccattgagacaattgatttgaataggcctgcatttgattcttcatatcaatagaaactaaaatgatttgggagattcatttgaaaaatgattgtatacttgttcacaaagcgcaggtcacaggagtctaatttttttttcagttagataaactgaccaaacgtctattcaagaatatatgtcaatatcatcctaatgtggaaggtccgaagaaccagaaaagtgagaagggccgtttacctccctctgtagctatcacctgttggtccacagagtttcttgagaaatgagcaaacattttatgattaggtaaccctttcacatgaacgggaagatgggaaaggtggaatgaccataagagttggcctgagaccagtttgttttctggggatttggtaagataggcagttcccatgggaaattgcttaaattgctttgttgcctatgatttgattctaaacaagtggtgctatcttctccctcaatatggctgtcttgagtttgtcttgcagtatcacaccattataccaattctttgggttgcttctgacacattcaaagtgaactctggctgatgttgctgtttcaggtataccatctggagttaatttcctagcagaaggtgaaagtccaggagaattgtcctctttcattgaacatgattgaaaatgtaactggctctgaacttcaagaagatagatgcccaagtgatgcattaaagtaagggaaataaagtcaagtttttcaactgccatccatattctcattggcagaattctgatttttttccaagcactgtttggtgagcctggaagcaccgtatcctgtcccagggagtacagtgaaatttccaagcaagagctgaggtgccaataccaaaagaccatggggagtctgcacggttctggttagatcaatagaaaatccatgtgtacaactgttaattcctcatcctccactagcactaaatttgtcactttaaattttgaaaccagggaaacaccacctgtcattctgtccccattctccatagctcttcaatctttacatgccgcaagacttttttgatagctcgtactcatcccagtgtctcctgaaaccccatcatgtaatgtactgggcaccttcttttaaacaaatgtttactctgtgggtttggttcatttcaatttctgcgttctgacacatatttttttaataaagatgagaaagagaaaatgactgttgcagtacctttctagacctactttaactttacctcagatgacagtttgttaacatatatggacacattatttttaactttatgtacaatgcattcaacagaacagcaaaatttttagaaattttccattaatttctgtaacacaccatgtaaaactgttacaaataaacatgtttgagacaaca

SEQ ID NO: 71984 - DNA, 1112 bp, Homo sapiens
ccattctcctgcctcagcctcctgagtagctgggactacaggcgcccgccaccacacccggctaactttttttgtatttttagtagaaacattgtttcaccacgttagccaggatggtctccatctcctgacctcgtgatccgcctgcctcggcctcccaaagtgctgggattacaggcgtgagccactgcacccagccgagtgagaatttttatgccataaaaatacgactctgaaagctacatggaaaaggagaatcccacctccttgcactacattgaaacaagcaagcctttccctccctctcctttttgatgttttcttgtcccaagacaaaagtttggcatcttggaacttattcatgctctctggctgcctttgtagacttttggagtcctttgcaaggtttggtggtctcgtcgttaatctggagaaattccccagaatctgtctcaaagcgctcaacctggctcagaggacacccagcccctatgccccactcacaagagaggtgggcaagcccccagggataggaggaagtaagcaggatcctccctgtcctgtttcccagaaccagagcaaggaatggggaatcctaagggtttctgtggcatcactgaatgtcacccactccacatcaacctgcctctcacctgccaccctttttcagggaggtgagtacctgccatggtcactgttaccagatccttaaaatcctgggctctgagctaggtgcattgctctgttacccatttcctacatttgtttgtttgttcttgatttcctgggggaatgggactgatggagacagacaaacccactgtgggcagcatctaagccatgtccaaggttggtcgaattaagggaaccctggcctctcagcaggacagaaagctgagctgtggttccaggccctcctctctgggcccctggtgtgtatcttttttccttgttgcttttgaaatttttgcaattattttaagaatccagtctttcagaccagcccttttattaagctttgaatttttaattgatttttttaaagtaaaaaaaaaaaaacccaaaaaacaaacaaaatttaacaaaaaaatccgctactcttactcccctgc

SEQ ID NO: 71985 - DNA, 967 bp, Homo sapiens
ccattctcctgcctcagcctcctgagtagctgggactacaggcgcccgccaccacacccggctaactttttttgtatttttagtagaaacattgtttcaccacgttagccaggatggtctccatctcctgacctcgtgatccgcctgcctcggcctcccaaagtgctgggattacaggcgtgagccactgcacccagccgagtgagaatttttatgccataaaaatacgactctgaaagctacatggaaaaggagaatcccacctccttgcactacattgaaacaagcaagcctttccctccctctcctttttgatgttttcttgtcccaagacaaaagtttggcatcttggaacttattcatgctctctggctgcctttgtagacttttggagtcctttgcaaggtttggtggtctcgtcgttaatctggagaaattccccagaatctgtctcaaagcgctcaacctggctcagaggacacccagcccctatgccccactcacaagagaggtgggcaagcccccagggataggaggaagtaagcaggatcctccctgtcctgtttcccagaaccagagcaaggaatggggaatcctaagggtttctgtggcatcactgaatgtcacccactccacatcaacctgcctctcacctgccaccctttttcagggaggtgagtacctgccatggtcactgttaccagatccttaaaatcctgggctctgagctaggtgcattgctctgttacccatttcctacatttgtttgtttgttcttgatttcctgggggaatgggactgatggagacagacaaacccactgtgggcagcatctaagccatgtccaaggttggtcgaattaagggaaccctggcctctcagcaggacagaaagctgagctgtggttccaggttggtcgaattaagggaacctggcctctcagcaggacagaaagctgagctgtggt

SEQ ID NO: 71986 - DNA, 4494 bp, Homo sapiens
  misc_feature (75)..(75): n is a, c, g, or t
ggtctttgacttctttctgaactcaatcttcccgtcacgttcctccaatactgaaggtctctctgcggcgcgganccgggcggctcggggcccagagagagccgcggccgggagctcgcgggctcctgacaacctcctcccctcggcggacgacgaccacggcgactagggcgccggtcatggcggagcaacaaacccggcgcggaccctaggcaccaccgcatggagcgggacgaaccgccgcctagcggagggggaggcggcgggggctcggcggggttcctggagcctcccgccgcgctccctccgccgccgcgcaacggtttctgtcaggatgaattggcagagcttgacccaggcactaatgatcgggctgaacaacgaacctgtctcatttgtggggaccgcgctacaggcttgcactatgggatcatctcctgtgagggctgcaaagggtttttcaagcggagcatttgcaacaaacgggtatatcgatgcagtcgtgacaagaactgtgtcatgtctcggaagcagaggaacaggtgccagtactgccgcctgctcaaatgcctccagatggggatgaaccggaaggctatcagagaagatggcatgcctggaggccggaataagagcattgggccagtccagatatcggaagaagaaatcgaaaggatcatgtctgggcaggagtttgaggaagaggccaatcactggagcaaccatggtgatagtgaccacagttcccctgggaacagggcttcggagagcaaccagccctcaccaggctccacactgtcttccagtaggtctgtggaactgaatggattcatggccttcagggaacagtacatgggaatgtctgtgcctccacattaccaatatataccgcacctttttagctattctggccactcaccacttctgccccaacaagctcgcagcctggatccccagtcatacagtctgattcaccagctgttatcagccgaggacctggaaccattgggcacgcccatgttgattgaagatggatacgctgtgacacaggcagaactatttgccctgctttgccgcctggccgacgagctgctctttaggcagattgcctggatcaagaaactgcctttcttctgcgagctctcaatcaaggattacacgtgcctcttgagctctacgtggcaggagctaatcctgctgtcttccctcaccgtttacagcaagcagatctttggggaactggctgatgtcactgccaagtactcgccctccgatgaagaactacacagatttagtgatgaagggatggaggtgatcgagcggctcatctacctctatcacaagttccatcagctaaaggtcagcaacgaggagtatgcttgcatgaaagcaattaacttcctaaatcaagatatcaggggtctgaccagtgcctcacagctggaacaattgaataaacgatactggtacatttgccaggattttactgaatataaatacacacatcagccgaaccgctttcctgatctcatgatgtgcttacctgagattcgatatattgcaggaaagatggtgaatgtgcccctggagcagctgcccctcctctttaaggtggtgctgcattcctgcaagaccagtgtgggcaaggaatgacctgttccaggcgccctcctcaggccaaccacagcgtcttgggtgggcaggacaggctctggagggaaaagccagagagaccaagatggaggctgtggagcagcatttcccgttgcctccatagcaagaagagtttttgtttgtttgtctgtttttttaacctcatttttctatatatttatttcacgacagagttgaatgtatggccttcaacatgatgcacatgcttttgtgtgaatgcagccaatgcattttcttacagtttacagaatgtgaagatgtttaatgttacagtgttgtcattgtttagaaatagttcttttgtattttgagggagagggtgggatggggctaagatgactatttccataatgttgacaaagatgactacctcaatggaaatggggggtgtggccatccctactttttccacattttctcagcagactcatacatttgtctgtcagagagcaaattgccaaaaaaagccacagaattgccagataaaatggcacactgtaagggcgcaaagtgttgttaggagattcactaagcaaggttggtgagacggcaacagggtaggaggtgaggattgagccacgtcctttccttggaaagcgtgaaaattaagagagtagggcacagtgaccatatttaaggcaggtgtccttccacccaacaagtcctaagggcagaagaatttctgttctcacaccttgctgccccccttacccctgcaccaccatcattgtctaccactgcgaactttccatctaggcaaagtcctggcaatcacttgatccacaggactcgcctcccagctccctcggggcccccagctacctagtttccttacctggatctcctgaggcccaccttcctccttcccactcccttacacatttgacttcctattggccctttgaaaaaccagctgagcagaatgccatgttctgaagcctggtgcccactactgatttattctcctttcaccttgttttcttcaaagggtagtagggcaaggccagactgcaaaaagaatagacactccccttttgaaatctgttcctctcccctccccttcctaccgcaccctcaggtctaaatccgaaaacttcaggcttttttaaacaatgagaaggaccattcacctgtctgctgaccagaaatgttgcccctaagttcttctccaagttctccttttctctccagagtgagaccagttttcctcagggacccaggacacaaagcccaaggcccagagtggctcagctgccccttacttcagcagtggactggccagccaaggcctggagggctggagccagaagcacctggaagggaaggggggctttaaactacctcaggttcctaatggcccggctgctacctctgcagacatggcctggactccttgacctctcactacctgccccaccttatcccaggacgtgttccttaccctcttgactttggccagcgctacaccaggtctgtctttgaactctttcaggtgcttgtcctgcctacacccaggtatctttcacagccagtgtggcaagcagaccacttagttggctgcatgcctgggtaggttggaagggcccacggcaccttcttctgcctatttagtcaaaggctgtttgctgtctcctcaactcaacctagtaaagctacccaggagggcaccacgtcgtgtgcatactgggtagtccatgtctgattgtaattgtttctttctggtgaaatgttacgggtaccagcagagtgatgattttggcccttgatggatctaaaactcggaacattactcctcaatgccgtttccccagttgctctgagaaggaagagacatgttcctcaggaaaagctccagctagcatgtttttcacgtcagtgggaagattcttgtgtgttcgtgtgtatctgtttatttctaagttcacgatacttgttcccctgaattttatttaaccaactagatcacattctttggccacaggtcagactctgagctgctttcctccagatcgggaaggagacacatatcacagatgccttctctaagacagctcctgtgtacagcatcgttctttgctgaggcctctatctgtccaattattatttttgaaattgcttttcaaattaaacattttacccgttgtgttgggtgtcaaaagaaattgctctctgatgaggcaagaacatgtctctccaacaacgtagtattgaacagagcaagttgttaatttgtggagtaggggaaaggttctgcaagttgccattgtacaaatccagttttacaaatgtttgcagcagattccacagacaaagagcccattcattgccgagagccctgcagaatctcagagcaaagtggctgtgtgttccgagccggagcctgacctgtggaccgtctttaatgtcttctgcaccagtccttttatgacgtgggctttttttaaacagggtaaagtgaatgtgttgcattgcaaactcaggtattatgaggagaaggtaggagtgtagctagcagcgtggagacattaggtcagccactagatgtatttgtgaatttggtttgaaggacacggagaaaggttggaggggaggttggtgtgtttgttttttgctttcttccccataatgtttggttaacaggtagcctttttgcgagtggaaggagagaaaagttgtgcatgttttctctaatttctctttctgccctctctctgatccccaaccaccaaaagcactcactttgagtgaggatttttttttttttttttttttttttgggggggggagtcccccttggggccccgggggggggtgcggggg

SEQ ID NO: 71987 - DNA, 4458 bp, Homo sapiens
  misc_feature (39)..(39): n is a, c, g, or t
ggcacgaggcggcgcggaggggcgcggagcggcgcgganccgggcggctcggggcccagagagagccgcggccgggagctcgcgggctcctgacaacctcctcccctcggcggacgacgaccacggcgactagggcgccggtcatggcggagcaacaaacccggcgcggaccctaggcaccaccgcatggagcgggacgaaccgccgcctagcggagggggaggcggcgggggctcggcggggttcctggagcctcccgccgcgctccctccgccgccgcgcaacggtttctgtcaggatgaattggcagagcttgacccaggcactaatgatcgggctgaacaacgaacctgtctcatttgtggggaccgcgctacaggcttgcactatgggatcatctcctgtgagggctgcaaagggtttttcaagcggagcatttgcaacaaacgggtatatcgatgcagtcgtgacaagaactgtgtcatgtctcggaagcagaggaacaggtgccagtactgccgcctgctcaaatgcctccagatggggatgaaccggaaggctatcagagaagatggcatgcctggaggccggaataagagcattgggccagtccagatatcggaagaagaaatcgaaaggatcatgtctgggcaggagtttgaggaagaggccaatcactggagcaaccatggtgatagtgaccacagttcccctgggaacagggcttcggagagcaaccagccctcaccaggctccacactgtcttccagtaggtctgtggaactgaatggattcatggccttcagggaacagtacatgggaatgtctgtgcctccacattaccaatatataccgcacctttttagctattctggccactcaccacttctgccccaacaagctcgcagcctggatccccagtcatacagtctgattcaccagctgttatcagccgaggacctggaaccattgggcacgcccatgttgattgaagatggatacgctgtgacacaggcagaactatttgccctgctttgccgcctggccgacgagctgctctttaggcagattgcctggatcaagaaactgcctttcttctgcgagctctcaatcaaggattacacgtgcctcttgagctctacgtggcaggagctaatcctgctgtcttccctcaccgtttacagcaagcagatctttggggaactggctgatgtcactgccaagtactcgccctccgatgaagaactacacagatttagtgatgaagggatggaggtgatcgagcggctcatctacctctatcacaagttccatcagctaaaggtcagcaacgaggagtatgcttgcatgaaagcaattaacttcctaaatcaagatatcaggggtctgaccagtgcctcacagctggaacaattgaataaacgatactggtacatttgccaggattttactgaatataaatacacacatcagccgaaccgctttcctgatctcatgatgtgcttacctgagattcgatatattgcaggaaagatggtgaatgtgcccctggagcagctgcccctcctctttaaggtggtgctgcattcctgcaagaccagtgtgggcaaggaatgacctgttccaggcgccctcctcaggccaaccacagcgtcttgggtgggcaggacaggctctggagggaaaagccagagagaccaagatggaggctgtggagcagcatttcccgttgcctccatagcaagaagagtttttgtttgtttgtctgtttttttaacctcatttttctatatatttatttcacgacagagttgaatgtatggccttcaacatgatgcacatgcttttgtgtgaatgcagccaatgcattttcttacagtttacagaatgtgaagatgtttaatgttacagtgttgtcattgtttagaaatagttcttttgtattttgagggagagggtgggatggggctaagatgactatttccataatgttgacaaagatgactacctcaatggaaatggggggtgtggccatccctactttttccacattttctcagcagactcatacatttgtctgtcagagagcaaattgccaaaaaaagccacagaattgccagataaaatggcacactgtaagggcgcaaagtgttgttaggagattcactaagcaaggttggtgagacggcaacagggtaggaggtgaggattgagccacgtcctttccttggaaagcgtgaaaattaagagagtagggcacagtgaccatatttaaggcaggtgtccttccacccaacaagtcctaagggcagaagaatttctgttctcacaccttgctgccccccttacccctgcaccaccatcattgtctaccactgcgaactttccatctaggcaaagtcctggcaatcacttgatccacaggactcgcctcccagctccctcggggcccccagctacctagtttccttacctggatctcctgaggcccaccttcctccttcccactcccttacacatttgacttcctattggccctttgaaaaaccagctgagcagaatgccatgttctgaagcctggtgcccactactgatttattctcctttcaccttgttttcttcaaagggtagtagggcaaggccagactgcaaaaagaatagacactccccttttgaaatctgttcctctcccctccccttcctaccgcaccctcaggtctaaatccgaaaacttcaggcttttttaaacaatgagaaggaccattcacctgtctgctgaccagaaatgttgcccctaagttcttctccaagttctccttttctctccagagtgagaccagttttcctcagggacccaggacacaaagcccaaggcccagagtggctcagctgccccttacttcagcagtggactggccagccaaggcctggagggctggagccagaagcacctggaagggaaggggggctttaaactacctcaggttcctaatggcccggctgctacctctgcagacatggcctggactccttgacctctcactacctgccccaccttatcccaggacgtgttccttaccctcttgactttggccagcgctacaccaggtctgtctttgaactctttcaggtgcttgtcctgcctacacccaggtatctttcacagccagtgtggcaagcagaccacttagttggctgcatgcctgggtaggttggaagggcccacggcaccttcttctgcctatttagtcaaaggctgtttgctgtctcctcaactcaacctagtaaagctacccaggagggcaccacgtcgtgtgcatactgggtagtccatgtctgattgtaattgtttctttctggtgaaatgttacgggtaccagcagagtgatgattttggcccttgatggatctaaaactcggaacattactcctcaatgccgtttccccagttgctctgagaaggaagagacatgttcctcaggaaaagctccagctagcatgtttttcacgtcagtgggaagattcttgtgtgttcgtgtgtatctgtttatttctaagttcacgatacttgttcccctgaattttatttaaccaactagatcacattctttggccacaggtcagactctgagctgctttcctccagatcgggaaggagacacatatcacagatgccttctctaagacagctcctgtgtacagcatcgttctttgctgaggcctctatctgtccaattattatttttgaaattgcttttcaaattaaacattttacccgttgtgttgggtgtcaaaagaaattgctctctgatgaggcaagaacatgtctctccaacaacgtagtattgaacagagcaagttgttaatttgtggagtaggggaaaggttctgcaagttgccattgtacaaatccagttttacaaatgtttgcagcagattccacagacaaagagcccattcattgccgagagccctgcagaatctcagagcaaagtggctgtgtgttccgagccggagcctgacctgtggaccgtctttaatgtcttctgcaccagtccttttatgacgtgggctttttttaaacagggtaaagtgaatgtgttgcattgcaaactcaggtattatgaggagaaggtaggagtgtagctagcagcgtggagacattaggtcagccactagatgtatttgtgaatttggtttgaaggacacggagaaaggttggaggggaggttggtgtgtttgttttttgctttcttccccataatgtttggttaacaggtagcctttttgcgagtggaaggagagaaaagttgtgcatgttttctctaatttctctttctgccctctctctgatccccaaccaccaaaagcactcactttgagtgaggatttttttttttttttttttttttttgggggggggagtcccccttggggccccgggggggggtgcggggg

SEQ ID NO: 71988 - DNA, 4391 bp, Homo sapiens
  misc_feature (39)..(39): n is a, c, g, or t
ggcacgaggcggcgcggaggggcgcggagcggcgcgganccgggcggctcggggcccagagagagccgcggccgggagctcgcgggctcctgacaacctcctcccctcggcggacgacgaccacggcgactagggcgccggtcatggcggagcaacaaacccggcgcggaccctaggcaccaccgcatggagcgggacgaaccgccgcctagcggaggggtttctgtcaggatgaattggcagagcttgacccaggcactaatgatcgggctgaacaacgaacctgtctcatttgtggggaccgcgctacaggcttgcactatgggatcatctcctgtgagggctgcaaagggtttttcaagcggagcatttgcaacaaacgggtatatcgatgcagtcgtgacaagaactgtgtcatgtctcggaagcagaggaacaggtgccagtactgccgcctgctcaaatgcctccagatggggatgaaccggaaggctatcagagaagatggcatgcctggaggccggaataagagcattgggccagtccagatatcggaagaagaaatcgaaaggatcatgtctgggcaggagtttgaggaagaggccaatcactggagcaaccatggtgatagtgaccacagttcccctgggaacagggcttcggagagcaaccagccctcaccaggctccacactgtcttccagtaggtctgtggaactgaatggattcatggccttcagggaacagtacatgggaatgtctgtgcctccacattaccaatatataccgcacctttttagctattctggccactcaccacttctgccccaacaagctcgcagcctggatccccagtcatacagtctgattcaccagctgttatcagccgaggacctggaaccattgggcacgcccatgttgattgaagatggatacgctgtgacacaggcagaactatttgccctgctttgccgcctggccgacgagctgctctttaggcagattgcctggatcaagaaactgcctttcttctgcgagctctcaatcaaggattacacgtgcctcttgagctctacgtggcaggagctaatcctgctgtcttccctcaccgtttacagcaagcagatctttggggaactggctgatgtcactgccaagtactcgccctccgatgaagaactacacagatttagtgatgaagggatggaggtgatcgagcggctcatctacctctatcacaagttccatcagctaaaggtcagcaacgaggagtatgcttgcatgaaagcaattaacttcctaaatcaagatatcaggggtctgaccagtgcctcacagctggaacaattgaataaacgatactggtacatttgccaggattttactgaatataaatacacacatcagccgaaccgctttcctgatctcatgatgtgcttacctgagattcgatatattgcaggaaagatggtgaatgtgcccctggagcagctgcccctcctctttaaggtggtgctgcattcctgcaagaccagtgtgggcaaggaatgacctgttccaggcgccctcctcaggccaaccacagcgtcttgggtgggcaggacaggctctggagggaaaagccagagagaccaagatggaggctgtggagcagcatttcccgttgcctccatagcaagaagagtttttgtttgtttgtctgtttttttaacctcatttttctatatatttatttcacgacagagttgaatgtatggccttcaacatgatgcacatgcttttgtgtgaatgcagccaatgcattttcttacagtttacagaatgtgaagatgtttaatgttacagtgttgtcattgtttagaaatagttcttttgtattttgagggagagggtgggatggggctaagatgactatttccataatgttgacaaagatgactacctcaatggaaatggggggtgtggccatccctactttttccacattttctcagcagactcatacatttgtctgtcagagagcaaattgccaaaaaaagccacagaattgccagataaaatggcacactgtaagggcgcaaagtgttgttaggagattcactaagcaaggttggtgagacggcaacagggtaggaggtgaggattgagccacgtcctttccttggaaagcgtgaaaattaagagagtagggcacagtgaccatatttaaggcaggtgtccttccacccaacaagtcctaagggcagaagaatttctgttctcacaccttgctgccccccttacccctgcaccaccatcattgtctaccactgcgaactttccatctaggcaaagtcctggcaatcacttgatccacaggactcgcctcccagctccctcggggcccccagctacctagtttccttacctggatctcctgaggcccaccttcctccttcccactcccttacacatttgacttcctattggccctttgaaaaaccagctgagcagaatgccatgttctgaagcctggtgcccactactgatttattctcctttcaccttgttttcttcaaagggtagtagggcaaggccagactgcaaaaagaatagacactccccttttgaaatctgttcctctcccctccccttcctaccgcaccctcaggtctaaatccgaaaacttcaggcttttttaaacaatgagaaggaccattcacctgtctgctgaccagaaatgttgcccctaagttcttctccaagttctccttttctctccagagtgagaccagttttcctcagggacccaggacacaaagcccaaggcccagagtggctcagctgccccttacttcagcagtggactggccagccaaggcctggagggctggagccagaagcacctggaagggaaggggggctttaaactacctcaggttcctaatggcccggctgctacctctgcagacatggcctggactccttgacctctcactacctgccccaccttatcccaggacgtgttccttaccctcttgactttggccagcgctacaccaggtctgtctttgaactctttcaggtgcttgtcctgcctacacccaggtatctttcacagccagtgtggcaagcagaccacttagttggctgcatgcctgggtaggttggaagggcccacggcaccttcttctgcctatttagtcaaaggctgtttgctgtctcctcaactcaacctagtaaagctacccaggagggcaccacgtcgtgtgcatactgggtagtccatgtctgattgtaattgtttctttctggtgaaatgttacgggtaccagcagagtgatgattttggcccttgatggatctaaaactcggaacattactcctcaatgccgtttccccagttgctctgagaaggaagagacatgttcctcaggaaaagctccagctagcatgtttttcacgtcagtgggaagattcttgtgtgttcgtgtgtatctgtttatttctaagttcacgatacttgttcccctgaattttatttaaccaactagatcacattctttggccacaggtcagactctgagctgctttcctccagatcgggaaggagacacatatcacagatgccttctctaagacagctcctgtgtacagcatcgttctttgctgaggcctctatctgtccaattattatttttgaaattgcttttcaaattaaacattttacccgttgtgttgggtgtcaaaagaaattgctctctgatgaggcaagaacatgtctctccaacaacgtagtattgaacagagcaagttgttaatttgtggagtaggggaaaggttctgcaagttgccattgtacaaatccagttttacaaatgtttgcagcagattccacagacaaagagcccattcattgccgagagccctgcagaatctcagagcaaagtggctgtgtgttccgagccggagcctgacctgtggaccgtctttaatgtcttctgcaccagtccttttatgacgtgggctttttttaaacagggtaaagtgaatgtgttgcattgcaaactcaggtattatgaggagaaggtaggagtgtagctagcagcgtggagacattaggtcagccactagatgtatttgtgaatttggtttgaaggacacggagaaaggttggaggggaggttggtgtgtttgttttttgctttcttccccataatgtttggttaacaggtagcctttttgcgagtggaaggagagaaaagttgtgcatgttttctctaatttctctttctgccctctctctgatccccaaccaccaaaagcactcactttgagtgaggatttttttttttttttttttttttttgggggggggagtcccccttggggccccgggggggggtgcggggg

SEQ ID NO: 71989 - DNA, 4471 bp, Homo sapiens
cgggggctccagggcgccgacccagcatgggcagttgctcattgttggacataaggtcgcgctggtcatccatgactggcttctgatcttcccgacagctcctgcttctcctcctgtgcatctgggacgacgaccacggcgactagggcgccggtcatggcggagcaacaaacccggcgcggaccctaggcaccaccgcatggagcgggacgaaccgccgcctagcggagggggaggcggcgggggctcggcggggttcctggagcctcccgccgcgctccctccgccgccgcgcaacggtttctgtcaggatgaattggcagagcttgacccaggcactaatgatcgggctgaacaacgaacctgtctcatttgtggggaccgcgctacaggcttgcactatgggatcatctcctgtgagggctgcaaagggtttttcaagcggagcatttgcaacaaacgggtatatcgatgcagtcgtgacaagaactgtgtcatgtctcggaagcagaggaacaggtgccagtactgccgcctgctcaaatgcctccagatggggatgaaccggaaggctatcagagaagatggcatgcctggaggccggaataagagcattgggccagtccagatatcggaagaagaaatcgaaaggatcatgtctgggcaggagtttgaggaagaggccaatcactggagcaaccatggtgatagtgaccacagttcccctgggaacagggcttcggagagcaaccagccctcaccaggctccacactgtcttccagtaggtctgtggaactgaatggattcatggccttcagggaacagtacatgggaatgtctgtgcctccacattaccaatatataccgcacctttttagctattctggccactcaccacttctgccccaacaagctcgcagcctggatccccagtcatacagtctgattcaccagctgttatcagccgaggacctggaaccattgggcacgcccatgttgattgaagatggatacgctgtgacacaggcagaactatttgccctgctttgccgcctggccgacgagctgctctttaggcagattgcctggatcaagaaactgcctttcttctgcgagctctcaatcaaggattacacgtgcctcttgagctctacgtggcaggagctaatcctgctgtcttccctcaccgtttacagcaagcagatctttggggaactggctgatgtcactgccaagtactcgccctccgatgaagaactacacagatttagtgatgaagggatggaggtgatcgagcggctcatctacctctatcacaagttccatcagctaaaggtcagcaacgaggagtatgcttgcatgaaagcaattaacttcctaaatcaagatatcaggggtctgaccagtgcctcacagctggaacaattgaataaacgatactggtacatttgccaggattttactgaatataaatacacacatcagccgaaccgctttcctgatctcatgatgtgcttacctgagattcgatatattgcaggaaagatggtgaatgtgcccctggagcagctgcccctcctctttaaggtggtgctgcattcctgcaagaccagtgtgggcaaggaatgacctgttccaggcgccctcctcaggccaaccacagcgtcttgggtgggcaggacaggctctggagggaaaagccagagagaccaagatggaggctgtggagcagcatttcccgttgcctccatagcaagaagagtttttgtttgtttgtctgtttttttaacctcatttttctatatatttatttcacgacagagttgaatgtatggccttcaacatgatgcacatgcttttgtgtgaatgcagccaatgcattttcttacagtttacagaatgtgaagatgtttaatgttacagtgttgtcattgtttagaaatagttcttttgtattttgagggagagggtgggatggggctaagatgactatttccataatgttgacaaagatgactacctcaatggaaatggggggtgtggccatccctactttttccacattttctcagcagactcatacatttgtctgtcagagagcaaattgccaaaaaaagccacagaattgccagataaaatggcacactgtaagggcgcaaagtgttgttaggagattcactaagcaaggttggtgagacggcaacagggtaggaggtgaggattgagccacgtcctttccttggaaagcgtgaaaattaagagagtagggcacagtgaccatatttaaggcaggtgtccttccacccaacaagtcctaagggcagaagaatttctgttctcacaccttgctgccccccttacccctgcaccaccatcattgtctaccactgcgaactttccatctaggcaaagtcctggcaatcacttgatccacaggactcgcctcccagctccctcggggcccccagctacctagtttccttacctggatctcctgaggcccaccttcctccttcccactcccttacacatttgacttcctattggccctttgaaaaaccagctgagcagaatgccatgttctgaagcctggtgcccactactgatttattctcctttcaccttgttttcttcaaagggtagtagggcaaggccagactgcaaaaagaatagacactccccttttgaaatctgttcctctcccctccccttcctaccgcaccctcaggtctaaatccgaaaacttcaggcttttttaaacaatgagaaggaccattcacctgtctgctgaccagaaatgttgcccctaagttcttctccaagttctccttttctctccagagtgagaccagttttcctcagggacccaggacacaaagcccaaggcccagagtggctcagctgccccttacttcagcagtggactggccagccaaggcctggagggctggagccagaagcacctggaagggaaggggggctttaaactacctcaggttcctaatggcccggctgctacctctgcagacatggcctggactccttgacctctcactacctgccccaccttatcccaggacgtgttccttaccctcttgactttggccagcgctacaccaggtctgtctttgaactctttcaggtgcttgtcctgcctacacccaggtatctttcacagccagtgtggcaagcagaccacttagttggctgcatgcctgggtaggttggaagggcccacggcaccttcttctgcctatttagtcaaaggctgtttgctgtctcctcaactcaacctagtaaagctacccaggagggcaccacgtcgtgtgcatactgggtagtccatgtctgattgtaattgtttctttctggtgaaatgttacgggtaccagcagagtgatgattttggcccttgatggatctaaaactcggaacattactcctcaatgccgtttccccagttgctctgagaaggaagagacatgttcctcaggaaaagctccagctagcatgtttttcacgtcagtgggaagattcttgtgtgttcgtgtgtatctgtttatttctaagttcacgatacttgttcccctgaattttatttaaccaactagatcacattctttggccacaggtcagactctgagctgctttcctccagatcgggaaggagacacatatcacagatgccttctctaagacagctcctgtgtacagcatcgttctttgctgaggcctctatctgtccaattattatttttgaaattgcttttcaaattaaacattttacccgttgtgttgggtgtcaaaagaaattgctctctgatgaggcaagaacatgtctctccaacaacgtagtattgaacagagcaagttgttaatttgtggagtaggggaaaggttctgcaagttgccattgtacaaatccagttttacaaatgtttgcagcagattccacagacaaagagcccattcattgccgagagccctgcagaatctcagagcaaagtggctgtgtgttccgagccggagcctgacctgtggaccgtctttaatgtcttctgcaccagtccttttatgacgtgggctttttttaaacagggtaaagtgaatgtgttgcattgcaaactcaggtattatgaggagaaggtaggagtgtagctagcagcgtggagacattaggtcagccactagatgtatttgtgaatttggtttgaaggacacggagaaaggttggaggggaggttggtgtgtttgttttttgctttcttccccataatgtttggttaacaggtagcctttttgcgagtggaaggagagaaaagttgtgcatgttttctctaatttctctttctgccctctctctgatccccaaccaccaaaagcactcactttgagtgaggatttttttttttttttttttttttttgggggggggagtcccccttggggccccgggggggggtgcggggg

SEQ ID NO: 71990 - DNA, 4202 bp, Homo sapiens
catggctgcaatagaacttttcagcagactacaagaagcatgaaatggagacatgggaagtttctgtttcagatgatcgggctgaacaacgaacctgtctcatttgtggggaccgcgctacaggcttgcactatgggatcatctcctgtgagggctgcaaagggtttttcaagcggagcatttgcaacaaacgggtatatcgatgcagtcgtgacaagaactgtgtcatgtctcggaagcagaggaacaggtgccagtactgccgcctgctcaaatgcctccagatggggatgaaccggaaggctatcagagaagatggcatgcctggaggccggaataagagcattgggccagtccagatatcggaagaagaaatcgaaaggatcatgtctgggcaggagtttgaggaagaggccaatcactggagcaaccatggtgatagtgaccacagttcccctgggaacagggcttcggagagcaaccagccctcaccaggctccacactgtcttccagtaggtctgtggaactgaatggattcatggccttcagggaacagtacatgggaatgtctgtgcctccacattaccaatatataccgcacctttttagctattctggccactcaccacttctgccccaacaagctcgcagcctggatccccagtcatacagtctgattcaccagctgttatcagccgaggacctggaaccattgggcacgcccatgttgattgaagatggatacgctgtgacacaggcagaactatttgccctgctttgccgcctggccgacgagctgctctttaggcagattgcctggatcaagaaactgcctttcttctgcgagctctcaatcaaggattacacgtgcctcttgagctctacgtggcaggagctaatcctgctgtcttccctcaccgtttacagcaagcagatctttggggaactggctgatgtcactgccaagtactcgccctccgatgaagaactacacagatttagtgatgaagggatggaggtgatcgagcggctcatctacctctatcacaagttccatcagctaaaggtcagcaacgaggagtatgcttgcatgaaagcaattaacttcctaaatcaagatatcaggggtctgaccagtgcctcacagctggaacaattgaataaacgatactggtacatttgccaggattttactgaatataaatacacacatcagccgaaccgctttcctgatctcatgatgtgcttacctgagattcgatatattgcaggaaagatggtgaatgtgcccctggagcagctgcccctcctctttaaggtggtgctgcattcctgcaagaccagtgtgggcaaggaatgacctgttccaggcgccctcctcaggccaaccacagcgtcttgggtgggcaggacaggctctggagggaaaagccagagagaccaagatggaggctgtggagcagcatttcccgttgcctccatagcaagaagagtttttgtttgtttgtctgtttttttaacctcatttttctatatatttatttcacgacagagttgaatgtatggccttcaacatgatgcacatgcttttgtgtgaatgcagccaatgcattttcttacagtttacagaatgtgaagatgtttaatgttacagtgttgtcattgtttagaaatagttcttttgtattttgagggagagggtgggatggggctaagatgactatttccataatgttgacaaagatgactacctcaatggaaatggggggtgtggccatccctactttttccacattttctcagcagactcatacatttgtctgtcagagagcaaattgccaaaaaaagccacagaattgccagataaaatggcacactgtaagggcgcaaagtgttgttaggagattcactaagcaaggttggtgagacggcaacagggtaggaggtgaggattgagccacgtcctttccttggaaagcgtgaaaattaagagagtagggcacagtgaccatatttaaggcaggtgtccttccacccaacaagtcctaagggcagaagaatttctgttctcacaccttgctgccccccttacccctgcaccaccatcattgtctaccactgcgaactttccatctaggcaaagtcctggcaatcacttgatccacaggactcgcctcccagctccctcggggcccccagctacctagtttccttacctggatctcctgaggcccaccttcctccttcccactcccttacacatttgacttcctattggccctttgaaaaaccagctgagcagaatgccatgttctgaagcctggtgcccactactgatttattctcctttcaccttgttttcttcaaagggtagtagggcaaggccagactgcaaaaagaatagacactccccttttgaaatctgttcctctcccctccccttcctaccgcaccctcaggtctaaatccgaaaacttcaggcttttttaaacaatgagaaggaccattcacctgtctgctgaccagaaatgttgcccctaagttcttctccaagttctccttttctctccagagtgagaccagttttcctcagggacccaggacacaaagcccaaggcccagagtggctcagctgccccttacttcagcagtggactggccagccaaggcctggagggctggagccagaagcacctggaagggaaggggggctttaaactacctcaggttcctaatggcccggctgctacctctgcagacatggcctggactccttgacctctcactacctgccccaccttatcccaggacgtgttccttaccctcttgactttggccagcgctacaccaggtctgtctttgaactctttcaggtgcttgtcctgcctacacccaggtatctttcacagccagtgtggcaagcagaccacttagttggctgcatgcctgggtaggttggaagggcccacggcaccttcttctgcctatttagtcaaaggctgtttgctgtctcctcaactcaacctagtaaagctacccaggagggcaccacgtcgtgtgcatactgggtagtccatgtctgattgtaattgtttctttctggtgaaatgttacgggtaccagcagagtgatgattttggcccttgatggatctaaaactcggaacattactcctcaatgccgtttccccagttgctctgagaaggaagagacatgttcctcaggaaaagctccagctagcatgtttttcacgtcagtgggaagattcttgtgtgttcgtgtgtatctgtttatttctaagttcacgatacttgttcccctgaattttatttaaccaactagatcacattctttggccacaggtcagactctgagctgctttcctccagatcgggaaggagacacatatcacagatgccttctctaagacagctcctgtgtacagcatcgttctttgctgaggcctctatctgtccaattattatttttgaaattgcttttcaaattaaacattttacccgttgtgttgggtgtcaaaagaaattgctctctgatgaggcaagaacatgtctctccaacaacgtagtattgaacagagcaagttgttaatttgtggagtaggggaaaggttctgcaagttgccattgtacaaatccagttttacaaatgtttgcagcagattccacagacaaagagcccattcattgccgagagccctgcagaatctcagagcaaagtggctgtgtgttccgagccggagcctgacctgtggaccgtctttaatgtcttctgcaccagtccttttatgacgtgggctttttttaaacagggtaaagtgaatgtgttgcattgcaaactcaggtattatgaggagaaggtaggagtgtagctagcagcgtggagacattaggtcagccactagatgtatttgtgaatttggtttgaaggacacggagaaaggttggaggggaggttggtgtgtttgttttttgctttcttccccataatgtttggttaacaggtagcctttttgcgagtggaaggagagaaaagttgtgcatgttttctctaatttctctttctgccctctctctgatccccaaccaccaaaagcactcactttgagtgaggatttttttttttttttttttttttttgggggggggagtcccccttggggccccgggggggggtgcggggg

SEQ ID NO: 71991 - DNA, 1765 bp, Homo sapiens
agggaactcctgctcctgccgggccagccacagacccccgtcttccccagcacccatgacccccggacggtgaccctggacttccggaacgcggggatcccagcccctccaccaccccttcccccccagccacccccacccccacctcccccacctgtagagcccaccaagctgccctttaaggagctagacaaccagtggccctccgaggccattcctccgggcccccgtgggcgcgatgaggtcactgaggaatacatggagttggccaagagccgggggccgtggcgccggccacctaagaagcgccatgaggacctggtgccacctgcgggctcgcccgaactctcgccaccccagcccctcttccggccccgctcggagtttgaggagatgaccatcctgtatgacatctggaacggtggcatcgatgaggaggacatccgcttcctgtgtgtcacctacgagcgactgctacagcaggacaatggcatggactggcttaacgacacgctctgggtctaccatccctatatcctgctggcatggggggctctgcaccttctgggatgcaggaagtccctgctcacctctctgggccccaccacccagtctgtagcagcccgcggtgcccatgaaggtgacagcatgcaccaccgtcacttcccaagcagggtttgtgtcccggcaccatgccaggctcccgagtgaatcattggcacgttttaaggactccctctgcgccaggcccatctcacccccagagttagcaggtctcagggtcacatgtaacagcagtgccgtgcagcttaacagcacacacgggcgcagggcctccttgtcctgtccccttcataacctcaggtaatcccagtagcctggtgaagatgggggctatgattcccattttacatatgaagaagctaaggctcagagaggttcagtgacctgtccaaagacacagctacaggtggcagagttgagatttgaacccaggcaaacctggctctagagtccaggctcttcaccaccaggctttcatgaggcttggctgttcacataggccagtgaggctagacctctcattatccctgctgtattagactgatttgtgagcactcagtttgtgtcaagagctctgctcaagtgccgggcaccatggctcacagctgtaatcccagcactatgggaggctgaggcggacggatcactcgaggccagaagtttgagaccagcctggccaacatggcaaaaccccatttctactaaaaatacaaaaattagccgggtgtggtagcacatgcctataattccagctactctggaggctgaggcaggagaattgcttgaacccgggaggcacaggttgtagtgagccaagatcgcaccactgcactccagcctgggtgacagaacaagactctgtctcaaaaaaaaaacaaaactctgctaaggaccataagcatatttcatcacttgcagagaggcatcactgtcaccccaatttacagatgggaaactgagcagaaagttgttaaaacacccagcactttgggaggccgaggtggatggatcacttgatctctggaggttgaagccagcctgggaaacatagcaaaaccccatctctacaaaaaaaatccagaaattagttgggtgtggtggcgcacgcctgtagccccagctgctcagaaggctgaggctgcagtaagctgagattgcaccactgcactcgagcctgggcaacaggagaccctgtctcaaa

SEQ ID NO: 71992 - DNA, 724 bp, Homo sapiens
agggaactcctgctcctgccgggccagccacagacccccgtcttccccagcacccatgacccccggacggtgaccctggacttccggaacgcggggatcccagcccctccaccaccccttcccccccagccacccccacccccacctcccccacctgtagagcccaccaagctgccctttaaggagctagacaaccagtggccctccgaggccattcctccgggcccccgtgggcgcgatgaggtcactgaggaatacatggagttggccaagagccgggggccgtggcgccggccacctaagaagcgccatgaggacctggtgccacctgcgggctcgcccgaactctcgccaccccagcccctcttccggccccgctcggagtttgaggagatgaccatcctgtatgacatctggaacggtggcatcgatgaggaggacatccgcttcctgtgtgtcacctacgagcgactgctacagcaggacaatggcatggactggcttaacgacacgctctgggtctaccatccctccaccagcctctcttcagctaagaagaagaaacgggacgatggcatccgcgagcacgtgacgggctgtgcccgcagtgagggcttctacaccatcgacaagaaggacaagctcagatacctcaacagcagccgtgccagcaccgatgagcccacaatgtatgggtactttgaacccggaagaagaaaatgat

SEQ ID NO: 71993 - DNA, 1198 bp, Homo sapiens
tctgaattaattaggtattggtaaaatatatttttaaatttagttagctttataaacacaattagaattacaattaattaacagaggtataattgtctcactttcagaagtgatcatttatttttatttagcacaggtcataagaaaaatatatagaaaaataatcaatttcatatataaaaggattatttctccacctttaattattggcctatcatttgttagtgttatttggtcatattattgaactaatgtattattccattcaaagtctttctagatttaaaaatgtatgcaaaagcttaggattatatcatgtgtaactattatagataacatcctaaaccttcagtttagatatataattgactgggtgtaatctcttttgtaatctgttttgacagatttcttaaattatgttagcataatcaaggaagatttaccttgaagcactttccaaattgatactttcaaacttattttaaagcagtagaaccttttctatgaactaaatcacatgcaaaactccaacctgtagtatacataaaatggacttacttattcctctcaccttctccagtgcctaggaatattcttctctgagccctaggattgattctatcacacagagcaacattaatctaaatggtttagctccctcttttttctctaaaaacaatcagctaataaaaaaaaaatttgagggcctaaattatttcaatggttgtttgaaatattcagttcagtttgtacctgttagcagtctttcagtttgggggagaattaaatactgtgctaagctggtgcttggatacatattacagcatcttgtgttttatttgacaaacagaattttggtgccataatattttgagaattagagaagattgtgatgcatatatataaacactatttttaaaaaatatctaaatatgtctcacatatttatataatcctcaaatatactgtaccattttagatattttttaaacagattaatttggagaagttttattcattacctaattctgtggcaaaaatggtgcctctgatgttgtgatatagtattgtcagtgtgtacatatataaaacctgtgtaaacctctgtccttatgaaccataacaaatgtagctttttaaagtccattgtattgttttttctttcaataaaagagtataattaattggttgtttttga

SEQ ID NO: 71994 - DNA, 739 bp, Homo sapiens
aagagcagggagaaggcacaggtgtggagatcccaggactggtacagtgggtcttgttggagaaatgcttcatgcggctagaaaacgagatcacgttcctttcagaaaaatgtcactcataatgaaagaaatgcactggagaacccaacacccaacttttccctctcatatcattaaaaggtgaaatctcttattgccggcaagagtgtatggtgatgacactctcaggccctgctggtgttggaaaaaccatttgtggcaatgccacttcctaagaaaaacgtatcaatcatttgcaatgttcaccattgataaaaaaagagatatgcaatcagtgaaatgcataacattgataatctgcctacattaatgtgcttttgtttactgtatgtaatacacgcttattaaaaaaatttcaaaaaatactaaaatgtacaaaaaaaaaaaaaaaaccaaaacatttataatcccgctgagagataaccactgttagtctttaagtgcttaaaaatgtatttgaaggtattatgggtgtatatatattaaagcttattctttaagagaaacgcacactcattaaagtataaagaaaaattgtccagaatacctaccagaaaaactgctaatattttgatatgtaattagtttaaaaaaaatatttgaggctgggcgcagtggctcacacctgtaatctcggagctttgtgaggctgaaccaggaggatttcttgaggccagga

SEQ ID NO: 71995 - DNA, 437 bp, Homo sapiens
caaggctgcagggggctgtgacagcaccactacactccagcctgggccacagagtgagaccctgtctcaaaaacaaaacaaaactatgaactatgactccattaaaatttaaaattaataatgagatttacagttacagcaaagaatgtaaaaatgaaaaacaagcttcacaatttaaaataatataactaatgggctgggacaaaaatcctagagcttgttgacaactcagtaggggctgagcggccagtgtaagtgagctaatttccttgtctttcacagcaagaagtcaatattcactttgttttttaaagttaatcaaaatattaaaagtttttaaagtttatcctttaaaatacaaaagtggccaggtggagtggtatgtgcctgtagtcctaactacttgggaggcagaggtgggaggatcacttgagccc

SEQ ID NO: 71996 - DNA, 547 bp, Homo sapiens
tttcctagtaaaggatgtatttcactcatggtactgtaatgataaatcccattttcaggttaagactgcatctggagtattgaaacttggagccactttctaagagggtaaataggaggataagaagtctttaaccatttctattgaggataggctgctgtaattactgtggaaaagagaaggcttactggggggctatgagaaggcagaagtagaacatttgttctacttgggtgatgaattagaagtggaaaaagatgagaggcaaagacaaagacagctcctagaattgaagcctcttacaccaagcatggtgtaagttgccgtgcaaagaagtgagttcccaaacgctgtgagtactttagcagaggtggctccataccagggactaaggattcctgcttgggataaaagagtagaagactcttgagcaactttctgatggataatttgtggggaaagtattccttgatatattctttctaactaggtataaagaattggagccactatttgttgattttagaaatagtcaaagaaaaaaaaa

SEQ ID NO: 71997 - DNA, 260 bp, Homo sapiens
tgataagaagcgaattcagggctttttctttagactataagtggttattagaaataaattatcctcatattgaactccaattgtcatgttttcccttccctgtgtctttcaagtagttaaaaagcttgttaacatgaaagtagaataattaaagtaaaatccttgccaaatgtttctaaaataaaagcagccatgttctcatttcagttttgttcaagtaatcattttaatgtcagtagctataaaaaggggagaagtac

SEQ ID NO: 71998 - DNA, 405 bp, Homo sapiens
taccttcaatatttactgggcttttttttttttctccatagatgcccaagtagctcttaccttaaaagccagtaaatattgaaggtacaagaaagagaggaggggaaaacctgagtagaaaaatggtggcatccagggggtgcacaatttttgcaaggggagtgaaggaacgaatgaactgcagaaagactcacttgatataaaggcggcttcaggagcccttatgctaattggctccagtagttttataatgaataaaatagtctttgagctaagggcaataccactccttcatatgcacaggatcttggacctctgttttctttggactctgaggtatttttcacttatttccaggttcctggttgtggttgttggaattctgcctgccagattagaggggag

SEQ ID NO: 71999 - DNA, 836 bp, Homo sapiens
cactggggccgctgagtggaccactgtagaaagcaatggttcttgtttcttattttttacattattttcagggatgtgtgtcccatcaaagtctcattatggaggagttgaattttcccgggacacctgtggcagggctgccagacaccagcctaaactgctctcactctcatttccagaccaagggcctctggcggcctgtagggagccatgggcaatcacagcaaccctctctgaggccaaggaagttcaggtatgagctgtacctgaggctgccctggcctctcctctcccgtcagtcctcactgggtgtcttctcaccctgccctctgccagctccactgctttccctgctgggtttcattgcttgtgcaaggaagatacggaagccacacaatgggttggttctttctagcccttcccagactgactataggccagcggggtctgtatctagaaatcttttattactctaagttgaacagtttaatgattagtcattttaatttagagttgagattccattagtatttgactgtggccttcttattgagaactctgttcaactttgaaatgccaaagcaggagcctttgttctttgatcctgccgtgagttaagaaattctgtatttcttcagaagtgtttcattttgtgtaatgaagtcaagggttagagtgactcagtgttccatgagttaagtgtctttgtagaatgaacagtaaacttatctcctaataattctgcgttaattacaattacactgcctgtctctggggatcatcagaaaaagatactgtttcttaatttattcctaaggcttaaaaaaaaaagttag

SEQ ID NO: 72000 - DNA, 428 bp, Homo sapiens
ttcacagttatagttggggacattaacaaccctttctcaataattgatagactactaaataaaaaaccatgaaggatatacaagaactgtacaacactggccgggtgtggtggctcatgcctgtaatcccagcactttgggaggctgaggcgggtggatcacttgaggtcaggagttcgagaccagcctagccaacatggcgaaaccacatctctactaaaaatacaaaaaaattaggctggctgtggttggcttaatgcctgtaatcccagcactttgggaggccaaggtgggcatatcacctgaggtcaggagtttgagaccagcctgaaaaacatggtgaaacccatctctactaaaaatacaaaaattagctgggtgtggtgcgtctgaaaaaataagtaaactccgtctcaaaaaataaataa

SEQ ID NO: 72001 - DNA, 455 bp, Homo sapiens
aagggtaggaggaaaggcaaagcaagctgcacaaagggaagatggcccgtagccttgaaatgcactcttgctagccctccccattttggttattatcagcaaagatcagtgacatgttaatatattcggctattttactgtgaatataatggtaaattttaatagaaattgagttagatagcagtttctgaatctgaaagaaagtgacattgcttgcgaatgctcacagtagcacttaacattgtgaagttcaactcaatttttatttgctgtttcacagaaagcaataatccctcatattttatagtaccatctggggttacaaaaatcccgatgcgtctttgttgggacaagccgggatctcagggaagggagtgggagggggagcttcatcttcagtgggctttctgccctggaatttggaatttttttaaccagggcaggctttttaaggc

SEQ ID NO: 72002 - DNA, 466 bp, Homo sapiens
ggtaagatattgtgaataattttttattattaaaaattttttttaggtagcatgtaatccacataaataaaaaactcaagaataaactgggacagaggatttcttccagagtgctacatggcaaaagagccttcaggaacgtgtgcaggggtgtcatgatactccgaaggtgtcagtagttttggtcagcccacagtgagcagggcagcctcaagggagagccccttacatccttttctgggcacctctgtctaattaagttcaaacatacaagcctgattctaggattaaggcataagttagttctgaacagaaaaatataaggcagttcacatacacaatgaattcttgaagaaagaacctatagcccccagaccgataataaataattactgcctgccaaaatcctgaagaaagggaagcatgggggctccaaaattaatagtctcctgagaatacttatgag

SEQ ID NO: 72003 - DNA, 346 bp, Homo sapiens
ccaagttttggcttttctgaattcttttcattcttgccgaattggcaatgcatttaaaaaggtttagacatttagccaggcatggtgtctcatggctgtaattccagcactttgagaggccaagatggggggattgcttgagaccaggagttcaagaccagcctgggcaacacagagagacccccatccctccacaacatttaaaaaaattagccggttgtagtggtgcacacctgtaatcctagctactaaggaggctggggcaggaggattgcttaagcctagaagttgcagtgagctatgatcatgccacaacctgggtgacagagggaggccctgtttctaa

SEQ ID NO: 72004 - DNA, 572 bp, Homo sapiens
ctagatccacagccccaaaatcttaactagagatgtatttcctaagttgaaatttagtaatgggggtcattcattgcagagttctgctaaaaattggcagtaactatacataattgttttttccttagttttctgttaagcatctgctgtgtgcaggatgcttctgcagaaatccttaagtctctgtaagcttattagttttgaagtaagttataggacaaactcttgagatgaaataaatgtgtacacagacccctctaaaactgttttcagcctttgcactattgacatcttggaccagataattctttgtaatggggagatgtttagcagcatcgctggcttctacccagtagagatagtaacactccacttccctcagtcatgacagtaaaaatgtctccagacattgccaaatatcttttgggggacaaaatcacccaggaaagaaccacccttctagaacttcaaggacccaattaacatcaatcttcagaaaagatagatatttaaagctcttgtaattatgattgccgaagtactggtttaggctttttgaatttttaaatata

SEQ ID NO: 72005 - DNA, 1927 bp, Homo sapiens
  misc_feature (1735)..(1735): n is a, c, g, or t
  misc_feature (1744)..(1744): n is a, c, g, or t
  misc_feature (1753)..(1753): n is a, c, g, or t
  misc_feature (1764)..(1764): n is a, c, g, or t
  misc_feature (1767)..(1767): n is a, c, g, or t
  misc_feature (1790)..(1790): n is a, c, g, or t
  misc_feature (1800)..(1800): n is a, c, g, or t
  misc_feature (1805)..(1805): n is a, c, g, or t
  misc_feature (1842)..(1843): n is a, c, g, or t
  misc_feature (1848)..(1848): n is a, c, g, or t
  misc_feature (1854)..(1854): n is a, c, g, or t
  misc_feature (1877)..(1877): n is a, c, g, or t
  misc_feature (1887)..(1887): n is a, c, g, or t
  misc_feature (1890)..(1890): n is a, c, g, or t
  misc_feature (1892)..(1892): n is a, c, g, or t
  misc_feature (1907)..(1907): n is a, c, g, or t
  misc_feature (1909)..(1909): n is a, c, g, or t
  misc_feature (1915)..(1915): n is a, c, g, or t
agctggagcgttcggtggacagtgagcatgcgtaccatatctgaagttcgtaaattgaaattgaacatgcgtaattaatctttctgaataggaaaaaatatatacacaacaaaactctccgtttatggaacatgcgcatttgttctcagtaagtttttcgttttgaaagtgagcatgcgcatggtgagtaggttggtccgaagtttgaaccggacagaagcgctggtcggcgtctggcggttgtttttagaggtaatacacctagtttgtggctcagcatgtcaattgtaacagtgcaacttggtcagtgtggcaatcagattggttttgaagtttttgatgctttgcttagtgactcacacagttcccagggactctgctctatgagagagaatgaggcatatcaagcatcttgcaaagaaagattcttcagtgaggaggagaatggagttccaattgcccgggctgttcttgttgacatggaacccaaagttatcaatcaaacgctgtcaaaggctgcccagtctggccaatggaaatatggtcaacatgcatgcttctgtcaaaaacaaggttctggaaacaactgggcatatggttactctgttcatggacccaggcatgaagaatctataatgaacataatccggaaggaagtggagaaatgtgactctttcagtggttttttcatcataatgagtatggctgggggcacaggatcaggattaggagctttcgttacacagaatttagaagatcagtactcaaactcattgaaaatgaatcagattatttggccttatggaactggtgaggttattgttcaaaactacaactccattttgacactttctcacttgtaccgatcttcagacgccctccttcttcatgagaatgatgccatccataagatctgtgcaaaactgatgaatatcaagcagatctcctttagtgatatcaatcaagtcctcgcacatcagctgggaagtgtgttccagcctacttattctgcagaaagctcatttcactacagacgaaatccactaggagacttaatggagcatttagttccccatcctgaattcaagatgctgagtgttcgtaacattcctcacatgtctgagaattcattggcatacaccacatttacttgggctggcctcctcaagcatttgagacagatgctcatttctaatgcaaagatggaagaaggtattgataggcatgtatggcctcctttatcaggacttcctcctcttagtaaaatgtctctcaacaaggacctgcattttaacacttccattgctaacttggtcattcttcgtgggaaagatgtgcaaagtgcagatgtggagggatttaaagatccagctctgtatacttcctggttgaagcctgttaatgctttcaacgtgtggaaaacccagcgggcctttagcaaatatgagaagtctgcagtgttggtcagcaacagccagttcttagtaaaaccacttgatatgattgttgggaaggcatggaatatgtttgcttcaaaagcctacattcatcagtacacaaaatttggaatcgaagaagaggactttttagacagtttcacgtcattagagcaggttgttgccagttactgtaatctctgatcttgaacaatgggaaaagtataccttaaggcatttctggactaaaatattttcaatactattttctctgtaaagttttcaaagttctccatccnggctaacanggtgaaacnccgtctctacnaanaatacaaaaaattagccaggcgnggtggcgggngcctntagtcccagctactcgggaggctgaggcaggagaatnncgtgnacccangaggcggagcttgcagtgagccnagatcgcgcnacngnactccagcctgggcnanagagcnagactccgtctc

SEQ ID NO: 72006 - DNA, 235 bp, Homo sapiens
ctttcgatgtttttgggtttttttccccctctagttccaattgcccgggctgttcttgttgacatggaacccaaagttatcaatcaaacgctgtcaaaggctgcccagtctggccaatggaaatatggtcaacatgcatgcttctgtcaaaaacaaggttctggaaacaactgggcatatgggtaagaataatttcttgtgattttcagtttagtgacagctacacagtcaatta

SEQ ID NO: 72007 - DNA, 1827 bp, Homo sapiens
  misc_feature (1635)..(1635): n is a, c, g, or t
  misc_feature (1644)..(1644): n is a, c, g, or t
  misc_feature (1653)..(1653): n is a, c, g, or t
  misc_feature (1664)..(1664): n is a, c, g, or t
  misc_feature (1667)..(1667): n is a, c, g, or t
  misc_feature (1690)..(1690): n is a, c, g, or t
  misc_feature (1700)..(1700): n is a, c, g, or t
  misc_feature (1705)..(1705): n is a, c, g, or t
  misc_feature (1742)..(1743): n is a, c, g, or t
  misc_feature (1748)..(1748): n is a, c, g, or t
  misc_feature (1754)..(1754): n is a, c, g, or t
  misc_feature (1777)..(1777): n is a, c, g, or t
  misc_feature (1787)..(1787): n is a, c, g, or t
  misc_feature (1790)..(1790): n is a, c, g, or t
  misc_feature (1792)..(1792): n is a, c, g, or t
  misc_feature (1807)..(1807): n is a, c, g, or t
  misc_feature (1809)..(1809): n is a, c, g, or t
  misc_feature (1815)..(1815): n is a, c, g, or t
agctggagcgttcggtggacagtgagcatgcgtaccatatctgaagttcgtaaattgaaattgaacatgcgtaattaatctttctgaataggaaaaaatatatacacaacaaaactctccgtttatggaacatgcgcatttgttctcagtaagtttttcgttttgaaagtgagcatgcgcatggtgagtaggttggtccgaagtttgaaccggacagaagcgctggtcggcgtctggcggttgtttttagagtgactcacacagttcccagggactctgctctatgagagagaatgaggcatatcaagcatcttgcaaagaaagattcttcagtgaggaggagaatggagttccaattgcccgggctgttcttgttgacatggaacccaaagttatcaatcaaacgctgtcaaaggctgcccagtctggccaatggaaatatggtcaacatgcatgcttctgtcaaaaacaaggttctggaaacaactgggcatatggttactctgttcatggacccaggcatgaagaatctataatgaacataatccggaaggaagtggagaaatgtgactctttcagtggttttttcatcataatgagtatggctgggggcacaggatcaggattaggagctttcgttacacagaatttagaagatcagtactcaaactcattgaaaatgaatcagattatttggccttatggaactggtgaggttattgttcaaaactacaactccattttgacactttctcacttgtaccgatcttcagacgccctccttcttcatgagaatgatgccatccataagatctgtgcaaaactgatgaatatcaagcagatctcctttagtgatatcaatcaagtcctcgcacatcagctgggaagtgtgttccagcctacttattctgcagaaagctcatttcactacagacgaaatccactaggagacttaatggagcatttagttccccatcctgaattcaagatgctgagtgttcgtaacattcctcacatgtctgagaattcattggcatacaccacatttacttgggctggcctcctcaagcatttgagacagatgctcatttctaatgcaaagatggaagaaggtattgataggcatgtatggcctcctttatcaggacttcctcctcttagtaaaatgtctctcaacaaggacctgcattttaacacttccattgctaacttggtcattcttcgtgggaaagatgtgcaaagtgcagatgtggagggatttaaagatccagctctgtatacttcctggttgaagcctgttaatgctttcaacgtgtggaaaacccagcgggcctttagcaaatatgagaagtctgcagtgttggtcagcaacagccagttcttagtaaaaccacttgatatgattgttgggaaggcatggaatatgtttgcttcaaaagcctacattcatcagtacacaaaatttggaatcgaagaagaggactttttagacagtttcacgtcattagagcaggttgttgccagttactgtaatctctgatcttgaacaatgggaaaagtataccttaaggcatttctggactaaaatattttcaatactattttctctgtaaagttttcaaagttctccatccnggctaacanggtgaaacnccgtctctacnaanaatacaaaaaattagccaggcgnggtggcgggngcctntagtcccagctactcgggaggctgaggcaggagaatnncgtgnacccangaggcggagcttgcagtgagccnagatcgcgcnacngnactccagcctgggcnanagagcnagactccgtctc

SEQ ID NO: 72008 - DNA, 1823 bp, Homo sapiens
  misc_feature (1631)..(1631): n is a, c, g, or t
  misc_feature (1640)..(1640): n is a, c, g, or t
  misc_feature (1649)..(1649): n is a, c, g, or t
  misc_feature (1660)..(1660): n is a, c, g, or t
  misc_feature (1663)..(1663): n is a, c, g, or t
  misc_feature (1686)..(1686): n is a, c, g, or t
  misc_feature (1696)..(1696): n is a, c, g, or t
  misc_feature (1701)..(1701): n is a, c, g, or t
  misc_feature (1738)..(1739): n is a, c, g, or t
  misc_feature (1744)..(1744): n is a, c, g, or t
  misc_feature (1750)..(1750): n is a, c, g, or t
  misc_feature (1773)..(1773): n is a, c, g, or t
  misc_feature (1783)..(1783): n is a, c, g, or t
  misc_feature (1786)..(1786): n is a, c, g, or t
  misc_feature (1788)..(1788): n is a, c, g, or t
  misc_feature (1803)..(1803): n is a, c, g, or t
  misc_feature (1805)..(1805): n is a, c, g, or t
  misc_feature (1811)..(1811): n is a, c, g, or t
agctggagcgttcggtggacagtgagcatgcgtaccatatctgaagttcgtaaattgaaattgaacatgcgtaattaatctttctgaataggaaaaaatatatacacaacaaaactctccgtttatggaacatgcgcatttgttctcagtaagtttttcgttttgaaagtgagcatgcgcatggtgagtaggttggtccgaagtttgaaccggacagaagcgctggtcggcgtctggcggttgtttttagttccaattgcccgggctgttcttgttgacatggaacccaaagttatcaatcaaacgctgtcaaaggctgcccagtctggccaatggaaatatggtcaacatgcatgcttctgtcaaaaacaaggttctggaaacaactgggcatatggtagagacaaggattcagcatgttacccagactggtctggaactcctggcctccagtgatccacctgcctcggcctcccaaagtgctgagattacagttactctgttcatggacccaggcatgaagaatctataatgaacataatccggaaggaagtggagaaatgtgactctttcagtggttttttcatcataatgagtatggctgggggcacaggatcaggattaggagctttcgttacacagaatttagaagatcagtactcaaactcattgaaaatgaatcagattatttggccttatggaactggtgaggttattgttcaaaactacaactccattttgacactttctcacttgtaccgatcttcagacgccctccttcttcatgagaatgatgccatccataagatctgtgcaaaactgatgaatatcaagcagatctcctttagtgatatcaatcaagtcctcgcacatcagctgggaagtgtgttccagcctacttattctgcagaaagctcatttcactacagacgaaatccactaggagacttaatggagcatttagttccccatcctgaattcaagatgctgagtgttcgtaacattcctcacatgtctgagaattcattggcatacaccacatttacttgggctggcctcctcaagcatttgagacagatgctcatttctaatgcaaagatggaagaaggtattgataggcatgtatggcctcctttatcaggacttcctcctcttagtaaaatgtctctcaacaaggacctgcattttaacacttccattgctaacttggtcattcttcgtgggaaagatgtgcaaagtgcagatgtggagggatttaaagatccagctctgtatacttcctggttgaagcctgttaatgctttcaacgtgtggaaaacccagcgggcctttagcaaatatgagaagtctgcagtgttggtcagcaacagccagttcttagtaaaaccacttgatatgattgttgggaaggcatggaatatgtttgcttcaaaagcctacattcatcagtacacaaaatttggaatcgaagaagaggactttttagacagtttcacgtcattagagcaggttgttgccagttactgtaatctctgatcttgaacaatgggaaaagtataccttaaggcatttctggactaaaatattttcaatactattttctctgtaaagttttcaaagttctccatccnggctaacanggtgaaacnccgtctctacnaanaatacaaaaaattagccaggcgnggtggcgggngcctntagtcccagctactcgggaggctgaggcaggagaatnncgtgnacccangaggcggagcttgcagtgagccnagatcgcgcnacngnactccagcctgggcnanagagcnagactccgtctc

SEQ ID NO: 72009 - DNA, 633 bp, Homo sapiens
gcccactgcaccctgcgttggagaggagctgacggagtgaggccgtgggaggtcgcagctggagaactccaggtgtgggctgctctagaggatgcttagaattgcgaggatgcagagtaaggtgtctccacccgtttccctggtgttatgaggtgcttcccatagtgtggagactaaaggtgtttatcacttaacagtatggcttccaagtttaactgtcccagaacccccctctccatgtaacacctggaaagttagttttcagtgaagtggccccactgtggctgaatccacccagctcctcacctgcaagttggcccacacgatgtgtcaagttggggacattaatgcttgttccacctgccctgggagacaagatcatagaagtgaaatgaccttgtaaacggcaaagtcctaagcaaatataatggtccttgttgagtcttttccgcattcatcactgatgtttgtctgacactgactgctgctccagaacccctcaggctgctgttggggagcgccaggacacacttgactcttgggcagttttaagtacgtttaaaattctcccgctgccagacgtggtgtactttaaagatgaattaaaatggatactttaaaagtaaaaaagct

SEQ ID NO: 72010 - DNA, 1142 bp, Homo sapiens
gtcagagcacagaggaggctcatatcacctcttccctctcctacttggcccagctgcttggaggaccgaccccatggctgagaatatgacggcaagaggaacagagtttgctccaagtgggaaagggtcccaagcagtccagagaagatgtctgtgtggctttccctccctgcctcccccagctcccacactggcctttgtaaataaatggcgtggtctttgttgtgaaaaaaaaaaaaaaaaaaaaaaaaaaaaaaaaaaaaaaaaaaaaaaaaaaaaaaaaaacaaaaaaaaaaaaaaaaaaaaaagagagagggggcgcgcgccgccagggagtcccccgggggggcaccaagaacgccgaccgacaccgctatgtttgtcggtagacacgaagagcggaggcggacgtaatagagaggaggggtgtgtgtatatatatatcaccgacagcgagcagcgaggcggcgccgcgcgcataaagacagaaaagagacgcgagcgggcggaccaggagcggcagagagcgggaggacaagaggagggggggaagagagacccaaaaagacacgagggaggggggaagacaaaatagaggaggcagcgccgaagaaggacgcaagagagagaggaagaagcagcgacgcgcgcggggggagagaaaaagaaagagagagcgccgacagagaacgcagaccaaagaccgagggagcgccaagcaccgggcgagaccggcaacaaaagagaggcgacgaggcgggccagagcaagagagaggagacacgagaccgacagcggcgcagagacgagagcaacaacgagagagaacgaactacccacgccaagggggagggaagggaaacgcgggaggagacaagagcgcggcgcgcggggcagcaggcagcgacagcgggggagacgggagacgccggagggggcggaggacgcgaggaagcggggcggggggaggccgcgagggcggcacggggcgcggaaccgggcggagcgagggggcgggagagacggaagggaagcggggagggaacaggcgaggcggggggggaggggcgaccgagggacgagccgggagaaaggaggcaggagccgggcagcccacgcaagaagaggagggaagagacgga

SEQ ID NO: 72011 - DNA, 1882 bp, Homo sapiens
ccgcggcgagtggagcgggagccgactggaagaagggctctagggagggggctgtggctgctggggtccgaggtggggccgggtacaccagccccatcactgtttgcagagagtcagggaggcggaaaagacacgcgctctaggctcccatcagggcacatggcccgggcccatcccccgcgcgtctccccggctgcggggcgcggggggctgccgggtgcgcttggctgtggcgcggcgcgttggagactttattgcgatgggacgataagaggggcgggggcggggtcctgggggccgaggcggcagcgctttaattaaaacggaaattgcggccccgggccgcgcgggggccggagggttccaagcggccccttagctggaagcgtttctccaggacccccccgcaacccccgccacgcccgggctgccccctcccgccaggccctgccggacccggcgccgtcttctcctccttgtcacccgcggtcgcttcgggcggggatcggtgccaccgagcgcaaagcctgcctcgccccccttccccgtcccccccatctcccaccgcccagtccccggcggcgatgagacagagcggcgcctcccagcccctgctgatcaacatgtacctgccagatcccgtcggagacggtctcttcaaggacgggaagaacccgagctgggggccgctgagccccgcggttcagaaaggcagcggacagatccagctgtggcagtttctgctggagctgctggctgaccgcgcgaacgccggctgcatcgcgtgggagggcggtcacggcgagttcaagctcacggacccggacgaggtggcgcggcggtggggcgagcgcaagagcaagcccaacatgaactacgacaagctgagccgcgccctgcgctactactacgacaagaacatcatgagcaaggtgcatggcaagcgctacgcctaccgcttcgacttccagggcctggcgcaggcctgccagccgccgcccgcgcacgctcatgccgccgccgcagctgctgccgccgccgcggccgcccaggacggcgcgctctacaagctgcccgccggcctcgccccgctgcccttccccggcctctccaaactcaacctcatggccgcctcggccggggtcgcgcccgccggcttctcctactggccgggcccgggccccgccgccaccgctgccgccgccaccgccgcgctctaccccagtcccagcttgcagcccccgcccgggcccttcggggccgtggccgcagcctcgcacttggggggccattaccactagacggggcggtcgggtgcctgcggcctcgcccgcacgcctagagtctcgcccgatcccatcggcatcccggggagggcccgggagcctccgtcaaccgtcctctaatccagagtttactccacctgccgcacttagcagggggacgggaccgaagctccctcaatccttgtctggtactagatttgctcctgtcccaccccgcagtcccctgaggagggcgatgtgcgccctctttcaccttttttcttctaggtctccaggtcccggaggggatttgtggacctctcttgtctccccaccactccagtgcatttccgcctggctcctagaagccccattcaatatcactactctttaacgagtgccaaatcttttcccacttttgctcttccccaaggaactgctcccacctcagcacgtggaggcctctcacggtcctccttcctgggacctgagcaggtttggtgaaagccaccgtcctccgtgacacacggcccccttcctcctgtccccacactcccaggagaaactcccggtgtgtttctgaccctttcagccccattaaagctcctgagctctca

SEQ ID NO: 72012 - DNA, 1227 bp, Homo sapiens
acaggctagtcgggctgggtgtgaatcggccgaggggcgctgagccccgcggttcagcagcggacagatccagctgtggcagtttctgctggagctgctggctgaccgcgcgaacgccggctgcatcgcgtgggagggcggtcacggcgagttcaagctcacggacccggacgaggtggcgcggcggtggggcgagcgcaagagcaagcccaacatgaactacgacaagctgagccgcgccctgcgctactactacgacaagaacatcatgagcaaggtgcatggcaagcgctacgcctaccgcttcgacttccagggcctggcgcaggcctgccagccgccgcccgcgcacgctcatgccgccgccgcagctgctgccgccgccgcggccgcccaggacggcgcgctctacaagctgcccgccggcctcgccccgctgcccttccccggcctctccaaactcaacctcatggccgcctcggccggggtcgcgcccgccggcttctcctactggccgggcccgggccccgccgccaccgctgccgccgccaccgccgcgctctaccccagtcccagcttgcagcccccgcccgggcccttcggggccgtggccgcagcctcgcacttggggggccattaccactagacggggcggtcgggtgcctgcggcctcgcccgcacgcctagagtctcgcccgatcccatcggcatcccggggagggcccgggagcctccgtcaaccgtcctctaatccagagtttactccacctgccgcacttagcagggggacgggaccgaagctccctcaatccttgtctggtactagatttgctcctgtcccaccccgcagtcccctgaggagggcgatgtgcgccctctttcaccttttttcttctaggtctccaggtcccggaggggatttgtggacctctcttgtctccccaccactccagtgcatttccgcctggctcctagaagccccattcaatatcactactctttaacgagtgccaaatcttttcccacttttgctcttccccaaggaactgctcccacctcagcacgtggaggcctctcacggtcctccttcctgggacctgagcaggtttggtgaaagccaccgtcctccgtgacacacggcccccttcctcctgtccccacactcccaggagaaactcccggtgtgtttctgaccctttcagccccattaaagctcctgagctctca

SEQ ID NO: 72013 - DNA, 893 bp, Homo sapiens
ctttaacattgtaaaggaaaaattatttcaaccttgagttctatacccagccaagctaccaagcaattggaaagatcaaatacagatattttcagacatgccaaggtcaggaaacttggagtagatgtccaccagaatgaagataataagccaggaaagagaaagacatgggacacaggaaacagatgctccaatgcaggagagaacagcagagatttctcaggatgacagtgaaaggaaactccaagacaccagctctgtagaagggccagaagtcaaacagttcagattggagggctccagagggaagactctcaggtgaatatggaattcacagattgcctggtgtggttgatagtactaagaggactaataattctgtcaaagaatgtagtatgagttagtgataagtacatagaaagctaagcaacatttctaaggtgaggcaactattaattcaaaaaaattgtccaaggaagtaaaagtagtcataatacagtacatagctgagctgtgaacagtatttgttgtcatcataatttaaacattgaatgttaatttagccaaaaattttagaataattaaattgagagaatgagacaaggtgaactgtgcatggatgtgggagattgtggtgagactgaatctagaaggaagttggtagagcatataaaaaattgaaaaacaactagcagccttcctgtgttattcaaacatatggagggaaatactagaagcagcagctaaaagagtggtatgtggctatttctggggagtaaaaattggaaacaggaaagggtgaggtagagaacttctgtgtgtaattgtaagacttggttaatgtttgactttgtaaactatgtgcatgttattaaactactacttggaacaaa

SEQ ID NO: 72014 - DNA, 771 bp, Homo sapiens
gaaacagagtcttgctctgtcgcacaggctgggctcaaactccaggcctcaagtgatcctctggcctcccaaagagctgggattacaggcgtgagccaccttgcccagcccaaaatgtccttttttaatatcctgtgataaaaacatatcttttgtagggagaagtgatagctcggctgccctggagagaggggacctcacctcggcagagctgcccccttgggagatgccccacgtgtacactgtgtggaaattcagtgtaagcgtttttttccccttgtatcttgggcatactacatttttctctttattagtaatacctgtgttagtcattgtgcgcactagaaacatcagttaatgcaagcctgatctaaactgtgaatgtggtaagatcaaaatcctgacccctctgtggagcacttggtctgcagctcaaggttgctgtccgtttctttgttgttccattagttgtcccaggatgacaaccttgtgcttggtgtgtgtcaccagccttgtgcttctaaccccctcccctgggtgtcccgggcactttgcagtttctcaggccccgggcagcagtgttgataggctcaaaactcctgaggcctggtaggttttgtaggtggattttttcccctcttctacttgttaacatttcttggctgggcacagtggttcatgcctgtaatcccagcactttgggagaccaaggtgggcggatcacttgaggttaggagttcgagaccagcctggccaacatggcgaaaccct

SEQ ID NO: 72015 - DNA, 306 bp, Homo sapiens
cttcctctccatcccaagaatgtgtttatgctttgacagaggagcagagtaatttccagctgatcagagaaaaggtgacttgtgtattccagaccatgtgttctactttgcagaccagcttcatttaatgctaaaattaggaacacattaatttgaggtattttatagtaaagcttaatggcatttttaattttggagaattttaaggatttttaaccattgctcccatctcgccatatgcacactcctgaagtatttttgaagctcttttgcttttctctgaactataaggttgtactagctgtt

SEQ ID NO: 72016 - DNA, 337 bp, Homo sapiens
tcttgttttttgtgagctctgacttaaagtatgttttaggaagtatgacattttttgacttaagatgtattttgcataatacaattgtaacctcttctgctctcatttcattaacatttgcatgaaatgtctatttccatcttgccactttcagtctctttttgtcattagatctcaagtgaatctcttgtaggtcagctgtagtttgatcttagtttggttttaaattatttagcatatgccttttgattgagtagtttagttcctaaataagcaatttactgaaatgaaaagatgtactttagccattgtattttttttacttgattcttgtagc

SEQ ID NO: 72017 - DNA, 574 bp, Homo sapiens
ctgtgccagtcaattaaaatagcaaatccttccctcattagccctctccacccactttatcctgtttcattttttcccatagcacttactggattatgctgattgtctttttccactagaatgcaggtattttgtctaggttgaatcactagtatctagaacagtgcctgacacatagtatgtgctcaataaatacacgtgtgcagaagcaaatcacatttttcattgctttccacaagtgtgagcctgggctacatagtgaaaccccatctctacaaaagatataaaaattggtctgggtgcagtggctcatgcctgtggtcccagcactttgggaggctgaggcgggcggatcacctggggttgggagttggagaccagcctggccaacatggagcaaccctgtctctacttaacatacaaaattagccaggcgtggtggctcatgcctgtaatcccagctactcagtaggctgaggcaggagaatcgcttgaacctgggaggcggaggttgcagtgagctgagatgagccattgcactccggcctgggtaacaagagtgaaactccgtctc

SEQ ID NO: 72018 - DNA, 400 bp, Homo sapiens
acattatttaattactattagtgaaaggatgaattaataaataaacaaatgtagaagtaatggagaagaggagggccagtcttcagtcaatgatgactctgcctctgttgaaaataccataccctatagacagatttaagaatacacaaggctcatgttcttggtttttgcattaatggattttgattctattattataaatagatcaatgaaagaatcaataaagcaatagaaacacacatgagtaatgaaatcatcgtacaattatgaaactatgtagggaaacgagaagccatttatatatatatggaaaaagtctgttaagaaataaatgtttcaaatgtgttacctctagctaaggatgatatagaggatataaataatatagatagataaaata

SEQ ID NO: 72019 - DNA, 519 bp, Homo sapiens
tggaagaataattaaagatctttaatagacccagcccgagtttcccatcgcactgagcactgagatcctgctggaagtctgccgcagcatgagctccgcagccgggttctgcgcctcacgccccgggctgctgttcctggggttgctgctcctgccacttgtggtcgccttcgccagcgctgaagctgaagaagatggggacctgcagtgcctgtgtgtgaagaccacctcccaggtccgtcccaggcacatcaccagcctggaggtgatcaaggccggaccccactgccccactgcccaactgatagccacgctgaagaatggaaggaaaatttgcttggacctgcaagccccgctgtacaagaaaataattaagaaacttttggagagttagctactagctgcctacgtgtgtgcatttgctatatagcatacttcttttttccagtttcaatctaactgtgaaagaacttctgatatttgtgttatccttatgattttaaataaacaaaataaatc

SEQ ID NO: 72020 - DNA, 602 bp, Homo sapiens
tatcttagtttccgcaccgcagttcctcggtgtccacttcaggcttccggactggaaggacagccgggaataaaacgtgccggcgaggttcaggagtcattggccacagagacccagcccgagtttcccatcgcactgagcactgagatcctgctggaagtctgccgcagcatgagctccgcagccgggttctgcgcctcacgccccgggctgctgttcctggggttgctgctcctgccacttgtggtcgccttcgccagcgctgaagctgaagaagatggggacctgcagtgcctgtgtgtgaagaccacctcccaggtccgtcccaggcacatcaccagcctggaggtgatcaaggccggaccccactgccccactgcccaactgatagccacgctgaagaatggaaggaaaatttgcttggacctgcaagccccgctgtacaagaaaataattaagaaacttttggagagttagctactagctgcctacgtgtgtgcatttgctatatagcatacttcttttttccagtttcaatctaactgtgaaagaacttctgatatttgtgttatccttatgattttaaataaacaaaataaatc

SEQ ID NO: 72021 - DNA, 751 bp, Homo sapiens
tggaagaataattaaagatctttaatagacccagcccgagtttcccatcgcactgagcactgagatcctgctggaagtctgccgcagcatgagctccgcagccgggttctgcgcctcacgccccgggctgctgttcctggggttgctgctcctgccacttgtggtcgccttcgccagcgctgaagctgaagaagatggggacctgcagtgcctgtgtgtgaagaccacctcccaggtccgtcccaggcacatcaccagcctggaggtgatcaaggccggaccccactgccccactgcccaactgatagccacgctgaagaatggaaggaaaatttgcttggacctgcaagccccgctgtacaagaaaataattaagaaacttttggagagttagctactagctgcctacgtgtgtgcatttgctatatagcatacttcttttttccagtttcaatctaactgtgaaagaacttctgatatttgtgttatccttatgattttaaataaacaaaataaatcaagttgtagtatagtcaaaatacttcttaataatagtgcaaaaattgtgttgacacataacaatttcatggaagaaaaaaattccggtattttaagcaaaaagtattttgaaggaaggtgtgaatactggttatgcttggtgttacatgttggctgatacatattcatgcatttacatgattgcagtactttatagctacatatttaccttgaccattattattacctttgc

SEQ ID NO: 72022 - DNA, 305 bp, Homo sapiens
gctgggactacaggcgcccgccaccacgcccggctaattttttgtatttttagtagagatggggtttcaccatgttggccaggatggtctcgatttcctgacctcatgatccgcccgcctcgacctcccaaagtgctgggattacaggcgtgagccaccgcgcccagcccaacacatggtattttctgtcattttcatttagtcttctggttgctgtgtgatggtctcaggctttatttacatttctccgattactaacagacttgaacatttcagcacactttttagttattgaataacctcta

SEQ ID NO: 72023 - DNA, 168 bp, Homo sapiens
cttgacattaaaagtaaccttgacataactgatggtctgtcctgaaatctatgtgaatgaattacagtgaaatttcccacatctgcttatagagataaaaatacatgaaagtataacaataattttaaaagaatacatatttgagcttaaagaaattctcacattcta

SEQ ID NO: 72024 - DNA, 449 bp, Homo sapiens
aaacccaatctgcttttagaatccaggggcaaaaggatcaggtggagcccagggtgggagcggggagggcagatggcaggtaccgtctcccagggccatctctccctcccttcgtgggcgtgcggccagctgggtcggcagtgagcacccctgttctgcctcacgtgcctcttaggtccttgatcagaagaacaggactgcatgcctgggggtgggtgcagtctggcgtgccaggtaagacccgtccttcatatccctcacgctaccaccccacagtggggcggcaagggagggtgcttttctgactgtgcctgtgttggggggctggcccttgcaggaccgagctggggactcagacttctaaacatgcacatttactgccccagcatgagcgcaggcgctcccatcacctcaaaatggtccagtgtggggatcacaccacagagctt

SEQ ID NO: 72025 - DNA, 529 bp, Homo sapiens
gctggaaatgagaaatctatataccaccttataaagcaagatggtgtgtgattttgacttgtagaccacaagcaggagattgatttttttgtggttaggataaagtatccagaggcaacatcatatacaggccccaaaagtgctgcatgtcaaacagcttatctggaggtgaatatgacgtggtttgcagaactgttaaagtttgggaaagtggttctagtgatggcagagacctgatgtaaaagactcgtgtgaaaagttttaataaaatagattcaaggagtgtgagaatggcaaaaagcaaagtattattttataagatgctttttaaaaaatatttacctgtaacatttaatgaatagtatttttctaacctagtcacacacactataaggtaataagttcaattcagtctacctgttgagtggcagactcatatatttgatatccaacacaatagttggatgtctattaggcatctcaaacttaacaggactgaaataaattcttggttttcttaaaaaaaaaa

SEQ ID NO: 72026 - DNA, 458 bp, Homo sapiens
tgcctcatggtggcttcttgttcctcatgactggtgaggttgggtgcccttgtattttaatcctgtgccaactgggcccccccacccccacccccgccacttgctgtctctgcttcgtaaggagatcttcttgcccggtcaactccgagggatcacaggttcaggggtgcccccaaaatgagacacttagtgtttgatgaatgaatgatgatgttgaggccaggagtgagaggaaggtcagcaggcagacagggcccatgtggacagaaagggtttattccaagtccagacatgaccaatagcgataaaaagggggaacaattggagtaatccatgggagaaggagtgagcctgaatttgaaagatggagagaactggacgtggaggaggggagggaggaaggcagaacaaaggaaataagaagctgttgaccaaaatacatatgttgtgattccatg

SEQ ID NO: 72027 - DNA, 322 bp, Homo sapiens
ttttgtttatgtaacattctcaaaatgacaaaattgtacacattggtgggaagaattgagggcggggaaggagaatataaaggggcagcagaagaatggtctcgttgtaatggaacagttctatatcttgaggtggtagttacagagatctgcacatgtgagaaaaatcatatagaacaccatgcacatggtgtatctgggtatgatatactatgttgtttatgacacaactatcagcggaaactgagtaaagggcgtatgagacttctctgtactacatttgcttcctgtgaatcttatttaaaaataaaaatttttaaca

SEQ ID NO: 72028 - DNA, 422 bp, Homo sapiens
aataaagcaaccactcctccttgtcaaatgtgctaaatatcattttaggagaagagagtggacttattgtatctcccttaagattgtgagggagtgtggatacagtagaatgagccaatagtttctttataataaatacggtctgcaataaattatttcactagctctaaaacctttccctagattttagtggggagttggtttctgttaatatctttgggtgctgtggtggtaaatgctacattataaacggtggcatgtatttacagttacagtattgtgtgtacactttttaatggtaaacttaagctgaatgtgtaatggacttgtgtatagttttacatatttggaagcattttaaaaataggttttaaccttacataaaattacttttatacttgtgttaacattttcttctgtgc

SEQ ID NO: 72029 - DNA, 343 bp, Homo sapiens
ttacggctgaatagtattccataatgtatacctaccacattttcttttattattattcttcttattattttttattattatactttaagttctagggtacatgtgcacaacatgcaggtttgttacatatgtatacctgtgccatgttggtgtgctgcacccattaactggtcatttacattaggtatatctcctaatgctatccctccccctccccccacctcatgacaggcccgatgtgtgatgttccccatcctgtgtcgaagtgttctcattgttcaatgtccacctatgagtgagaacatgcgacataccacattttctttatccgtttgtctgttga

SEQ ID NO: 72030 - DNA, 537 bp, Homo sapiens
gaacgaggccagtctgcctttatgccatgtggcctcaggcacctacagtgaagtcttaaaaccagtggatgctctctacagtgccttctagctgtggtagtctgtgtctccaaggaccaacccttccatttctgaggcttcagaataaattctggcagttatttcttctctcagactctatttcagaaaagtgtacctgccaacctgcatttagtaagaaataatgaattccttttctcattctttttatttttattttttatttttttgagacggagtttcgctcttgttgcccagtctgggatgcaatggcgcaatctcggctcaccgcaacccccacctccctggttcaagcgattctcctgcctcagcctcctgagtagctggaattacaggcatggtggcacttgcctgtaatcccagctacttgggaagctgaggcacaagaattgcttgaactcaggaggcagagattgcagtgagctgaaatcatgtcactgcactccagcgtgggctacagagaaagactctgtctca

SEQ ID NO: 72031 - DNA, 342 bp, Homo sapiens
gttcaagaccatcctggccaacatagtgagaccctgtctctaccaaaaacattagacagagctgggtgtggtggctcatgcttgtaatcccagcactttgggaggccaaggcaggtggatcacctgaggccaggagtttgagaccagactggccatcatggcaaaaccccgtctctactgaaaatacaaaaattagccgggcatggtggcacttgcctgtaatcccagctacttgggaagctgaggcacaagaattgcttgaactcaggaggcagagattgcagtgagctgaaatcatgtcactgcactccagcgtgggctacagagaaagactctgtctca

SEQ ID NO: 72032 - DNA, 569 bp, Homo sapiens
gtttttaaaaagcgatgtgaagtaatggtggtgccagtgcctcactgtttctaaagaccacatctggaatggctgtgacgtttcatcccgttgctttcggcttccatggacgtgactgcctggtttttcgttgattccccttgtctgtggcatcttgctgtggagtctgttcctgatgtttcactcggatatgtagttttctttgatcatgctctcagggttaggctttggtaatagaatgctggcttcatggagaatttggaagctttcctccttttcctaggctgtggaacagttaacttagccctggaggcagctggtccttaacaggtctggccaaagtcacttgttctttttttgcagggattgttgccccttgctggcttcctcaggctgctatttgttattttatctacttggattttctgtctcctggggattcgttttgataattcttattttcccagaaagccatttactcatctaagttttcagatttggagattttaaaaattcaagaaatagaaataatttctgaatagattatagtgactaaagaaactattaaa

SEQ ID NO: 72033 - DNA, 389 bp, Homo sapiens
agaaatgctactgatttttgtgcattgatttatgtctcaaagttttaaagaaaaaaatttaaagaagagactcaaaaaagcaattaaaaaaaaacagactctgtatactatagatacaggtaacatttccttcatatcattttagggtctgcctatttttcttatttcacataagcaatccctgtttttaaattaatgtgtattatagccatctacaattctatgatatgattgcatttatataacatttggttttaaaatttatcatacgacattttcattttaaatcaaaatatgtgtcactgcacctgaacactgatttgttcaataaagtttgatgagcattttagctccattttctagttatgattaaagataacaaaaataag

SEQ ID NO: 72034 - DNA, 811 bp, Homo sapiens
cattaaatcccacagggctgtaattcctagactctacgaatttcatcttgcaccaaattttattatttcatttataattcggattcttcaaatctaagagtgcctggctcaaaattaaaatacctacaactatgccaaaactggactctttaattgccttactggaaccagtagctgattcaaagcaaaacgaaacaaaattcctcctttctctgatttagtgaatcaatgatctaactgaactcatttttggactgagtttgcggcacttgcagccctgagggacacattcccccaccacactgagcctgcactcccatcaatgcaaatgaacattttgcttattcagattgggggggtgaaggaagtcacaaaagggttaatacatatggcatttcattgtaatatgtactcactactaactaaattaaaagagatgtgagttattaaaaactccatcttaagaaagtaacagaaatcagagttcagattcgttgttactgagtttccaaccaacacctgtgagttaaacctacggccaccctgaaaacggttcatattttcaaaagcttcatcgaagatgagctgcactaaagattcatattacatatcatgctgcaataagaaaatcaaataaggcctttccatattcaataataaagtttaaagaaaagtaatatttgtttagccagttagccagaaattagatgtatcagaatacatcattctttgagcattttagaaaaatcagggtatttctacattgtgtttttctttgtaagccctcaaaaaatatagagaatattcttga

SEQ ID NO: 72035 - DNA, 831 bp, Homo sapiens
gaatgggtttcaagtgattgtaccaaaataggaaaactataaatatatattcatacatatagtaaaatgttaagactgagatttagaattcatttaatgagcccaaattgtattttatgtatgagtaaactgaggcacagtaagactaagttaactgcccaaactcttccacctggttagtgggaaaataacatttccaaccctgatctttctggttcctgaaccaggatagctggactgtacttccccatttttgaaaaagctgctaaaaacttggttacaaactttaagtgacacgtttctccatttatgtggtggttatagcaacgtacaactctctatttataaattaaaccttgagaaacacccatctccactcctagacaaaccaatgaacattagtcttatttttctcccagaaatgtcagagggtgttacagtgctacacgagatgactcctgcaagttgcttgctagatagagttgcagttcatgtgaattgctttcagccaggttgggtatccaagctcaatgttctggtgttaagccatagggaagtgttgccatgagaccagcttcttggcaagtagccctgaggtgcagctgtaaggtgacccagtgcagtcctgaggccagagccctgtgctcagtgccagaaaacttgagccaaactttggaactaattcccagggcactgaaattggtctcaattaaaattttagatgaaaagggtttttgtttgtcctgaagaaccacttcaatttataaactcatagagaaagtagatattttgccggtgtacttggaatacctttcagaagccaaaccctta

SEQ ID NO: 72036 - DNA, 305 bp, Homo sapiens
ttatttttgtgaaaggaggctatctctttccttttatttttattatctagttttattgaactgtgtcagaaaatatgaaatatattattgtatttaaaatctaatggccaactttaataaatatgtcatggttatttataattttaatattttctacaatgaaaatatataactttttgtttcttatccatgattgttgagttaaacacatagttgatatttcctatactcttttttgttcaataataaatgcactaaagtctctaaaatattatctgagtaccattttgaactaaaatcatagg

SEQ ID NO: 72037 - DNA, 445 bp, Homo sapiens
tcaatccacttaaatagccacatgttgctagtggctaccacagtggacagcagagatctaaagacagaagacgaaataatcacacagaagataagctacccaaggacagagactcttatttttttttcttttttacttttaaaatctagcacctaacagtgcctgatacttacaaaaattttttaaaatgttattttaacctaaggagacattataaagtaaaaaatgtgaactatcagtgagcgacagggataacagactacaagttagctttaacagttctgtgaggaatgtttctagcacaaggaaaaatgtttaaggtgatacatatcccaattatactgatttgatctttacaaattatatgaatgtattagattatcatgagtactccaaaaatatgtatatttattaaatactaataaaaaattaataaatatttctg

SEQ ID NO: 72038 - DNA, 304 bp, Homo sapiens
caaaaaagaaatggaggccgggcgtggttgttcacatctgtactccttgaattttgggaggctgaggcaggcagattgcctgaggtcaggagctccagaggagcctggccaacatggtgaaatcccatctctactaaaaatacaaaaattagctgggtatggtggcgggcacctgtaatcccagctactcgggaggctgaggcaggagaattgcttgaacccagaaggtgaaggttgcagtgagccaaaatcgcaccattgcactccagcctgggtgacaagagaaagactcttatcttaaaaa

SEQ ID NO: 72039 - DNA, 713 bp, Homo sapiens
  misc_feature (2)..(2): n is a, c, g, or t
  misc_feature (5)..(8): n is a, c, g, or t
  misc_feature (10)..(12): n is a, c, g, or t
cngannnntnnntgcctctggagggttacctgttcccagagagttacctgcctcgagcattacctgccccaagagagttaactgttcccagagggttacctgttcacagagagttacttgcctccagaggattacttgcctccagagagttacccgttcccagagggttacctgcctacagggggttacctgttcctagagagttactgtgtctggagagttacttgccttcagagggttacccgccttcagaatgttatctgtccagcctgcttctgctctcacttggtctttccacttgcacactagagcccatctcctttcacctgttcagaattaagcaggatatggttaaaaagacattacttatgaagaacataacattttagtaaatgtatttgctaaatattgtatcaaataaaaatacatagagctttaagaaaggtgagaaatacttggggaataaaaccccattatattacaggatttccaaatactcacttacagaattaaacatctggtaaacaaaaatgaggacatagtacagttcattaatttaaaaagtaaatgtgtatgaagaatatgtattttttatatatctatgacacatttgcacaaatgaatgatgaattggccacatgaaaacattcatttctaaaagcaaagatttgacactcaaaattccctggtaataattcagtaaaatttaacag

SEQ ID NO: 72040 - DNA, 4036 bp, Homo sapiens
  misc_feature (3048)..(3048): n is a, c, g, or t
caagcaggctggtactggcccgagtgtatggatcggggcgccaggctagggcggcctggccactgagccggggtgcagtggcagcgggagagtacctggcgatggcgatatgagcggtgcgggggtggcggctgggacgcggccccccagctcgccgaccccgggctctcggcgccggcgccagcgcccctctgtgggcgtccagtccttgaggccgcagagcccgcagctcaggcagagcgacccgcagaaacggaacctggacctggagaagagcctacagttcctgcagcagcagcactcggagatgctggccaagctccatgaggagatcgagcatctgaagcgggaaaacaaggatctccgttacaagctcataatgaatcagacatcacagaagaaaggtgagaactgggcccttcagttcctgatgggatgctcttgccacccaggggagcccctccagactgtccttgcccacctggctgcactggcccctgtatgccaacccagtggggacaggttctgggggacctggacagatgccgctacctctagccgtggctggatgatgttacgcagccaagcacagcacgtgctgctctcaggaagcccagggcctgaggtcattgcagtggggaggtgggcacagggtgctccccagacctccctcctccaagtagagctgaaatgggaaggaacccctgggacagcccctgccctgctagatctttgcctcagattgctgctgtggccaggcccaggatctccagccctatggctctgagtcctgacatgctgggggcccaggggctctggacacactccatccagggatcccttcctgccatctgggcagcaaccatggggacaaagggaggaagcagagtcctgtttccttgccacttgtccaaggcacttccccatcctgacagcggcccccacccagcccaggattctgggttgtggtctcgagctcacttcccgttatctttggggctggggctgacatcaggaggacatctgactggtggatggagccagcctgggaacatcgtagctggggcagtgcctagggctctcccttcccagagagacatggagaatggggttgagggagggcccttccctagccgctgtggcaactccagtgagctgttctgggcaaagtgtggcccaagtcggcagccccagccctgcagtgctggggacgctgacaggacacgggaagaggccatgctctccctcgggacctgctgttccatgtgtcccaagccctcctgctttccagatggcccctcaggaaaccacctttccagggcctctgctcccttgggcgctcgctgggtctgcatcaacggagtgtgggtagagccgggaggacccagccctgccaggctgaaggagggctcctcacggacacacaggccaggaggcaagcgtgggcgtcttgcgggcggtagcgccgacactgtgcgctctcctgcagacagcctctccacgtcaagcttccagtctgtcaagtccatctctaattcaggtgagcaggctggcgtccatgtgctcacaggggtgagtgccccacggggaccccagcctgggtggcctctaggggtgctgaccaggtaccctctgctgggccaagctccaggatttggggatgaaggtgcagctgaaaagagccctgcaagctgaagccaccgggaggggattaagggggggtgggcaggaccagggaccagtcacagggcagtaaggcctcacagcaggcaccccagggtggggcagcaagcaggcaggaggggcctccccgggtggccgcctagggaggacgtaccctggctgcccagcagcagccctgcttggccgtgtccccgccacaagcaggcaggacacaggagggatggcactgcccacggagccctgggctcatggcaccttctgcagagtgaactgggagcagagagcctcttttccccactctgtgaggccgggcattttcctcagcccagccctaaccctcaccattcctgtgatgggcccaggtgctggacgggccttgtccttgccgaggaaacccatgcaggctgggtcccaagcctctcatgcagtttcattttacccaagatggggccagcttccactatgttgattgttctagagtgttcacaggcaccacccatgggcttcaccctcagaaccacattgattccccccagaaccctccaaggcaggcttccctttacagaggaggaaactgaggcagggacaggggcttcttgggtacacacagctgttcctggaaaacttgggcggtgactgttggtgcctgcagtgaccggccttgtagggtctgacttgcagccaactctcaaggcaaggccaggccccagcccggctccttcaacaagcaagattcaaaagctgacgtcccccagaaggcggacctggaagaggagcccctacttcacaacagcaagctggacaaggttcctggggtacaagggcaggccaggtaaggcttgggtgttcctggggtgcaagggcaggccaggtaagtcttgcctgcaccctaagggccccatgactacatttactaggctcacgccctgcagtcagccaactgctctgcccctagctccaggggcctgtctccagggctcatgatagcagatgacggccacgctctacccatcggtgggcgctgtcttcctcccttcccctgggggtcctgcagagtacctgtgctgacctgagcccacgaggggggccagtagcggcccctaaaccacttcctcagagaaaagtaaagtaatattctgaccaagagaaggcttgctgcccctggccacagcctgcctttggagggcactaggccagcaggtcagagtaggaacaggttctggtgatccctgagtttgcgggactgccctgagatgctacagagcgcacactttcagcagcgcaaccagcaggacaggctcctgcatctgcacatcccgagaccaggcctggagcaagatgccccactgggtgtggggtcacgancaagagcagcctggcagctagctggtcacccactgaagcccatctgacccttagggcaccttcagaggggagaaagggacaggccccagtcccagagacccccacctggtgcccagagcaccctgctcagtgggagaggggaaccaggccctcttccccacattggcctgggcgctgcctggggaggtatgctgggtgggtggttagacgcacctgggcaggtcacctctggctgctgcaatgactgtttcagaaaggagaaagcagaggcctctaacgcaggagctgcctgtatggggaacagccagcaccagggcaggcagatgggggcggcggcacaccccccaatgatcctgccccttcccctgcgaaagcccaccacacttaggcagtgcgaagtgctcatccgcgagctgtggaataccaacctcctgcagacccaagagctgcagcacctcaagtccctcctggaagggagccagaggccccaggcagtcccggaggaagctagctttcccagggaccaagaagccacgcatttccccaaggtctccaccaagagcctctccaagaaatgcctgcttctgagcccacctgtggcggagcgtgccatcctgcccgcactgaagcagaccccgaagaacaactttgccgagaggcagaagaggctgcaggcaatgcagaaacggcgcctgcatcgctcggtgctttgagctacccgcatctggtcagtgccaggcccaccaacctgcagctggagattggctctctatagcatttcctgatacttccgctacttttaggcctggctaaattccaagatagataacactcaagatagataaagtacttgatctccaaactgacaaactgtttattttctagctgttattttgctatttggcatttacataaaagcacacgatgaagcaggtatcgccttacctgttgaaactgaaaataaagcttgtttatttccaagttgtgt

SEQ ID NO: 72041 - DNA, 1555 bp, Homo sapiens
cagcgacagccccgcccccgccaaacgcctggcgccctccgtcgcccggtttccatggtgacggggcgccaggctagggcggcctggccactgagccggggtgcagtggcagcgggagagtacctggcgatggcgatatgagcggtgcgggggtggcggctgggacgcggccccccagctcgccgaccccgggctctcggcgccggcgccagcgcccctctgtgggcgtccagtccttgaggccgcagagcccgcagctcaggcagagcgacccgcagaaacggaacctggacctggagaagagcctacagttcctgcagcagcagcactcggagatgctggccaagctccatgaggagatcgagcatctgaagcgggaaaacaaggatctccgttacaagctcataatgaatcagacatcacagaagaaagatggcccctcaggaaaccacctttccagggcctctgctcccttgggcgctcgctgggtctgcatcaacggagtgtgggtagagccgggaggacccagccctgccaggctgaaggagggctcctcacggacacacaggccaggaggcaagcgtgggcgtcttgcgggcggtagcgccgacactgtgcgctctcctgcagacagcctctccacgtcaagcttccagtctgtcaagtccatctctaattcaggcaaggccaggccccagcccggctccttcaacaagcaagattcaaaagctgacgtcccccagaaggcggacctggaagaggagcccctacttcacaacagcaagctggacaaggttcctggggtacaagggcaggccagaaaggagaaagcagaggcctctaacgcaggagctgcctgtatggggaacagccagcaccagggcaggcagatgggggcggcggcacaccccccaatgatcctgccccttcccctgcgaaagcccaccacacttaggcagtgcgaagtgctcatccgcgagctgtggaataccaacctcctgcagacccaagagctgcagcacctcaagtccctcctggaagggagccagaggccccaggcagtcccggaggaagctagctttcccagggaccaagaagccacgcatttccccaaggtctccaccaagagcctctccaagaaatgcctgcttctgagcccacctgtggcggagcgtgccatcctgcccgcactgaagcagaccccgaagaacaactttgccgagaggcagaagaggctgcaggcaatgcagaaacggcgcctgcatcgctcggtgctttgagctacccgcatctggtcagtgccaggcccaccaacctgcagctggagattggctctctatagcatttcctgatacttccgctacttttaggcctggctaaattccaagatagataacactcaagatagataaagtacttgatctccaaactgacaaactgtttattttctagctgttattttgctatttggcatttacataaaagcacacgatgaagcaggtatcgccttacctgttgaaactgaaaataaagcttgtttatttccaagttgtgt

SEQ ID NO: 72042 - DNA, 1329 bp, Homo sapiens
caagcaggctggtactggcccgagtgtatggatcggggcgccaggctagggcggcctggccactgagccggggtgcagtggcagcgggagagtacctggcgatggcgatatgagcggtgcgggggtggcggctgggacgcggccccccagctcgccgaccccgggctctcggcgccggcgccagcgcccctctgtgggcgtccagtccttgaggccgcagagcccgcagctcaggcagagcgacccgcagaaacggaacctggacctggagaagagcctacagttcctgcagcagcagcactcggagatgctggccaagctccatgaggagatcgagcatctgaagcgggaaaacaaggatctccgttacaagctcataatgaatcagacatcacagaagaaagacagcctctccacgtcaagcttccagtctgtcaagtccatctctaattcaggcaaggccaggccccagcccggctccttcaacaagcaagattcaaaagctgacgtcccccagaaggcggacctggaagaggagcccctacttcacaacagcaagctggacaaggttcctggggtacaagggcaggccagaaaggagaaagcagaggcctctaacgcaggagctgcctgtatggggaacagccagcaccagggcaggcagatgggggcggcggcacaccccccaatgatcctgccccttcccctgcgaaagcccaccacacttaggcagtgcgaagtgctcatccgcgagctgtggaataccaacctcctgcagacccaagagctgcagcacctcaagtccctcctggaagggagccagaggccccaggcagtcccggaggaagctagctttcccagggaccaagaagccacgcatttccccaaggtctccaccaagagcctctccaagaaatgcctgcttctgagcccacctgtggcggagcgtgccatcctgcccgcactgaagcagaccccgaagaacaactttgccgagaggcagaagaggctgcaggcaatgcagaaacggcgcctgcatcgctcggtgctttgagctacccgcatctggtcagtgccaggcccaccaacctgcagctggagattggctctctatagcatttcctgatacttccgctacttttaggcctggctaaattccaagatagataacactcaagatagataaagtacttgatctccaaactgacaaactgtttattttctagctgttattttgctatttggcatttacataaaagcacacgatgaagcaggtatcgccttacctgttgaaactgaaaataaagcttgtttatttccaagttgtgt

SEQ ID NO: 72043 - DNA, 1755 bp, Homo sapiens
cagcgacagccccgcccccgccaaacgcctggcgccctccgtcgcccggtttccatggtgacggggcgccaggctagggcggcctggccactgagccggggtgcagtggcagcgggagagtacctggcgatggcgatatgagcggtgcgggggtggcggctgggacgcggccccccagctcgccgaccccgggctctcggcgccggcgccagcgcccctctgtgggcgtccagtccttgaggccgcagagcccgcagctcaggcagagcgacccgcagaaacggaacctggacctggagaagagcctacagttcctgcagcagcagcactcggagatgctggccaagctccatgaggagatcgagcatctgaagcgggaaaacaaggatctccgttacaagctcataatgaatcagacatcacagaagaaagatggcccctcaggaaaccacctttccagggcctctgctcccttgggcgctcgctgggtctgcatcaacggagtgtgggtagagccgggaggacccagccctgccaggctgaaggagggctcctcacggacacacaggccaggaggcaagcgtgggcgtcttgcgggcggtagcgccgacactgtgcgctctcctgcagacagcctctccacgtcaagcttccagtctgtcaagtccatctctaattcaggcaaggccaggccccagcccggctccttcaacaagcaagattcaaaagctgacgtcccccagaaggcggacctggaagaggagcccctacttcacaacagcaagctggacaaggttcctggggtacaagggcaggccagaaaggagaaagcagaggcctctaacgcaggagctgcctgtatggggaacagccagcaccagggcaggcagatgggggcggcggcacaccccccaatgatcctgccccttcccctgcgaaagcccaccacacttaggcagtgcgaagtgctcatccgcgagctgtggaataccaacctcctgcagacccaagagctgcagcacctcaagtccctcctggaagggagccagaggccccaggcagtcccggaggaagctagctttcccagggaccaagaagccacgcatttccccaaggtctccaccaagagcctctccaagaaatggtaagtcccacaggcatggggacagtggggcagccctgcagcctgggccccagggagggagtggggaagggagcgtggcagcgcagaagcggagctcgctgaggcctctctgtgcccccgtgagggccatgcaggccgcactccccacacactccactcgcgaggatgctcacggtgacagtccctctacccgcccccagcctgcttctgagcccacctgtggcggagcgtgccatcctgcccgcactgaagcagaccccgaagaacaactttgccgagaggcagaagaggctgcaggcaatgcagaaacggcgcctgcatcgctcggtgctttgagctacccgcatctggtcagtgccaggcccaccaacctgcagctggagattggctctctatagcatttcctgatacttccgctacttttaggcctggctaaattccaagatagataacactcaagatagataaagtacttgatctccaaactgacaaactgtttattttctagctgttattttgctatttggcatttacataaaagcacacgatgaagcaggtatcgccttacctgttgaaactgaaaataaagcttgtttatttccaagttgtgt

SEQ ID NO: 72044 - DNA, 1499 bp, Homo sapiens
caagcaggctggtactggcccgagtgtatggatcggggcgccaggctagggcggcctggccactgagccggggtgcagtggcagcgggagagtacctggcgatggcgatatgagcggtgcgggggtggcggctgggacgcggccccccagctcgccgaccccgggctctcggcgccggcgccagcgcccctctgtgggcgtccagtccttgaggccgcagagcccgcagctcaggcagagcgacccgcagaaacggaacctggacctggagaagagcctacagttcctgcagcagcagcactcggagatgctggccaagctccatgaggagatcgagcatctgaagcgggaaaacaaggatctccgttacaagctcataatgaatcagacatcacagaagaaagggcctctgctcccttgggcgctcgctgggtctgcatcaacggagtgtgggtagagccgggaggacccagccctgccaggctgaaggagggctcctcacggacacacaggccaggaggcaagcgtgggcgtcttgcgggcggtagcgccgacactgtgcgctctcctgcagacagcctctccacgtcaagcttccagtctgtcaagtccatctctaattcaggcaaggccaggccccagcccggctccttcaacaagcaagattcaaaagctgacgtcccccagaaggcggacctggaagaggagcccctacttcacaacagcaagctggacaaggttcctggggtacaagggcaggccagaaaggagaaagcagaggcctctaacgcaggagctgcctgtatggggaacagccagcaccagggcaggcagatgggggcggcggcacaccccccaatgatcctgccccttcccctgcgaaagcccaccacacttaggcagtgcgaagtgctcatccgcgagctgtggaataccaacctcctgcagacccaagagctgcagcacctcaagtccctcctggaagggagccagaggccccaggcagtcccggaggaagctagctttcccagggaccaagaagccacgcatttccccaaggtctccaccaagagcctctccaagaaatgcctgcttctgagcccacctgtggcggagcgtgccatcctgcccgcactgaagcagaccccgaagaacaactttgccgagaggcagaagaggctgcaggcaatgcagaaacggcgcctgcatcgctcggtgctttgagctacccgcatctggtcagtgccaggcccaccaacctgcagctggagattggctctctatagcatttcctgatacttccgctacttttaggcctggctaaattccaagatagataacactcaagatagataaagtacttgatctccaaactgacaaactgtttattttctagctgttattttgctatttggcatttacataaaagcacacgatgaagcaggtatcgccttacctgttgaaactgaaaataaagcttgtttatttccaagttgtgt

SEQ ID NO: 72045 - DNA, 1401 bp, Homo sapiens
cagcgacagccccgcccccgccaaacgcctggcgccctccgtcgcccggtttccatggtgacggggcgccaggctagggcggcctggccactgagccggggtgcagtggcagcgggagagtacctggcgatggcgatatgagcggtgcgggggtggcggctgggacgcggccccccagctcgccgaccccgggctctcggcgccggcgccagcgcccctctgtgggcgtccagtccttgaggccgcagagcccgcagctcaggcagagcgacccgcagaaacggaacctggacctggagaagagcctacagttcctgcagcagcagcactcggagatgctggccaagctccatgaggagatcgagcatctgaagcgggaaaacaaggatctccgttacaagctcataatgaatcagacatcacagaagaaagatggcccctcaggaaaccacctttccagggcctctgctcccttgggcgctcgctgggtctgcatcaacggagtgtgggtagagccgggaggacccagccctgccaggctgaaggagggctcctcacggacacacaggccaggaggcaagcgtgggcgtcttgcgggcggtagcgccgacactgtgcgctctcctgcagacagcctctccacgtcaagcttccagtctgtcaagtccatctctaattcaggcaaggccaggccccagcccggctccttcaacaagcaagattcaaaagctgacgtcccccagaaggcggacctggaagaggagcccctacttcacaacagcaagctggacaaggttcctggggtacaagggcaggccagaaaggagaaagcagaggcctctaacgcaggagctgcctgtatggggaacagccagcaccagggcaggcagatgggggcggcggcacaccccccaatgatcctgccccttcccctgcgaaagcccaccacacttaggcagtgcgaagtgctcatccgcgagctgtggaatacctgcttctgagcccacctgtggcggagcgtgccatcctgcccgcactgaagcagaccccgaagaacaactttgccgagaggcagaagaggctgcaggcaatgcagaaacggcgcctgcatcgctcggtgctttgagctacccgcatctggtcagtgccaggcccaccaacctgcagctggagattggctctctatagcatttcctgatacttccgctacttttaggcctggctaaattccaagatagataacactcaagatagataaagtacttgatctccaaactgacaaactgtttattttctagctgttattttgctatttggcatttacataaaagcacacgatgaagcaggtatcgccttacctgttgaaactgaaaataaagcttgtttatttccaagttgtgt

SEQ ID NO: 72046 - DNA, 1630 bp, Homo sapiens
caagcaggctggtactggcccgagtgtatggatcggggcgccaggctagggcggcctggccactgagccggggtgcagtggcagcgggagagtacctggcgatggcgatatgagcggtgcgggggtggcggctgggacgcggccccccagctcgccgaccccgggctctcggcgccggcgccagcgcccctctgtgggcgtccagtccttgaggccgcagagcccgcagctcaggcagagcgacccgcagaaacggaacctggacctggagaagagcctacagttcctgcagcagcagcactcggagatgctggccaagctccatgaggagatcgagcatctgaagcgggaaaacaaggggtcagacacacctctgttaaaaactttatagaggggcccgggcgcggcggctcacgcctgtaattccagcactttgggagaccgagacgggcggatcgcgagatctccgttacaagctcataatgaatcagacatcacagaagaaagatggcccctcaggaaaccacctttccagggcctctgctcccttgggcgctcgctgggtctgcatcaacggagtgtgggtagagccgggaggacccagccctgccaggctgaaggagggctcctcacggacacacaggccaggaggcaagcgtgggcgtcttgcgggcggtagcgccgacactgtgcgctctcctgcagacagcctctccacgtcaagcttccagtctgtcaagtccatctctaattcaggcaaggccaggccccagcccggctccttcaacaagcaagattcaaaagctgacgtcccccagaaggcggacctggaagaggagcccctacttcacaacagcaagctggacaaggttcctggggtacaagggcaggccagaaaggagaaagcagaggcctctaacgcaggagctgcctgtatggggaacagccagcaccagggcaggcagatgggggcggcggcacaccccccaatgatcctgccccttcccctgcgaaagcccaccacacttaggcagtgcgaagtgctcatccgcgagctgtggaataccaacctcctgcagacccaagagctgcagcacctcaagtccctcctggaagggagccagaggccccaggcagtcccggaggaagctagctttcccagggaccaagaagccacgcatttccccaaggtctccaccaagagcctctccaagaaatgcctgcttctgagcccacctgtggcggagcgtgccatcctgcccgcactgaagcagaccccgaagaacaactttgccgagaggcagaagaggctgcaggcaatgcagaaacggcgcctgcatcgctcggtgctttgagctacccgcatctggtcagtgccaggcccaccaacctgcagctggagattggctctctatagcatttcctgatacttccgctacttttaggcctggctaaattccaagatagataacactcaagatagataaagtacttgatctccaaactgacaaactgtttattttctagctgttattttgctatttggcatttacataaaagcacacgatgaagcaggtatcgccttacctgttgaaactgaaaataaagcttgtttatttccaagttgtgt

SEQ ID NO: 72047 - DNA, 535 bp, Homo sapiens
tatatcataaagaaaacaaaaatattaaaatgagaagtacttctggaatagtggagtatgaaactctgaaattcttgtttccatgaaataaaaaaatccagaaaattatcaaaatcaactttttcagaactctgaaaattaaacaaaatctagcaacaatctgaacagcatttattcaagaaaaatggctgacttttagtaaaaataacaaacactgttatattttaactttccctatttccatccctctttccccaagtctgtattagccttgaaaaaaacaatagcctaggagccaataaagaggacaaactggtttggagctcgtcacaaagctccatccccagagaactactactattttatctctctggtagctggctgaaaaaccccattcaagaatttctctttatttcacctgactcagaatttgctcaatgaggaaagttctatccctaatatggcaaaaactatcagtctcaattatttagccttgcagctgccttaggtggtgaagccacatgggacaaacaag

SEQ ID NO: 72048 - DNA, 355 bp, Homo sapiens
ttcttaacaggaattcctagaaagaagccctgaatgtcctgaggtatcttttgcacctaaaatggtaataaccatgtactatctttgataaaatagtcattcaaatgaatttctatattctttagctcagctgaagaattgtgattggaaaaatccttggactctagaatgggacagtcaaataggattttctgtgacactggaaatgtttcatacctgtgctgtccaagagaactttctgtgacaatgaaaatgtttatatctgtgctcctcagtatggtagccactagctagatatggctgctgagtactggaaatatgggtaatgtgagatgaagtaaaattttcatttaat

SEQ ID NO: 72049 - DNA, 500 bp, Homo sapiens
tgcttcagtctttccccatttccagtctttcctgcattgcaccaacagatctgtcctcctataaaaccacagcctttatgactcttccctggcaaaggttctacgatggctcccaattcctcattaggttcattctcaatttctcaaaagtagaaattcaagcctctctctaacccagccaaccttagttcccttctccctactccaaactctccagtacaggaaggcctgtctggcttcttgttcttcctgacttgcaccattttcatttcaatccctagaccttggctcatattattgcctgtacttggaatgattcaccctccttgcctgccccagtctcaacaactctccattgcccattttgagttcaatttccttagtgaggacttattttctctcttcttcagtgcccccatgctttccacacagtcactgtgaaggattttcctctaaaggtcttcctgtttagagactgattccaaggtccccaaatgtgg

SEQ ID NO: 72050 - DNA, 1204 bp, Homo sapiens
ctttcagaggcccccagacacaacctgacccccttcgtccacacacctggccccagcctggatggatggggaggagttttctctcctcccctcaacccaagatccattgaggggaggctgaagcagaaggtccagcgagctccctgcgtcagtgccgccttcctcccacccaggtgctgctgtttagttctgaagaggaacggggcgcctttgtgcagcagctatgggacttctgcgtgcgctgggctctgggcctccatgtggctgagatgagcgagaaggagctatttaggaaggctgtgacaaagcagcagcgggaacgcatcctggagatcttcttcagacacctttttgctcaggtgccatgacctgtgccttttggagatgggtccagccccagaaatggaggaaacctgggctgcatagaacgcccctgtgggtgaactaagcttccgctctatggcctggagagaaatagccttgtttgaatcctggcattgccactttacttagctctgtgaccttaggcaagtcacattatcactgttctgtatctctgtttcctcatctataaaacagtgatgaaaactgtatccatcccattgcattgttgtgaggattcggtgagatcgtgtacatgagtggtacacagaggttggcctctggacccgagagcatcagcctcacctgggaacatgttagaaatgcacctacccagttagactgaaccaggaactctgtgggtggggcctggcaatctgtgttttaacaagctccccagatgattcagatacactctaatgtttgaaaaacattgttttatgtacagtgcttattggcccaagtgccaggtatgttgcaggcatttaacaaacggttgtggccaggcgcagtggctcatgcctataatcccagcactttgggaggctgaggcgggcagatcacctaaggtcaggagttcgagactagcatggccaacatggtgaaaccccatctctactaaaaatacaaaaattagctggacgtggtggctcacacctgtaatcccagctacttgggaggctgaggcaggagaatcgcttgaacccgggtggcggaggttgcagtgagccaagatcatgccactgcactccagcctgggtgacagagcaagactccatctcaaaaaaacaaacaaaaaacaataaatggttgttacatgcga

SEQ ID NO: 72051 - DNA, 138 bp, Homo sapiens
ctcctgcatccgaaagtgatcataggctgcctgtgcctaggtcattgatagtgcagggagaggaacgctgaaagaggttgtccccgtgtttggagggtccaccctatcccatccgaaccctgaagctttcacacaact

SEQ ID NO: 72052 - DNA, 379 bp, Homo sapiens
ttggcctccccactccagggaggagggagctgaggaaaggcttggcttctggcatttctcaattcctcccatctcctctgctggcttctccgggagaccctgtcctaggtgggcaggtggttggtacaccaaggactacctgaacagacaaaaccttaagggcacctcaaggcatgatgcagagaactggcccaggccagggtgcctgcatcttaaatgctgcttctgccaattcccagcttagtgcactcctgaactcctgcggcctacctcggcttctcacctggaacaccagtgaatcatgctggacgatttctttgtctctgtttataacaaatgccctttttccctcccccagccccagtttccttttgcttaa

SEQ ID NO: 72053 - DNA, 1220 bp, Homo sapiens
atggcgggacacctggcttcggatgcctgccttcttgccccctccaggcggtggaggtgatgggccaggggggccggagccgggctgggttgatcctcggacctggctaagcttccaaggccctcctggagggccaggaatcgggccgggagttgggtcaggctctgaggtgtgggggattcccccatgccccccgctgtatgagttctgtggggggatggcgtactgtgggcctcaggttggagtgcggctagtgccccaaggcggcttggagacctctcagcctgagggcgaagcaggagtcagggtggagagcaactccgatggcacctccctggagccctgcaccgtcccccctggtgccgtgaaactggagaaggagaagctggagcaaaacccgcaggagtcccagaacatcaaagctctgcagaaagaactcgaacaatttgccaagctcctgaagcagaagaggatcaccctgggatatacacaggccgatgtggggctcaccctgggggttctatttgggaaggtgttcagccaaacgaccatctgccgctttgagggtctgcagcttagcttcaagaacatgtgtaagctgcggcccttgctgcagaagtgggtggaggaagctgacaacaatgaaaatcttcaggagacatgcaaagcagaaaccctcttgcaggctcgaaagagaaagcgaaccagtatcgagaaccgagtgagaggcaacctggagaatttgttcctgcagtgcccgaaacccacactgcagcagatcagccacatcgcccagcagcttgggctcgagaaggatgtggtccgagtgtggttctgtaaccggtgccagaaaggcaagcaatcaagcagcgactatgcataacgagaggattttgaggctgctgggtctcctttctcaggggtaccagtatcctttcctctggccccagggccccattttggtaccccaggctatgggagccctcacttcactgcactgtactcctcggtccctttccctgagggggaagcctttcccccgtctccgtcaccaccctgggctctcccatgcattcaaactgaggtgcctgcccttctaggaatgggggacagggggaggggaggagctagggaaagagaacctggagtttgtgccagggcttttggaattaagttcttcattcactaaggaaggaattgggaacacaaagggtgggggc

SEQ ID NO: 72054 - DNA, 419 bp, Homo sapiens
acttaccccgtatttcttgcccctggtggagaccgcaagcctctctttattcccagctaccgaattcatggtggcttttccagaggagagtatctaaaggttccaccgacgctacatccagaaggtcctccaacccagaagcgtcccccggctgcagggggctggctctcagccctcagggcaaggtttcttcagcggtggggtgggagggaatgaaagcaaatggatcccacaagtaatagcaccaatttgcagaaagggttggggtcgctggtttattcttctcttcaaagcatgcttttcctcgtccccttctgcctcttccagccgcacgtcctcttgtcacggccacatccacagaactggcattttcttcagccaagtcagtccgtgctcccccacgaggaaagcgagggata

SEQ ID NO: 72055 - DNA, 696 bp, Homo sapiens
gagactgctagggcccaccaatatctgggtgctctgctccttctgtgggcatagctagacaacatttccccacccccttgcatctagatgggaccatgcaattagtcctggccagtgaaatgtggctggaagtgttgcacaccacttccaggcctgccttcttaaatcttctgtgagatcatacatagtctctctttatttgtctgctggctagatgcagaggatctaggagagaactctgaagtcctagagggtagctgagccacaagatgggaggaacctggatccctcagtgactgtgtggaccagtctctcataccatactacatccccatctttactgcattgtgatacagaggaaaaaattaaaactttgttatgtgaaaccactgagatttggagcttgcttgttacagttgaaggaaaccaaaacatttctcctcaaaacactgaggattgctaagttaaaaacactaaaaatgcaggggaacactctgcctcagcctctatttgcttgacagcaggacataaatccttccttactggacacttgcttattggcccagagaaggcagcaggaggcaccagaggaatctggaaatagattctactattttccactttctcccgccttttcaaagacgggaatgtctctctcttttgtcttgacactatgtactatttatggctctttgt

SEQ ID NO: 72056 - DNA, 570 bp, Homo sapiens
acttgttctttttactgatatttgcaagatggatatatatgttgtttccagagctctcaggtatttataagtagctcaacctaaattaaataaattgtcaccaacctatttacactctacattttattatgcctaaagagtcagtgatgataaattcggaattagagaagtaataacctccagaagcacctttactgggtcaccattccttttgatcaaagggtgtcatcagtacagaacttaagtattatgtcatttaatttacagtgctttggctaattttatttaacttaattaatttaacatcttgaattaggttggttacattttgactgtttttacagtcaaggaaacttgtagaaacacagcaaagctagtgaccttcacactttcacgcatgaacataaatgagctcataagatcatcgtctctttttgttgcgtttcaaaggcgtttacctatcttggagtaagatctaacatttctgaccttgataggataatcatagataacatacttttaaatgaatttacagagaaaaataaattttatttgtcctaaaaaaaataa

SEQ ID NO: 72057 - DNA, 190 bp, Homo sapiens
gtgctgtattgtgttcttccatcaagaggaagaacctcacattggttttttttattgtgttgttaatcgctattgctgttcaatggttaaatctgttaattcttgatgggttgcaaaacagttattatagtctcagtctctcattccttcctcatttattatctgaataatttctaagtaagagattcac

SEQ ID NO: 72058 - DNA, 1461 bp, Homo sapiens
gaatctggcagaatatagcagtttaacactttgaaaacttgaaatatctttagcctggtataatatgagagtaaacagttcattgatatttatggactcctaagtttggtactgttttattcagcagacaggtacgataagcatctaccttcccactccctacaactgtagtgtatgatactgggatgcttaaattagaggctcaccagtagtcatggaccagatttttttgttttttttagagttttcattagaactgtatatcttgctacttagcagagagtcagaagcattagtaggatctcctgttgtgaattcctgcttggtaaaggtttatgctggccctgtgttgattattgagtagcagatcattttgtttttggagagggtttgtgtgtttcacctccacaaaacacttattccccggagggggaatggtggtgctctgaggtgcaaagagggattctcaggtgcccagaacctctcatttgaggaatgcatacccccacggtgttattgagggctgaagttagatacggtaactgatttcttaattgtatatttcctatatgggtatgggaatgggcatgatcaaatgatgaagaatgattggcatagtgtttaaaacaatattgactttgaggatcttcccccactctgtgcacgtgcacacacacactcttgcaggccaatccctcagtaacaggagttttcagttgagtatgaatatttctgcttccttttaggagttaaatttcaagaaaatatccttagactggtaagcttttggtatcttaactgctaaaatctgaatatttgaccattaagatatattccaactcttaaatgtctatcttgaaaattaagattaacatgacctttttttttaatttcaaaaaattgcttttaaacattttctattctctgaatgtttgttccaagcatgttggggataggtgggaacagacagaatggaggtgaggtacttctatttaggactggcatcgcacagaaggaatatgcttcagtgctcctgttgagtatttttaaattctagtcaaagaaaatagggcttttggcattctcattagttagaaatatatttaggatgtcttcccttttctttagacaaaaccagaatatccaatatgtaaaagtgaactattctggtgaagatggggggttttgtgaagacctttcctgtcccacatgactagacgatgaggcattcacattatttccaggtgaagttttacttgtgtgttaggtggatctctacaatgatgagacctttcttgttttaccttcttcctagactctctggaacttttgatttttttttaaccatgaacctgtatttcacaataaactattggtatagtagtgtcattcataccctaccccatccccaacaactttgcgtagagaatacctcagatttgtttacctcagggaatactt

SEQ ID NO: 72059 - DNA, 940 bp, Homo sapiens
  misc_feature (936)..(937): n is a, c, g, or t
  misc_feature (940)..(940): n is a, c, g, or t
ccgatttcttgtgccaagaaactaatagaacttatccaaataaaaattagcaaacaattattctagggatattttcagattttacttcatttcttgaaatgcgtgtgccatatgcaattgcatttcttgtgccaagaaactaatagaacttatttcactttacctttttttaaaatgtgaatttagttattatagttcaattttatggccttacagatggcttttattttgtttgcagctgacactgcagttcctttcatgcaaaataccataaactgtttgatgaaaatcatgcccctaatggaaactctctagtttttccatataactatcctactgtacatgtttaaacatattttatttttgctccaatggcttaatgtgaaaagctcctgcagataagtggacctgtcatgtggttaatcttgtttaagccaattcattaactgtgtactgatactgatgctatgttttttttaaatggattttattccaggtgaactttttttttataataatgttcgtctaaaataaaaactacataatgaaaatgaaaaaaaaaaaaaaaaaaaaaaaaaaaaaaaaaaaaaaaaaaaaaaaaaaaaaaaaaaaaaaaataaaaaaagagaggaggaaaaaaaaaccaacagacacacagaagattgatggtcgtcgcccgtccgcagacagagaaatctactaaacgccgttgatggtggggccgcccaccaacaagtagtaggtgaaaagatcgaacaatgttgcacaagcacaagaatgggcttcgaagagacgaggggcgggggctaccaaccaaaaaagagggccggcgcgaacgggaggtttgtatcacacacgcggggagtgagtgagcaatgaagtggcttacaagaggagccacgacgagatatatacacgcgggccggggagggaggnngan

SEQ ID NO: 72060 - DNA, 1107 bp, Homo sapiens
ctctctgaagagctccataaatctctggtgctgccagtctgactactgggggttagggggacagagaagtaacgtcacaagattttaagcttgggccagatatgggaaataatttaatcctagatcacattttacacatgaataactgagaacagaaagaagtgatttgcctgtgctcatacagcctttaaaaagaagagccaggattaaaacatctggttcccagcttctatcccaccatgctgtttggctagcaacaattatctctttaccttggcaactttttgcccttctgacattttctccatcttagatatttgaagattgttttaattccaggataattggtattaagatttttttaatgtctttgtcacttaagaaagaaatctgactctgaaataattttgtacacgtttctataaacttagatgaatttctttttaaaatagtacagaatctagaataccatctccactggttcactcagtaccaagtttttgtccttctttgacctgaatatttggaaattttgtcattagatcaccataagctttatttgtgtttgttccaccttctttccaaacctcgggaagaaggtttgcacaggctctgtgagggctcttgtactgtagctttgcccctcttcccatctttaaacttttctctgaattaggccttgtgtgagtaaaagattatgtcttattaaattcatgtgtttctgacaggttggatttgtctattaagtaacgggtttttctcaggctgtttttatagcatgctattttctccctgcagcatgcctcttccgatgtcgaaagaatgatcctgggtaacaaatgtgatatgaatgacaaaagacaagtgtcaaaagaaagaggggagaaggtaaatgtgaatggaatggataaaggttggaatctactcacattaagcatttcttttcttcatattatttaattattgattttttttaaaatctgtgttttaatccctttaaattggatatcaacaacaaagagatgtaatccatacttgaatggtgtgaattagtattcgagatccagcactgcactccagcctgggcaacagagtaagactctgttt

SEQ ID NO: 72061 - DNA, 864 bp, Homo sapiens
acggggcggggcgcgcaggccttctccgagaggaggggcggggcgtggggcggggcgagcagcggcggattggcgggcacgccccctcgcccgcggccccctccccgcctctctccaccgcctcctctggctccccggtcagagggccggagcgagaagatggcgaagacgtacgattatctcttcaagctcctgctgatcggcgactcgggggtaggcaagacctgcctcctgttccgcttctcagaggacgccttcaacaccaccttcatctccaccatcgtgcggcctcacatagaggaataaaaacaacccattttattatcccacaaaatgtctgctaatgaagcagtgtgatgtagtggacagagtattggatttggaatcactgtcacttatagcactgtggtgttgggaattgattttaaaattagaacgatagaactagatggaaagaaaattaagcttcagatatgggacacagcgggtcaggaaagattccgaacaatcacgacagcgtactacagaggagccatgggcattatgctggtctatgacatcacaaatgaaaaatcctttgacaatattaaaaattggatcagaaacattgaagagcatgcctcttccgatgtcgaaagaatgatcctgggtaacaaatgtgatatgaatgacaaaagacaagtgtcaaaagaaagaggggagaagctagcaattgactatgggattaaattcttggagacaagcgcaaaatccagtgcaaatgtagaagaggcctttttacactggcacgagatttatgacaaacctcaacgaaaaatgattgaccagcattcaccaggagcaggtggcccagggaaattacag

SEQ ID NO: 72062 - DNA, 402 bp, Homo sapiens
gggtgtatcacctttaccacgatcactaattcattaaaggttaacagtgaaaatgttaaaagggtttttatttacatggtgagaccagtggaataagtatttattgatttttgtttctctgtacttttcaaatttattatgaaccctttttaaagggaaaaaatggacaaacaaaaggtttctggagggtaggagtacattgacattatatactataactttaaatatataaagtactaaataaagatatttttcccccttatagggcattatgctggtctatgacatcacaaatgaaaaatcctttgacaatattaaaaattggatcagaaacattgaagagccccagggggtttccaaatcagaaccattggaaaagactcctcgctgggctagcttgta

SEQ ID NO: 72063 - DNA, 5323 bp, Homo sapiens
  misc_feature (5319)..(5320): n is a, c, g, or t
  misc_feature (5323)..(5323): n is a, c, g, or t
acggggcggggcgcgcaggccttctccgagaggaggggcggggcgtggggcggggcgagcagcggcggattggcgggcacgccccctcgcccgcggccccctccccgcctctctccaccgcctcctctggctccccggtcagagggccggagcgagaagatggcgaagacgtacgattatctcttcaagctcctgctgatcggcgactcgggggtaggcaagacctgcctcctgttccgcttctcagaggacgccttcaacaccaccttcatctccaccatcggaattgattttaaaattagaacgatagaactagatggaaagaaaattaagcttcagatatgggacacagcgggtcaggaaagattccgaacaatcacgacagcgtactacagaggagccatgggcattatgctggtctatgacatcacaaatgaaaaatcctttgacaatattaaaaattggatcagaaacattgaagagcatgcctcttccgatgtcgaaagaatgatcctgggtaacaaatgtgatatgaatgacaaaagacaagtgtcaaaagaaagaggggagaagctagcaattgactatgggattaaattcttggagacaagcgcaaaatccagtgcaaatgtagaagaggcattttttacacttgcacgagatataatgacaaaactcaacagaaaaatgaatgacagcaattcagcaggagcaggtggaccagtgaaaataacagaaaaccgatcaaagaagaccagtttctttcgttgctcgctactttgatgaactctttctgagagactgcagcacacctagagggccctttcctgcttctctgaaagcacaggtcacccagcctcagaatcacacctcccggctgctgctgagagcaccactgaacttagacctctcaacacagtatgccaagtggattccagcctcatggcctagcaaaagaacagactccctttttcaaacatggaagcaatgaagtggagacacatgcaggacctaactcgttttttccttgttttattacctgttgcagaagcggttatctttcttttttactttgcacatcagtgttagcctttccctatttcagcacaatcttagactcatatttgcacacttttgtgtcgtgaagttctagacaaatttgtacatgtggcaatgttaaaagagcatttacagcagaggttaatatactaaaattaaagggtatttggtctggttcatatggtcaaatattactgccttggtagcatttatttaagggctttttcttaaataagaatcattaaagtcattaaaaaaatttactgaaatgcccatcttgtcatcaaaggccacaatttctttatttcttcagattaagagctttgcctcatccccgacctgttttccagagtctgggtagctgaatgaatcactttaaaatgattacctctgcctaatctatagaaactgcatttggaaatcaccataatctcatttttccctggggtttgtatttgctattctttcccatgtttgacttaagtgtaatcactcttaagtaatatttgaacattattatctgtttctatttgtgaacttcttgagctgaaattttacgtgggctgagagatataccatttagggttttagtgcagcatctaactgtgattctgtcaataaggatatgtaatatattttttcttaggttcactccttagctggctggtttagttgtaataccaaattcctaccataatccctgtctacaaaagttaggtttagattttagtttgcggaaaccttccctatatagagacagattaacttgttgatataaatttaatagagctagctcttggtaatggtgaaaataatgagttttggttggttttatttggcagatgtttttagaaataaaagtacttagacctagtgcagcctctaggaaaagtcttgccttttcattagagaaaacaggaccaaggtttcagttttcaaacagctgttgttgaatgtgtagaacccagttccatctgttttggttcattgttacagaacttagtccagtcatttgggctaaagccaaccaaaagcttagttgcctttctcaacaaacactggtactggtatacttttgtagatgaaaccatcacaaggtatttagtgttaacttgtgtgccaaattcagatcactatgtcgttgttgctctagccttcagtgtcataacacaggggggataaaacagaggggatgagggaaatgaattctgttaataattattcttcctggtatgcctgttttgcttcacaaaggctactatcatgctggatagataagaacaggagatggcagtggaaagggattgcttgttaccacagagaattctcttcaaattaagatatgtcattagaatgcttggaccagtcaatcttttgtacttatttgaaaatataggaacaatttagcagctgcaaatatgcccaagctatttttaatagatatactaaacttattgttgacaaatttcagcctccttaatttttttttttttggtaattacctataggcttaaaagtcattcgttgctgttctagtataattagtagttccgtgattgaaagtttattgtaattctactatcttcaaattagatacattttcaaaaggaaaagataattttttagaaacatcttaatattcactatttcctgaaaaaatccaagcagttaacgctttctggatggtaacaaagtaccttctaaaagataagtgctatgacaccatgtatgaatgtaattctcttagtaatttacctctgactatttggtgtcttaacgctttggtttatataatctcaggggttgtctgcaaaccaaaactgacatattctgtggttagcttttattacttttttttttaacagaatgctttgctttggttatatttcttctttcttcttttgtcttatatggattaataactagtctccatgaacttcacttgaaagagcctgtaaaagttagatgagtctaaaagtgctctttgaagtagcagcaaattgggagtatatgctctgttatatagaaataaattgtccttgctattttcttacatttagctttgctagattgtatatacattgagctaagaccttaggaaattcactttctgcatgataaaatgacccaataaatattccactttgcttaataatgtacatacagtgcattattttttctatttgtagatgaatttaatgacagataattgtctgttccccgctgaaactgaagaaatctagtttttttgtgaacatttttgtggtcttatggataaggtacatgaagatttttgcagcagtattagtggttcagtggctgcactttattaatcagtgtgttaatttttgacagtgattggactagaccttttcaaatagagtctgagggtatcagacagtgaaaatgtgctgtaactaagtagcatgtaaatcagttgattgtaaaacgtttcgctgggaacttattttagctatattttacttcagacagattatgatacaataatctacctgtgcatcagttagtaggtgctgcagggtttcttactatttacagaaacattttgtgcagtctttgttataaattttcagaagactatactctttactttgaaggtctattttttaattatacctcatttagctaactagtattctaatacctggtagaaaaacagtgagccagcctttaagcatctaacaaaatttagactctttgttttgttttgaactgaagacatcattgggaaaggtaggaaatattagtttaggatagagcatacatgtcatatccagtagcataaaaaaagtattatctccctgtctccattaataaatttagctgtgcaatataggtgcgtttttgcagaagtttctagtaagagattataactccattttacaggttctgaatgctcagagtctatattaaggcttataaagtttttcctgtgatcagtaagtgacacatttaagcagacattcttttcaagttcatgacttagattcctttacaaatttagttctcaatctttaaaaaccacatttcattatgttggttaattattataaattttaagcactcatttctgcaatcaggtttctcagaattttttttttttaaacagaagagacattcctttttccttgttacatccaaggggggcacaggggtgggtggaaaggaatgtctaaaaatgaaatcccttgatatagagggacctagacggacaggatatgctaaaataatttcaaattctagcacaattttagagtagaataagtcatttttttagactaataaaattaatggctgtcatgttcactctgaaaaaaatctaaatgactgaaatgtacagaaataaaaattagcaaacaattattctagggatattttcagattttacttcatttcttgaaatgcgtgtgccatatgcaattgcatttcttgtgccaagaaactaatagaacttatttcactttacctttttttaaaatgtgaatttagttattatagttcaattttatggccttacagatggcttttattttgtttgcagctgacactgcagttcctttcatgcaaaataccataaactgtttgatgaaaatcatgcccctaatggaaactctctagtttttccatataactatcctactgtacatgtttaaacatattttatttttgctccaatggcttaatgtgaaaagctcctgcagataagtggacctgtcatgtggttaatcttgtttaagccaattcattaactgtgtactgatactgatgctatgttttttttaaatggattttattccaggtgaactttttttttataataatgttcgtctaaaataaaaactacataatgaaaatgaaaaaaaaaaaaaaaaaaaaaaaaaaaaaaaaaaaaaaaaaaaaaaaaaaaaaaaaaaaaaaaataaaaaaagagaggaggaaaaaaaaaccaacagacacacagaagattgatggtcgtcgcccgtccgcagacagagaaatctactaaacgccgttgatggtggggccgcccaccaacaagtagtaggtgaaaagatcgaacaatgttgcacaagcacaagaatgggcttcgaagagacgaggggcgggggctaccaaccaaaaaagagggccggcgcgaacgggaggtttgtatcacacacgcggggagtgagtgagcaatgaagtggcttacaagaggagccacgacgagatatatacacgcgggccggggagggaggnngan

SEQ ID NO: 72064 - DNA, 3209 bp, Homo sapiens
acggggcggggcgcgcaggccttctccgagaggaggggcggggcgtggggcggggcgagcagcggcggattggcgggcacgccccctcgcccgcggccccctccccgcctctctccaccgcctcctctggctccccggtcagagggccggagcgagaagatggcgaagacgtacgattatctcttcaagctcctgctgatcggcgactcgggggtaggcaagacctgcctcctgttccgcttctcagaggacgccttcaacaccaccttcatctccaccatcggaattgattttaaaattagaacgatagaactagatggaaagaaaattaagcttcagatatgggacacagcgggtcaggaaagattccgaacaatcacgacagcgtactacagaggagccatgggcattatgctggtctatgacatcacaaatgaaaaatcctttgacaatattaaaaattggatcagaaacattgaagagcatgcctcttccgatgtcgaaagaatgatcctgggtaacaaatgtgatatgaatgacaaaagacaagtgtcaaaagaaagaggggagaagctagcaattgactatgggattaaattcttggagacaagcgcaaaatccagtgcaaatgtagaagaggcattttttacacttgcacgagatataatgacaaaactcaacagaaaaatgaatgacagcaattcagcaggagcaggtggaccagtgaaaataacagaaaaccgatcaaagaagaccagtttctttcgttgctcgctactttgatgaactctttctgagagactgcagcacacctagagggccctttcctgcttctctgaaagcacaggtcacccagcctcagaatcacacctcccggctgctgctgagagcaccactgaacttagacctctcaacacagtatgccaagtggattccagcctcatggcctagcaaaagaacagactccctttttcaaacatggaagcaatgaagtggagacacatgcaggacctaactcgttttttccttgttttattacctgttgcagaagcggttatctttcttttttactttgcacatcagtgttagcctttccctatttcagcacaatcttagactcatatttgcacacttttgtgtcgtgaagttctagacaaatttgtacatgtggcaatgttaaaagagcatttacagcagaggttaatatactaaaattaaagggtatttggtctggttcatatggtcaaatattactgccttggtagcatttatttaagggctttttcttaaataagaatcattaaagtcattaaaaaaatttactgaaatgcccatcttgtcatcaaaggccacaatttctttatttcttcagattaagagctttgcctcatccccgacctgttttccagagtctgggtagctgaatgaatcactttaaaatgattacctctgcctaatctatagaaactgcatttggaaatcaccataatctcatttttccctggggtttgtatttgctattctttcccatgtttgacttaagtgtaatcactcttaagtaatatttgaacattattatctgtttctatttgtgaacttcttgagctgaaattttacgtgggctgagagatataccatttagggttttagtgcagcatctaactgtgattctgtcaataaggatatgtaatatattttttcttaggttcactccttagctggctggtttagttgtaataccaaattcctaccataatccctgtctacaaaagttaggtttagattttagtttgcggaaaccttccctatatagagacagattaacttgttgatataaatttaatagagctagctcttggtaatggtgaaaataatgagttttggttggttttatttggcagatgtttttagaaataaaagtacttagacctagtgcagcctctaggaaaagtcttgccttttcattagagaaaacaggaccaaggtttcagttttcaaacagctgttgttgaatgtgtagaacccagttccatctgttttggttcattgttacagaacttagtccagtcatttgggctaaagccaaccaaaagcttagttgcctttctcaacaaacactggtactggtatacttttgtagatgaaaccatcacaaggtatttagtgttaacttgtgtgccaaattcagatcactatgtcgttgttgctctagccttcagtgtcataacacaggggggataaaacagaggggatgagggaaatgaattctgttaataattattcttcctggtatgcctgttttgcttcacaaaggctactatcatgctggatagataagaacaggagatggcagtggaaagggattgcttgttaccacagagaattctcttcaaattaagatatgtcattagaatgcttggaccagtcaatcttttgtacttatttgaaaatataggaacaatttagcagctgcaaatatgcccaagctatttttaatagatatactaaacttattgttgacaaatttcagcctccttaatttttttttttttggtaattacctataggcttaaaagtcattcgttgctgttctagtataattagtagttccgtgattgaaagtttattgtaattctactatcttcaaattagatacattttcaaaaggaaaagataattttttagaaacatcttaatattcactatttcctgaaaaaatccaagcagttaacgctttctggatggtaacaaagtaccttctaaaagataagtgctatgacaccatgtatgaatgtaattctcttagtaatttacctctgactatttggtgtcttaacgctttggtttatataatctcaggggttgtctgcaaaccaaaactgacatattctgtggttagcttttattacttttttttttaacagaatgctttgctttggttatatttcttctttcttcttttgtcttatatggattaataactagtctccatgaacttcacttgaaagagcctgtaaaagttagatgagtctaaaagtgctctttgaagtagcagcaaattgggagtatatgctctgttatatagaaataaattgtccttgctattttcttacatttagctttgctagattgtatatacattgagctaagaccttaggaaattcactttctgcatgataaaatgacccaataaatattccactttgctt

SEQ ID NO: 72065 - DNA, 4421 bp, Homo sapiens
acggggcggggcgcgcaggccttctccgagaggaggggcggggcgtggggcggggcgagcagcggcggattggcgggcacgccccctcgcccgcggccccctccccgcctctctccaccgcctcctctggctccccggtcagagggccggagcgagaagatggcgaagacgtacgattatctcttcaagctcctgctgatcggcgactcgggggtaggcaagacctgcctcctgttccgcttctcagaggacgccttcaacaccaccttcatctccaccatcggaattgattttaaaattagaacgatagaactagatggaaagaaaattaagcttcagatatgggacacagcgggtcaggaaagattccgaacaatcacgacagcgtactacagaggagccatgggcattatgctggtctatgacatcacaaatgaaaaatcctttgacaatattaaaaattggatcagaaacattgaagagcatgcctcttccgatgtcgaaagaatgatcctgggtaacaaatgtgatatgaatgacaaaagacaagtgtcaaaagaaagaggggagaagctagcaattgactatgggattaaattcttggagacaagcgcaaaatccagtgcaaatgtagaagaggcattttttacacttgcacgagatataatgacaaaactcaacagaaaaatgaatgacagcaattcagcaggagcaggtggaccagtgaaaataacagaaaaccgatcaaagaagaccagtttctttcgttgctcgctactttgatgaactctttctgagagactgcagcacacctagagggccctttcctgcttctctgaaagcacaggtcacccagcctcagaatcacacctcccggctgctgctgagagcaccactgaacttagacctctcaacacagtatgccaagtggattccagcctcatggcctagcaaaagaacagactccctttttcaaacatggaagcaatgaagtggagacacatgcaggacctaactcgttttttccttgttttattacctgttgcagaagcggttatctttcttttttactttgcacatcagtgttagcctttccacgtgggctgagagatataccatttagggttttagtgcagcatctaactgtgattctgtcaataaggatatgtaatatattttttcttaggttcactccttagctggctggtttagttgtaataccaaattcctaccataatccctgtctacaaaagttaggtttagattttagtttgcggaaaccttccctatatagagacagattaacttgttgatataaatttaatagagctagctcttggtaatggtgaaaataatgagttttggttggttttatttggcagatgtttttagaaataaaagtacttagacctagtgcagcctctaggaaaagtcttgccttttcattagagaaaacaggaccaaggtttcagttttcaaacagctgttgttgaatgtgtagaacccagttccatctgttttggttcattgttacagaacttagtccagtcatttgggctaaagccaaccaaaagcttagttgcctttctcaacaaacactggtactggtatacttttgtagatgaaaccatcacaaggtatttagtgttaacttgtgtgccaaattcagatcactatgtcgttgttgctctagccttcagtgtcataacacaggggggataaaacagaggggatgagggaaatgaattctgttaataattattcttcctggtatgcctgttttgcttcacaaaggctactatcatgctggatagataagaacaggagatggcagtggaaagggattgcttgttaccacagagaattctcttcaaattaagatatgtcattagaatgcttggaccagtcaatcttttgtacttatttgaaaatataggaacaatttagcagctgcaaatatgcccaagctatttttaatagatatactaaacttattgttgacaaatttcagcctccttaatttttttttttttggtaattacctataggcttaaaagtcattcgttgctgttctagtataattagtagttccgtgattgaaagtttattgtaattctactatcttcaaattagatacattttcaaaaggaaaagataattttttagaaacatcttaatattcactatttcctgaaaaaatccaagcagttaacgctttctggatggtaacaaagtaccttctaaaagataagtgctatgacaccatgtatgaatgtaattctcttagtaatttacctctgactatttggtgtcttaacgctttggtttatataatctcaggggttgtctgcaaaccaaaactgacatattctgtggttagcttttattacttttttttttaacagaatgctttgctttggttatatttcttctttcttcttttgtcttatatggattaataactagtctccatgaacttcacttgaaagagcctgtaaaagttagatgagtctaaaagtgctctttgaagtagcagcaaattgggagtatatgctctgttatatagaaataaattgtccttgctattttcttacatttagctttgctagattgtatatacattgagctaagaccttaggaaattcactttctgcatgataaaatgacccaataaatattccactttgcttaataatgtacatacagtgcattattttttctatttgtagatgaatttaatgacagataattgtctgttccccgctgaaactgaagaaatctagtttttttgtgaacatttttgtggtcttatggataaggtacatgaagatttttgcagcagtattagtggttcagtggctgcactttattaatcagtgtgttaatttttgacagtgattggactagaccttttcaaatagagtctgagggtatcagacagtgaaaatgtgctgtaactaagtagcatgtaaatcagttgattgtaaaacgtttcgctgggaacttattttagctatattttacttcagacagattatgatacaataatctacctgtgcatcagttagtaggtgctgcagggtttcttactatttacagaaacattttgtgcagtctttgttataaattttcagaagactatactctttactttgaaggtctattttttaattatacctcatttagctaactagtattctaatacctggtagaaaaacagtgagccagcctttaagcatctaacaaaatttagactctttgttttgttttgaactgaagacatcattgggaaaggtaggaaatattagtttaggatagagcatacatgtcatatccagtagcataaaaaaagtattatctccctgtctccattaataaatttagctgtgcaatataggtgcgtttttgcagaagtttctagtaagagattataactccattttacaggttctgaatgctcagagtctatattaaggcttataaagtttttcctgtgatcagtaagtgacacatttaagcagacattcttttcaagttcatgacttagattcctttacaaatttagttctcaatctttaaaaaccacatttcattatgttggttaattattataaattttaagcactcatttctgcaatcaggtttctcagaattttttttttttaaacagaagagacattcctttttccttgttacatccaaggggggcacaggggtgggtggaaaggaatgtctaaaaatgaaatcccttgatatagagggacctagacggacaggatatgctaaaataatttcaaattctagcacaattttagagtagaataagtcatttttttagactaataaaattaatggctgtcatgttcactctgaaaaaaatctaaatgactgaaatgtacagaaataaaaattagcaaacaattattctagggatattttcagattttacttcatttcttgaaatgcgtgtgccatatgcaattgcatttcttgtgccaagaaactaatagaacttatttcactttacctttttttaaaatgtgaatttagttattatagttcaattttatggccttacagatggcttttattttgtttgcagctgacactgcagttcctttcatgcaaaataccataaactgtttgatgaaaatcatgcccctaatggaaactctctagtttttccatataactatcctactgtacatgtttaaacatattttatttttgctccaatggcttaatgtgaaaagctcctgcagataagtggacctgtcatgtggttaatcttgtttaagccaattcattaactgtgtactgatactgatgctatgttttttttaaatggattttattccaggtgaactttttttttataataatgttcgtctaaaataaaaactacataatgaaaatgaaaa

SEQ ID NO: 72066 - DNA, 5255 bp, Homo sapiens
ctctctgaagagctccataaatctctggtgctgccagtctgactactgggggttagggggacagagaagtaacgtcacaagattttaagcttgggccagatatgggaaataatttaatcctagatcacattttacacatgaataactgagaacagaaagaagtgatttgcctgtgctcatacagcctttaaaaagaagagccaggattaaaacatctggttcccagcttctatcccaccatgctgtttggctagcaacaattatctctttaccttggcaactttttgcccttctgacattttctccatcttagatatttgaagattgttttaattccaggataattggtattaagatttttttaatgtctttgtcacttaagaaagaaatctgactctgaaataattttgtacacgtttctataaacttagatgaatttctttttaaaatagtacagaatctagaataccatctccactggttcactcagtaccaagtttttgtccttctttgacctgaatatttggaaattttgtcattagatcaccataagctttatttgtgtttgttccaccttctttccaaacctcgggaagaaggtttgcacaggctctgtgagggctcttgtactgtagctttgcccctcttcccatctttaaacttttctctgaattaggccttgtgtgagtaaaagattatgtcttattaaattcatgtgtttctgacaggttggatttgtctattaagtaacgggtttttctcaggctgtttttatagcatgctattttctccctgcagcatgcctcttccgatgtcgaaagaatgatcctgggtaacaaatgtgatatgaatgacaaaagacaagtgtcaaaagaaagaggggagaagctagcaattgactatgggattaaattcttggagacaagcgcaaaatccagtgcaaatgtagaagaggcattttttacacttgcacgagatataatgacaaaactcaacagaaaaatgaatgacagcaattcagcaggagcaggtggaccagtgaaaataacagaaaaccgatcaaagaagaccagtttctttcgttgctcgctactttgatgaactctttctgagagactgcagcacacctagagggccctttcctgcttctctgaaagcacaggtcacccagcctcagaatcacacctcccggctgctgctgagagcaccactgaacttagacctctcaacacagtatgccaagtggattccagcctcatggcctagcaaaagaacagactccctttttcaaacatggaagcaatgaagtggagacacatgcaggacctaactcgttttttccttgttttattacctgttgcagaagcggttatctttcttttttactttgcacatcagtgttagcctttccctatttcagcacaatcttagactcatatttgcacacttttgtgtcgtgaagttctagacaaatttgtacatgtggcaatgttaaaagagcatttacagcagaggttaatatactaaaattaaagggtatttggtctggttcatatggtcaaatattactgccttggtagcatttatttaagggctttttcttaaataagaatcattaaagtcattaaaaaaatttactgaaatgcccatcttgtcatcaaaggccacaatttctttatttcttcagattaagagctttgcctcatccccgacctgttttccagagtctgggtagctgaatgaatcactttaaaatgattacctctgcctaatctatagaaactgcatttggaaatcaccataatctcatttttccctggggtttgtatttgctattctttcccatgtttgacttaagtgtaatcactcttaagtaatatttgaacattattatctgtttctatttgtgaacttcttgagctgaaattttacgtgggctgagagatataccatttagggttttagtgcagcatctaactgtgattctgtcaataaggatatgtaatatattttttcttaggttcactccttagctggctggtttagttgtaataccaaattcctaccataatccctgtctacaaaagttaggtttagattttagtttgcggaaaccttccctatatagagacagattaacttgttgatataaatttaatagagctagctcttggtaatggtgaaaataatgagttttggttggttttatttggcagatgtttttagaaataaaagtacttagacctagtgcagcctctaggaaaagtcttgccttttcattagagaaaacaggaccaaggtttcagttttcaaacagctgttgttgaatgtgtagaacccagttccatctgttttggttcattgttacagaacttagtccagtcatttgggctaaagccaaccaaaagcttagttgcctttctcaacaaacactggtactggtatacttttgtagatgaaaccatcacaaggtatttagtgttaacttgtgtgccaaattcagatcactatgtcgttgttgctctagccttcagtgtcataacacaggggggataaaacagaggggatgagggaaatgaattctgttaataattattcttcctggtatgcctgttttgcttcacaaaggctactatcatgctggatagataagaacaggagatggcagtggaaagggattgcttgttaccacagagaattctcttcaaattaagatatgtcattagaatgcttggaccagtcaatcttttgtacttatttgaaaatataggaacaatttagcagctgcaaatatgcccaagctatttttaatagatatactaaacttattgttgacaaatttcagcctccttaatttttttttttttggtaattacctataggcttaaaagtcattcgttgctgttctagtataattagtagttccgtgattgaaagtttattgtaattctactatcttcaaattagatacattttcaaaaggaaaagataattttttagaaacatcttaatattcactatttcctgaaaaaatccaagcagttaacgctttctggatggtaacaaagtaccttctaaaagataagtgctatgacaccatgtatgaatgtaattctcttagtaatttacctctgactatttggtgtcttaacgctttggtttatataatctcaggggttgtctgcaaaccaaaactgacatattctgtggttagcttttattacttttttttttaacagaatgctttgctttggttatatttcttctttcttcttttgtcttatatggattaataactagtctccatgaacttcacttgaaagagcctgtaaaagttagatgagtctaaaagtgctctttgaagtagcagcaaattgggagtatatgctctgttatatagaaataaattgtccttgctattttcttacatttagctttgctagattgtatatacattgagctaagaccttaggaaattcactttctgcatgataaaatgacccaataaatattccactttgcttaataatgtacatacagtgcattattttttctatttgtagatgaatttaatgacagataattgtctgttccccgctgaaactgaagaaatctagtttttttgtgaacatttttgtggtcttatggataaggtacatgaagatttttgcagcagtattagtggttcagtggctgcactttattaatcagtgtgttaatttttgacagtgattggactagaccttttcaaatagagtctgagggtatcagacagtgaaaatgtgctgtaactaagtagcatgtaaatcagttgattgtaaaacgtttcgctgggaacttattttagctatattttacttcagacagattatgatacaataatctacctgtgcatcagttagtaggtgctgcagggtttcttactatttacagaaacattttgtgcagtctttgttataaattttcagaagactatactctttactttgaaggtctattttttaattatacctcatttagctaactagtattctaatacctggtagaaaaacagtgagccagcctttaagcatctaacaaaatttagactctttgttttgttttgaactgaagacatcattgggaaaggtaggaaatattagtttaggatagagcatacatgtcatatccagtagcataaaaaaagtattatctccctgtctccattaataaatttagctgtgcaatataggtgcgtttttgcagaagtttctagtaagagattataactccattttacaggttctgaatgctcagagtctatattaaggcttataaagtttttcctgtgatcagtaagtgacacatttaagcagacattcttttcaagttcatgacttagattcctttacaaatttagttctcaatctttaaaaaccacatttcattatgttggttaattattataaattttaagcactcatttctgcaatcaggtttctcagaattttttttttttaaacagaagagacattcctttttccttgttacatccaaggggggcacaggggtgggtggaaaggaatgtctaaaaatgaaatcccttgatatagagggacctagacggacaggatatgctaaaataatttcaaattctagcacaattttagagtagaataagtcatttttttagactaataaaattaatggctgtcatgttcactctgaaaaaaatctaaatgactgaaatgtacagaaataaaaattagcaaacaattattctagggatattttcagattttacttcatttcttgaaatgcgtgtgccatatgcaattgcatttcttgtgccaagaaactaatagaacttatttcactttacctttttttaaaatgtgaatttagttattatagttcaattttatggccttacagatggcttttattttgtttgcagctgacactgcagttcctttcatgcaaaataccataaactgtttgatgaaaatcatgcccctaatggaaactctctagtttttccatataactatcctactgtacatgtttaaacatattttatttttgctccaatggcttaatgtgaaaagctcctgcagataagtggacctgtcatgtggttaatcttgtttaagccaattcattaactgtgtactgatactgatgctatgttttttttaaatggattttattccaggtgaactttttttttataataatgttcgtctaaaataaaaactacataatgaaaatgaaaa

SEQ ID NO: 72067 - DNA, 4348 bp, Homo sapiens
gggtagaggggcagggcggggcaggcctgggaggaggggacggttcaggcttccttacacttgcacgaggaataatgacaaaactcaacagaaaaatgaatgacagcaattcagcaggagcaggtggaccagtgaaaataacagaaaaccgatcaaagaagaccagtttctttcgttgctcgctactttgatgaactctttctgagagactgcagcacacctagagggccctttcctgcttctctgaaagcacaggtcacccagcctcagaatcacacctcccggctgctgctgagagcaccactgaacttagacctctcaacacagtatgccaagtggattccagcctcatggcctagcaaaagaacagactccctttttcaaacatggaagcaatgaagtggagacacatgcaggacctaactcgttttttccttgttttattacctgttgcagaagcggttatctttcttttttactttgcacatcagtgttagcctttccctatttcagcacaatcttagactcatatttgcacacttttgtgtcgtgaagttctagacaaatttgtacatgtggcaatgttaaaagagcatttacagcagaggttaatatactaaaattaaagggtatttggtctggttcatatggtcaaatattactgccttggtagcatttatttaagggctttttcttaaataagaatcattaaagtcattaaaaaaatttactgaaatgcccatcttgtcatcaaaggccacaatttctttatttcttcagattaagagctttgcctcatccccgacctgttttccagagtctgggtagctgaatgaatcactttaaaatgattacctctgcctaatctatagaaactgcatttggaaatcaccataatctcatttttccctggggtttgtatttgctattctttcccatgtttgacttaagtgtaatcactcttaagtaatatttgaacattattatctgtttctatttgtgaacttcttgagctgaaattttacgtgggctgagagatataccatttagggttttagtgcagcatctaactgtgattctgtcaataaggatatgtaatatattttttcttaggttcactccttagctggctggtttagttgtaataccaaattcctaccataatccctgtctacaaaagttaggtttagattttagtttgcggaaaccttccctatatagagacagattaacttgttgatataaatttaatagagctagctcttggtaatggtgaaaataatgagttttggttggttttatttggcagatgtttttagaaataaaagtacttagacctagtgcagcctctaggaaaagtcttgccttttcattagagaaaacaggaccaaggtttcagttttcaaacagctgttgttgaatgtgtagaacccagttccatctgttttggttcattgttacagaacttagtccagtcatttgggctaaagccaaccaaaagcttagttgcctttctcaacaaacactggtactggtatacttttgtagatgaaaccatcacaaggtatttagtgttaacttgtgtgccaaattcagatcactatgtcgttgttgctctagccttcagtgtcataacacaggggggataaaacagaggggatgagggaaatgaattctgttaataattattcttcctggtatgcctgttttgcttcacaaaggctactatcatgctggatagataagaacaggagatggcagtggaaagggattgcttgttaccacagagaattctcttcaaattaagatatgtcattagaatgcttggaccagtcaatcttttgtacttatttgaaaatataggaacaatttagcagctgcaaatatgcccaagctatttttaatagatatactaaacttattgttgacaaatttcagcctccttaatttttttttttttggtaattacctataggcttaaaagtcattcgttgctgttctagtataattagtagttccgtgattgaaagtttattgtaattctactatcttcaaattagatacattttcaaaaggaaaagataattttttagaaacatcttaatattcactatttcctgaaaaaatccaagcagttaacgctttctggatggtaacaaagtaccttctaaaagataagtgctatgacaccatgtatgaatgtaattctcttagtaatttacctctgactatttggtgtcttaacgctttggtttatataatctcaggggttgtctgcaaaccaaaactgacatattctgtggttagcttttattacttttttttttaacagaatgctttgctttggttatatttcttctttcttcttttgtcttatatggattaataactagtctccatgaacttcacttgaaagagcctgtaaaagttagatgagtctaaaagtgctctttgaagtagcagcaaattgggagtatatgctctgttatatagaaataaattgtccttgctattttcttacatttagctttgctagattgtatatacattgagctaagaccttaggaaattcactttctgcatgataaaatgacccaataaatattccactttgcttaataatgtacatacagtgcattattttttctatttgtagatgaatttaatgacagataattgtctgttccccgctgaaactgaagaaatctagtttttttgtgaacatttttgtggtcttatggataaggtacatgaagatttttgcagcagtattagtggttcagtggctgcactttattaatcagtgtgttaatttttgacagtgattggactagaccttttcaaatagagtctgagggtatcagacagtgaaaatgtgctgtaactaagtagcatgtaaatcagttgattgtaaaacgtttcgctgggaacttattttagctatattttacttcagacagattatgatacaataatctacctgtgcatcagttagtaggtgctgcagggtttcttactatttacagaaacattttgtgcagtctttgttataaattttcagaagactatactctttactttgaaggtctattttttaattatacctcatttagctaactagtattctaatacctggtagaaaaacagtgagccagcctttaagcatctaacaaaatttagactctttgttttgttttgaactgaagacatcattgggaaaggtaggaaatattagtttaggatagagcatacatgtcatatccagtagcataaaaaaagtattatctccctgtctccattaataaatttagctgtgcaatataggtgcgtttttgcagaagtttctagtaagagattataactccattttacaggttctgaatgctcagagtctatattaaggcttataaagtttttcctgtgatcagtaagtgacacatttaagcagacattcttttcaagttcatgacttagattcctttacaaatttagttctcaatctttaaaaaccacatttcattatgttggttaattattataaattttaagcactcatttctgcaatcaggtttctcagaattttttttttttaaacagaagagacattcctttttccttgttacatccaaggggggcacaggggtgggtggaaaggaatgtctaaaaatgaaatcccttgatatagagggacctagacggacaggatatgctaaaataatttcaaattctagcacaattttagagtagaataagtcatttttttagactaataaaattaatggctgtcatgttcactctgaaaaaaatctaaatgactgaaatgtacagaaataaaaattagcaaacaattattctagggatattttcagattttacttcatttcttgaaatgcgtgtgccatatgcaattgcatttcttgtgccaagaaactaatagaacttatttcactttacctttttttaaaatgtgaatttagttattatagttcaattttatggccttacagatggcttttattttgtttgcagctgacactgcagttcctttcatgcaaaataccataaactgtttgatgaaaatcatgcccctaatggaaactctctagtttttccatataactatcctactgtacatgtttaaacatattttatttttgctccaatggcttaatgtgaaaagctcctgcagataagtggacctgtcatgtggttaatcttgtttaagccaattcattaactgtgtactgatactgatgctatgttttttttaaatggattttattccaggtgaactttttttttataataatgttcgtctaaaataaaaactacataatgaaaatgaaaa

SEQ ID NO: 72068 - DNA, 557 bp, Homo sapiens
ccgatttcttgtgccaagaaactaatagaacttatccaaataaaaattagcaaacaattattctagggatattttcagattttacttcatttcttgaaatgcgtgtgccatatgcaattgcatttcttgtgccaagaaactaatagaacttatttcactttacctttttttaaaatgtgaatttagttattatagttcaattttatggccttacagatggcttttattttgtttgcagctgacactgcagttcctttcatgcaaaataccataaactgtttgatgaaaatcatgcccctaatggaaactctctagtttttccatataactatcctactgtacatgtttaaacatattttatttttgctccaatggcttaatgtgaaaagctcctgcagataagtggacctgtcatgtggttaatcttgtttaagccaattcattaactgtgtactgatactgatgctatgttttttttaaatggattttattccaggtgaactttttttttataataatgttcgtctaaaataaaaactacataatgaaaatgaaaa

SEQ ID NO: 72069 - DNA, 4940 bp, Homo sapiens
acggggcggggcgcgcaggccttctccgagaggaggggcggggcgtggggcggggcgagcagcggcggattggcgggcacgccccctcgcccgcggccccctccccgcctctctccaccgcctcctctggctccccggtcagagggccggagcgagaagatggcgaagacgtacgattatctcttcaagctcctgctgatcggcgactcgggggtaggcaagacctgcctcctgttccgcttctcagaggacgccttcaacaccaccttcatctccaccatcggaattgattttaaaattagaacgatagaactagatggaaagaaaattaagcttcagatatgggacacagcgggtcaggaaagattccgaacaatcacgacagcgtactacagaggagccatgggcattatgctggtctatgacatcacaaatgaaaaatcctttgacaatattaaaaattggatcagaaacattgaagagcatgcctcttccgatgtcgaaagaatgatcctgggtaacaaatgtgatatgaatgacaaaagacaagtgtcaaaagaaagaggggagaagctagcaattgactatgggattaaattcttggagacaagcgcaaaatccagtgcaaatgtagaagaggcattttttacacttgcacgagatataatgacaaaactcaacagaaaaatgaatgacagcaattcagcaggagcaggtggaccagtgaaaataacagaaaaccgatcaaagaagaccagtttctttcgttgctcgctactttgatgaactctttctgagagactgcagcacacctagagggccctttcctgcttctctgaaagcacaggtcacccagcctcagaatcacacctcccggctgctgctgagagcaccactgaacttagacctctcaacacagtatgccaagtggattccagcctcatggcctagcaaaagaacagactccctttttcaaacatggaagcaatgaagtggagacacatgcaggacctaactcgttttttccttgttttattacctgttgcagaagcggttatctttcttttttactttgcacatcagtgttagcctttccctatttcagcacaatcttagactcatatttgcacacttttgtgtcgtgaagttctagacaaatttgtacatgtggcaatgttaaaagagcatttacagcagaggttaatatactaaaattaaagggtatttggtctggttcatatggtcaaatattactgccttggtagcatttatttaagggctttttcttaaataagaatcattaaagtcattaaaaaaatttactgaaatgcccatcttgtcatcaaaggccacaatttctttatttcttcagattaagagctttgcctcatccccgacctgttttccagagtctgggtagctgaatgaatcactttaaaatgattacctctgcctaatctatagaaactgcatttggaaatcaccataatctcatttttccctggggtttgtatttgctattctttcccatgtttgacttaagtgtaatcactcttaagtaatatttgaacattattatctgtttctatttgtgaacttcttgagctgaaattttacgtgggctgagagatataccatttagggttttagtgcagcatctaactgtgattctgtcaataaggatatgtaatatattttttcttaggttcactccttagctggctggtttagttgtaataccaaattcctaccataatccctgtctacaaaagttaggtttagattttagtttgcggaaaccttccctatatagagacagattaacttgttgatataaatttaatagagctagctcttggtaatggtgaaaataatgagttttggttggttttatttggcagatgtttttagaaataaaagtacttagacctagtgcagcctctaggaaaagtcttgccttttcattagagaaaacaggaccaaggtttcagttttcaaacagctgttgttgaatgtgtagaacccagttccatctgttttggttcattgttacagaacttagtccagtcatttgggctaaagccaaccaaaagcttagttgcctttctcaacaaacactggtactggtatacttttgtagatgaaaccatcacaaggtatttagtgttaacttgtgtgccaaattcagatcactatgtcgttgttgctctagccttcagtgtcataacacaggggggataaaacagaggggatgagggaaatgaattctgttaataattattcttcctggtatgcctgttttgcttcacaaaggctactatcatgctggatagataagaacaggagatggcagtggaaagggattgcttgttaccacagagaattctcttcaaattaagatatgtcattagaatgcttggaccagtcaatcttttgtacttatttgaaaatataggaacaatttagcagctgcaaatatgcccaagctatttttaatagatatactaaacttattgttgacaaatttcagcctccttaatttttttttttttggtaattacctataggcttaaaagtcattcgttgctgttctagtataattagtagttccgtgattgaaagtttattgtaattctactatcttcaaattagatacattttcaaaaggaaaagataattttttagaaacatcttaatattcactatttcctgaaaaaatccaagcagttaacgctttctggatggtaacaaagtaccttctaaaagataagtgctatgacaccatgtatgaatgtaattctcttagtaatttacctctgactatttggtgtcttaacgctttggtttatataatctcaggggttgtctgcaaaccaaaactgacatattctgtggttagcttttattacttttttttttaacagaatgctttgctttggttatatttcttctttcttcttttgtcttatatggattaataactagtctccatgaacttcacttgaaagagcctgtaaaagttagatgagtctaaaagtgctctttgaagtagcagcaaattgggagtatatgctctgttatatagaaataaattgtccttgctattttcttacatttagctttgctagattgtatatacattgagctaagaccttaggaaattcactttctgcatgataaaatgacccaataaatattccactttgcttaataatgtacatacagtgcattattttttctatttgtagatgaatttaatgacagataattgtctgttccccgctgaaactgaagaaatctagtttttttgtgaacatttttgtggtcttatggataaggtacatgaagatttttgcagcagtattagtggttcagtggctgcactttattaatcagtgtgttaatttttgacagtgattggactagaccttttcaaatagagtctgagggtatcagacagtgaaaatgtgctgtaactaagtagcatgtaaatcagttgattgtaaaacgtttcgctgggaacttattttagctatattttacttcagacagattatgatacaataatctacctgtgcatcagttagtaggtgctgcagggtttcttactatttacagaaacattttgtgcagtctttgttataaattttcagaagactatactctttactttgaaggtctattttttaattatacctcatttagctaactagtattctaatacctggtagaaaaacagtgagccagcctttaagcatctaacaaaatttagactctttgttttgttttgaactgaagacatcattgggaaaggtaggaaatattagtttaggatagagcatacatgtcatatccagtagcataaaaaaagtattatctccctgtctccattaataaatttagctgtgcaatataggtgcgtttttgcagaagtttctagtaagagattataactccattttacaggttctgaatgctcagagtctatattaaggcttataaagtttttcctgtgatcagtaagtgacacatttaagcagacattcttttcaagttcatgacttagattcctttacaaatttagttctcaatctttaaaaaccacatttcattatgttggttaattattataaattttaagcactcatttctgcaatcaggtttctcagaattttttttttttaaacagaagagacattcctttttccttgttacatccaaggggggcacaggggtgggtggaaaggaatgtctaaaaatgaaatcccttgatatagagggacctagacggacaggatatgctaaaataatttcaaattctagcacaattttagagtagaataagtcatttttttagactaataaaattaatggctgtcatgttcactctgaaaaaaatctaaatgactgaaatgtacagaaataaaaattagcaaacaattattctagggatattttcagattttacttcatttcttgaaatgcgtgtgccatatgcaattgcatttcttgtgccaagaaactaatagaacttatttcactttacctttttttaaaatgtgaatttagttattatagttcaattttatggccttacagatggcttttattttgtttgcagctgacactgcagttcctttcatgcaaaataccataaactgtttgatgaaaatcatgcccctaatggaaactctctagtttttccatataactatcctactgtacatgtttaaacatattttatttttgctccaatggcttaatgtgaaaagctcctgcagataagtggacctgtcatgtggttaatcttgtttaagccaattcattaactgtgtactgatactgatgctatgttttttttaaatggattttattccaggtgaactttttttttataataatgttcgtctaaaataaaaactacataatgaaaatgaaaa

SEQ ID NO: 72070 - DNA, 5191 bp, Homo sapiens
acggggcggggcgcgcaggccttctccgagaggaggggcggggcgtggggcggggcgagcagcggcggattggcgggcacgccccctcgcccgcggccccctccccgcctctctccaccgcctcctctggctccccggtcagagggccggagcgagaagatggcgaagacgtacgattatctcttcaagctcctgctgatcggcgactcgggggtaggcaagacctgcctcctgttccgcttctcagaggacgccttcaacaccaccttcatctccaccatcggaattgattttaaaattagaacgatagaactagatggaaagaaaattaagcttcagatatgggacacagcgggtcaggaaagattccgaacaatcacgacagcgtactacagaggagccatgggcattatgctggtctatgacatcacaaatgaaaaatcctttgacaatattaaaaattggatcagaaacattgaagagcatgcctcttccgatgtcgaaagaatgatcctgggtaacaaatgtgatatgaatgacaaaagacaagtgtcaaaagaaagaggggagaagctagcaattgactatgggattaaattcttggagacaagcgcaaaatccagtgcaaatgtagaagaggcattttttacacttgcacgagatataatgacaaaactcaacagaaaaatgaatgacagcaattcagcaggagcaggtggaccagtgaaaataacagaaaaccgatcaaagaagaccagtttctttcgttgctcgctactttgatgaactctttctgagagactgcagcacacctagagggccctttcctgcttctctgaaagcacaggtcacccagcctcagaatcacacctcccggctgctgctgagagcaccactgaacttagacctctcaacacagtatgccaagtggattccagcctcatggcctagcaaaagaacagactccctttttcaaacatggaagcaatgaagtggagacacatgcaggacctaactcgttttttccttgttttattacctgttgcagaagcggttatctttcttttttactttgcacatcagtgttagcctttccctatttcagcacaatcttagactcatatttgcacacttttgtgtcgtgaagttctagacaaatttgtacatgtggcaatgttaaaagagcatttacagcagaggttaatatactaaaattaaagggtatttggtctggttcatatggtcaaatattactgccttggtagcatttatttaagggctttttcttaaataagaatcattaaagtcattaaaaaaatttactgaaatgcccatcttgtcatcaaaggccacaatttctttatttcttcagattaagagctttgcctcatccccgacctgttttccagagtctgggtagctgaatgaatcactttaaaatgattacctctgcctaatctatagaaactgcatttggaaatcaccataatctcatttttccctggggtttgtatttgctattctttcccatgtttgacttaagtgtaatcactcttaagtaatatttgaacattattatctgtttctatttgtgaacttcttgagctgaaattttacgtgggctgagagatataccatttagggttttagtgcagcatctaactgtgattctgtcaataaggatatgtaatatattttttcttaggttcactccttagctggctggtttagttgtaataccaaattcctaccataatccctgtctacaaaagttaggtttagattttagtttgcggaaaccttccctatatagagacagattaacttgttgatataaatttaatagagctagctcttggtaatggtgaaaataatgagttttggttggttttatttggcagatgtttttagaaataaaagtacttagacctagtgcagcctctaggaaaagtcttgccttttcattagagaaaacaggaccaaggtttcagttttcaaacagctgttgttgaatgtgtagaacccagttccatctgttttggttcattgttacagaacttagtccagtcatttgggctaaagccaaccaaaagcttagttgcctttctcaacaaacactggtactggtatacttttgtagatgaaaccatcacaaggtatttagtgttaacttgtgtgccaaattcagatcactatgtcgttgttgctctagccttcagtgtcataacacaggggggataaaacagaggggatgagggaaatgaattctgttaataattattcttcctggtatgcctgttttgcttcacaaaggctactatcatgctggatagataagaacaggagatggcagtggaaagggattgcttgttaccacagagaattctcttcaaattaagatatgtcattagaatgcttggaccagtcaatcttttgtacttatttgaaaatataggaacaatttagcagctgcaaatatgcccaagctatttttaatagatatactaaacttattgttgacaaatttcagcctccttaatttttttttttttggtaattacctataggcttaaaagtcattcgttgctgttctagtataattagtagttccgtgattgaaagtttattgtaattctactatcttcaaattagatacattttcaaaaggaaaagataattttttagaaacatcttaatattcactatttcctgaaaaaatccaagcagttaacgctttctggatggtaacaaagtaccttctaaaagataagtgctatgacaccatgtatgaatgtaattctcttagtaatttacctctgactatttggtgtcttaacgctttggtttatataatctcaggggttgtctgcaaaccaaaactgacatattctgtggttagcttttattacttttttttttaacagaatgctttgctttggttatatttcttctttcttcttttgtcttatatggattaataactagtctccatgaacttcacttgaaagagcctgtaaaagttagatgagtctaaaagtgctctttgaagtagcagcaaattgggagtatatgctctgttatatagaaataaattgtccttgctattttcttacatttagctttgctagattgtatatacattgagctaagaccttaggaaattcactttctgcatgataaaatgacccaataaatattccactttgcttaataatgtacatacagtgcattattttttctatttgtagatgaatttaatgacagataattgtctgttccccgctgaaactgaagaaatctagtttttttgtgaacatttttgtggtcttatggataaggtacatgaagatttttgcagcagtattagtggttcagtggctgcactttattaatcagtgtgttaatttttgacagtgattggactagaccttttcaaatagagtctgagggtatcagacagtgaaaatgtgctgtaactaagtagcatgtaaatcagttgattgtaaaacgtttcgctgggaacttattttagctatattttacttcagacagattatgatacaataatctacctgtgcatcagttagtaggtgctgcagggtttcttactatttacagaaacattttgtgcagtctttgttataaattttcagaagactatactctttactttgaaggtctattttttaattatacctcatttagctaactagtattctaatacctggtagaaaaacagtgagccagcctttaagcatctaacaaaatttagactctttgttttgttttgaactgaagacatcattgggaaaggtaggaaatattagtttaggatagagcatacatgtcatatccagtagcataaaaaaagtattatctccctgtctccattaataaatttagctgtgcaatataggtgcgtttttgcagaagtttctagtaagagattataactccattttacaggttctgaatgctcagagtctatattaaggcttataaagtttttcctgtgatcagtaagtgacacatttaagcagacattcttttcaagttcatgacttagattcctttacaaatttagttctcaatctttaaaaaccacatttcattatgttggttaattattataaattttaagcactcatttctgcaatcaggtttctcagaattttttttttttaaacagaagagacattcctttttccttgttacatccaaggggggcacaggggtgggtggaaaggaatgtctaaaaatgaaatcccttgatatagagggacctagacggacaggatatgctaaaataatttcaaattctagcacaattttagagtagaataagtcatttttttagactaataaaattaatggctgtcatgttcactctgaaaaaaatctaaatgactgaaatgtacagaaataaaaattagcaaacaattattctagggatattttcagattttacttcatttcttgaaatgcgtgtgccatatgcaattgcatttcttgtgccaagaaactaatagaacttatttcactttacctttttttaaaatgtgaatttagttattatagttcaattttatggccttacagatggcttttattttgtttgcagctgacactgcagttcctttcatgcaaaataccataaactgtttgatgaaaatcatgcccctaatggaaactctctagtttttccatataactatcctactgtacatgtttaaacatattttatttttgctccaatggcttaatgtgaaaagctcctgcagataagtggacctgtcatgtggttaatcttgtttaagccaattcattaactgtgtactgatactgatgctatgttttttttaaatggattttattccaggtgaactttttttttataataatgttcgtctaaaataaaaactacataatgaaaatgaaaagacagtgacagacaacgcagctcacaccgacacccggagccgaccgcaccaccaccacggcgaaccacaactagcagcagcaaccagcgcgagcaaacgacaagcgacaccagcagcacccccacgcacggccccccagccggcagcgggcggcccacaaacacccgcccgagcaaccacagacacaggacacgacaccacacacgagcaccagcacgggacagcaccgccacccgcacacgaccaccgcc

SEQ ID NO: 72071 - DNA, 4886 bp, Homo sapiens
acggggcggggcgcgcaggccttctccgagaggaggggcggggcgtggggcggggcgagcagcggcggattggcgggcacgccccctcgcccgcggccccctccccgcctctctccaccgcctcctctggctccccggtcagagggccggagcgagaagatggcgaagacgtacgattatctcttcaagctcctgctgatcggcgactcgggggtaggcaagacctgcctcctgttccgcttctcagaggacgccttcaacaccaccttcatctccaccatcggaattgattttaaaattagaacgatagaactagatggaaagaaaattaagcttcagatatgggacacagcgggtcaggaaagattccgaacaatcacgacagcgtactacagaggagccatgggcattatgctggtctatgacatcacaaatgaaaaatcctttgacaatattaaaaattggatcagaaacattgaagagcatgcctcttccgatgtcgaaagaatgatcctgggtaacaaatgtgatatgaatgacaaaagacaagtgtcaaaagaaagaggggagaagctagcaattgactatgggattaaattcttggagacaagcgcaaaatccagtgcaaatgtagaagaggcattttttacacttgcacgagatataatgacaaaactcaacagaaaaatgaatgacagcaattcagcaggagcaggtggaccagtgaaaataacagtttctgagagactgcagcacacctagagggccctttcctgcttctctgaaagcacaggtcacccagcctcagaatcacacctcccggctgctgctgagagcaccactgaacttagacctctcaacacagtatgccaagtggattccagcctcatggcctagcaaaagaacagactccctttttcaaacatggaagcaatgaagtggagacacatgcaggacctaactcgttttttccttgttttattacctgttgcagaagcggttatctttcttttttactttgcacatcagtgttagcctttccctatttcagcacaatcttagactcatatttgcacacttttgtgtcgtgaagttctagacaaatttgtacatgtggcaatgttaaaagagcatttacagcagaggttaatatactaaaattaaagggtatttggtctggttcatatggtcaaatattactgccttggtagcatttatttaagggctttttcttaaataagaatcattaaagtcattaaaaaaatttactgaaatgcccatcttgtcatcaaaggccacaatttctttatttcttcagattaagagctttgcctcatccccgacctgttttccagagtctgggtagctgaatgaatcactttaaaatgattacctctgcctaatctatagaaactgcatttggaaatcaccataatctcatttttccctggggtttgtatttgctattctttcccatgtttgacttaagtgtaatcactcttaagtaatatttgaacattattatctgtttctatttgtgaacttcttgagctgaaattttacgtgggctgagagatataccatttagggttttagtgcagcatctaactgtgattctgtcaataaggatatgtaatatattttttcttaggttcactccttagctggctggtttagttgtaataccaaattcctaccataatccctgtctacaaaagttaggtttagattttagtttgcggaaaccttccctatatagagacagattaacttgttgatataaatttaatagagctagctcttggtaatggtgaaaataatgagttttggttggttttatttggcagatgtttttagaaataaaagtacttagacctagtgcagcctctaggaaaagtcttgccttttcattagagaaaacaggaccaaggtttcagttttcaaacagctgttgttgaatgtgtagaacccagttccatctgttttggttcattgttacagaacttagtccagtcatttgggctaaagccaaccaaaagcttagttgcctttctcaacaaacactggtactggtatacttttgtagatgaaaccatcacaaggtatttagtgttaacttgtgtgccaaattcagatcactatgtcgttgttgctctagccttcagtgtcataacacaggggggataaaacagaggggatgagggaaatgaattctgttaataattattcttcctggtatgcctgttttgcttcacaaaggctactatcatgctggatagataagaacaggagatggcagtggaaagggattgcttgttaccacagagaattctcttcaaattaagatatgtcattagaatgcttggaccagtcaatcttttgtacttatttgaaaatataggaacaatttagcagctgcaaatatgcccaagctatttttaatagatatactaaacttattgttgacaaatttcagcctccttaatttttttttttttggtaattacctataggcttaaaagtcattcgttgctgttctagtataattagtagttccgtgattgaaagtttattgtaattctactatcttcaaattagatacattttcaaaaggaaaagataattttttagaaacatcttaatattcactatttcctgaaaaaatccaagcagttaacgctttctggatggtaacaaagtaccttctaaaagataagtgctatgacaccatgtatgaatgtaattctcttagtaatttacctctgactatttggtgtcttaacgctttggtttatataatctcaggggttgtctgcaaaccaaaactgacatattctgtggttagcttttattacttttttttttaacagaatgctttgctttggttatatttcttctttcttcttttgtcttatatggattaataactagtctccatgaacttcacttgaaagagcctgtaaaagttagatgagtctaaaagtgctctttgaagtagcagcaaattgggagtatatgctctgttatatagaaataaattgtccttgctattttcttacatttagctttgctagattgtatatacattgagctaagaccttaggaaattcactttctgcatgataaaatgacccaataaatattccactttgcttaataatgtacatacagtgcattattttttctatttgtagatgaatttaatgacagataattgtctgttccccgctgaaactgaagaaatctagtttttttgtgaacatttttgtggtcttatggataaggtacatgaagatttttgcagcagtattagtggttcagtggctgcactttattaatcagtgtgttaatttttgacagtgattggactagaccttttcaaatagagtctgagggtatcagacagtgaaaatgtgctgtaactaagtagcatgtaaatcagttgattgtaaaacgtttcgctgggaacttattttagctatattttacttcagacagattatgatacaataatctacctgtgcatcagttagtaggtgctgcagggtttcttactatttacagaaacattttgtgcagtctttgttataaattttcagaagactatactctttactttgaaggtctattttttaattatacctcatttagctaactagtattctaatacctggtagaaaaacagtgagccagcctttaagcatctaacaaaatttagactctttgttttgttttgaactgaagacatcattgggaaaggtaggaaatattagtttaggatagagcatacatgtcatatccagtagcataaaaaaagtattatctccctgtctccattaataaatttagctgtgcaatataggtgcgtttttgcagaagtttctagtaagagattataactccattttacaggttctgaatgctcagagtctatattaaggcttataaagtttttcctgtgatcagtaagtgacacatttaagcagacattcttttcaagttcatgacttagattcctttacaaatttagttctcaatctttaaaaaccacatttcattatgttggttaattattataaattttaagcactcatttctgcaatcaggtttctcagaattttttttttttaaacagaagagacattcctttttccttgttacatccaaggggggcacaggggtgggtggaaaggaatgtctaaaaatgaaatcccttgatatagagggacctagacggacaggatatgctaaaataatttcaaattctagcacaattttagagtagaataagtcatttttttagactaataaaattaatggctgtcatgttcactctgaaaaaaatctaaatgactgaaatgtacagaaataaaaattagcaaacaattattctagggatattttcagattttacttcatttcttgaaatgcgtgtgccatatgcaattgcatttcttgtgccaagaaactaatagaacttatttcactttacctttttttaaaatgtgaatttagttattatagttcaattttatggccttacagatggcttttattttgtttgcagctgacactgcagttcctttcatgcaaaataccataaactgtttgatgaaaatcatgcccctaatggaaactctctagtttttccatataactatcctactgtacatgtttaaacatattttatttttgctccaatggcttaatgtgaaaagctcctgcagataagtggacctgtcatgtggttaatcttgtttaagccaattcattaactgtgtactgatactgatgctatgttttttttaaatggattttattccaggtgaactttttttttataataatgttcgtctaaaataaaaactacataatgaaaatgaaaa

SEQ ID NO: 72072 - DNA, 1238 bp, Homo sapiens
acggggcggggcgcgcaggccttctccgagaggaggggcggggcgtggggcggggcgagcagcggcggattggcgggcacgccccctcgcccgcggccccctccccgcctctctccaccgcctcctctggctccccggtcagagggccggagcgagaagatggcgaagacgtacgattatctcttcaagctcctgctgatcggcgactcgggggtaggcaagacctgcctcctgttccgcttctcagaggacgccttcaacaccaccttcatctccaccatcggaattgattttaaaattagaacgatagaactagatggaaagaaaattaagcttcagatatgggacacagcgggtcaggaaagattccgaacaatcacgacagcgtactacagaggagccatgggcattatgctggtctatgacatcacaaatgaaaaatcctttgacaatattaaaaattggatcagaaacattgaagagcatgcctcttccgatgtcgaaagaatgatcctgggtaacaaatgtgatatgaatgacaaaagacaagtgtcaaaagaaagaggggagaagctagcaattgactatgggattaaattcttggagacaagcgcaaaatccagtgcaaatgtagaagaggcattttttacacttgcacgagatataatgacaaaactcaacagaaaaatgaatgacagcaattcagcaggagcaggtggaccagtgaaaataacagaaaaccgatcaaagaagaccagtttctttcgttgctcgctactttgatgaactctttctgagagactgcagcacacctagagggccctttcctgcttctctgaaagcacaggtcacccagcctcagaatcacacctcccggctgctgctgagagcaccactgaacttagacctctcaacacagtatgccaagtggattccagcctcatggcctagcaaaagaacagactccctttttcaaacatggaagcaatgaagtggagacacatgcaggacctaactcgttttttccttgttttattacctgttgcagaagcggttatctttcttttttactttgcacatcagtgttagcctttccctatttcagcacaatcttagactcatatttgcacacttttgtgtcgtgaagttctagacaaatttgtacatgtggcaatgttaaaagagcatttacagcagaggttaatatactaaaattaaagggtatttggtctggttca

SEQ ID NO: 72073 - DNA, 1064 bp, Homo sapiens
cttctaaaaaggaagtaggggtgcgtgagaacgccggcggtgaccgcagccacagcggtgaccgagtgagaggaaggcggcggcggcggcggcggcggcggcgtgaagtcactgctgctctgggttcgggttggcgactgaaggcggtggaaatttaaaattgtttacagtcaacactgtttccagccatgggtttgtctccatctgctcctgctgttgcagttcaggcctcaaatgcttcagcgtccccaccttcaggatgcccgatgcatgaagggaaaatgaaaggctgtccagtgaatacagagccatctggcccaacctgtgagaagaaaacatactctgtgcctgcccaccaggaacgcgcctatgagtacgtggagtgtcccattaggggcactgcggctgagaataaggagaacctagatccttcaaatctgatgccaccaccaaatcaaacaccagctccagatcagccatttgcattgtctactgtcagagaagagtcatccattccgagagcagattcagagaaaaagtgggtttacccttctgagcagatgttctggaatgcaatgttaaagaaagggtggaagtggaaggatgaggatatcagtcagaaggatatgtataatatcattagaattcacaatcagaataacgagcaggcttggaaggagattttgaagtgggaagcccttcatgctgcagagtgtccttgtggtccatcattgatccggtttggagggaaagcaaaagagtattcaccaagggcacgaattcgttcctggatggggtatgagttgccttttgataggcacgattggatcataaaccgttgcgggacagaagttagatatgtgattgattattatgatggtggtgaagtcaacaaggactaccagttcaccatcctggacgtccgtcctgccttagattcactttcggcagtatgggacagaatgaaagtcgcttggtggcgttggacctcgtaaagcactgtttcagatggaaaaatataaactatttttttctgagcgatacattaaactattttccccaga

SEQ ID NO: 72074 - DNA, 858 bp, Homo sapiens
cttctaaaaaggaagtaggggtgcgtgagaacgccggcggtgaccgcagccacagcggtgaccgagtgagaggaaggcggcggcggcggcggcggcggcggcgtgaagtcactgctgctctgggttcgggttggcgactgaaggcggtaccggcctcccggaacagcccgggggagggcttaggtgcagaagggcaggctggccgcggccggtttggtctggggaccacgggctggagcaggtggaaatttaaaattgtttacagtcaacactgtttccagccatgggtttgtctccatctgctcctgctgttgcagttcaggcctcaaatgcttcagcgtccccaccttcaggatgcccgatgcatgaagggaaaatgaaaggctgtccagtgaatacagagccatctggcccaacctgtgagaagaaaacatactctgtgcctgcccaccaggaacgcgcctatgagtacgtggagtgtcccattaggggcactgcggctgagaataaggagaacctagatccttcaaatctgatgccaccaccaaatcaaacaccagctccagatcagccatttgcattgtctactgtcagagaagagtcatccattccgagagcagattcagagaaaaagtgggtttacccttctgagcagatgttctggaatgcaatgttaaagaaagggtggaagtggaaggatgaggatatcagtcagaaggatatgtataatatcattagaattcacaatcagaataacgagcaggcttggaaggagattttgaagtgggaagcccttcatgctgcgtaagtatgtttgagatcttaaatgtttcaagcatctttgttatttcatatcag

SEQ ID NO: 72075 - DNA, 2278 bp, Homo sapiens
cttctaaaaaggaagtaggggtgcgtgagaacgccggcggtgaccgcagccacagcggtgaccgagtgagaggaaggcggcggcggcggcggcggcggcggcgtgaagtcactgctgctctgggttcgggttggcgactgaaggcggtggaaatttaaaattgtttacagtcaacactgtttccagccatgggtttgtctccatctgctcctgctgttgcagttcaggcctcaaatgcttcagcgtccccaccttcaggatgcccgatgcatgaagggaaaatgaaaggctgtccagtgaatacagagccatctggcccaacctgtgagaagaaaacatactctgtgcctgcccaccaggaacgcgcctatgagtacgtggagtgtcccattaggggcactgcggctgagaataaggagaacctagatccttcaaatctgatgccaccaccaaatcaaacaccagctccagatcagccatttgcattgtctactgtcagagaagagtcatccattccgagagcagattcagagaaaaagtgggtttacccttctgagcagatgttctggaatgcaatgttaaagaaagggtggaagtggaaggatgaggatatcagtcagaaggatatgtataatatcattagaattcacaatcagaataacgagcaggcttggaaggagattttgaagtgggaagcccttcatgctgcagagtgtccttgtggtccatcattgatccggtttggagggaaagcaaaagagtattcaccaagggcacgaattcgttcctggatggggtatgagttgccttttgataggcacgattggatcataaaccgttgcgggacagaagttagatatgtgattgattattatgatggtggtgaagtcaacaaggactaccagttcaccatcctggacgtccgtcctgccttagattcactttcggcagtatgggacagaatgaaagtcgcttggtggcgttggacctcgtaaagcactgtttcagatggaaaaatataaactatttttttctgagcgatacattaaactattttccccagattgaattgcactcatgatgtaatgggaacttcaagtgggtaatcacactttttccttcacttaacgaaggatactatgcactgttcacttttgacttgtgttgtaccttgcagtttatagcagatcattttgttttcttcctacttagcttaagtgggaagcagtctctcagtttttcctttacctgcagtattgtctgtatatttcatctcgaaaagcctgaacaacctctgaaaaagagcttttaaaaagtgatgaaagttgcttttttttcttactattttctcaggaatactccagagatgtaaagcctgagagtccatggtgatgctcaagagctttcatctggccaaatattttaactaaagctgttcattataaataagaggtgattataccttttttaaaaaaagttaccattatttctaaagcccctatggtatgattgtgacctttaacaaaatgcaaaggtatacactggaaaggtactcagcaaaattctctccaaattctgatttatatgaatttcttggactggatagagtactttcaactataccttcctttggaacataccttttaaaaaatgttccctttaaatcctgttattctaatatgtaactctgctcccaacaaacaggtctcctcattgtccttggcatttgacaagttatcccaacttcgaatctcatttcttcctttgctggcagcctccacccttccccacatcagtcggcctaatccaaaccttgaaagcctggcttaagtcccagtatcagtgatggtccccctctaaaacatgattttatatttggctgagtgttaaaattcacaagatgagcatttttttcccagatggagaacgcttcaactcagtctagattttttttgtttgttttaaggaagctctaagtttgccattgaaactttttgtaccagtaatccataaactggttgttctatttatagcagcatgttacaaatgactgctttttttttttaactgtctatactattaaatcctttaatttatcctgaatgctgtagtgttaaattagtggatgaaattggcagtctgtgggtgattaatttggtatggatttgtcagttttgtgtggagtttaagaaatagaacagccttaaactctacatttcaaaatacttgtatattttaaaataaagctgattagttcacaggttttgaaaaaaaaatg

SEQ ID NO: 72076 - DNA, 2142 bp, Homo sapiens
tagttcagttcttgatagatttaaacagaagaaacctggcttttcctatggtggtaatcattggtcagaaattcagctctttagtgctccaattgagagagttagatgtcctgccttcatggtgacaccatttttatacttgattatttcaggctgtccagtgaatacagagccatctggcccaacctgtgagaagaaaacatactctgtgcctgcccaccaggaacgcgcctatgagtacgtggagtgtcccattaggggcactgcggctgagaataaggagaacctagatccttcaaatctgatgccaccaccaaatcaaacaccagctccagatcagccatttgcattgtctactgtcagagaagagtcatccattccgagagcagattcagagaaaaagtgggtttacccttctgagcagatgttctggaatgcaatgttaaagaaagggtggaagtggaaggatgaggatatcagtcagaaggatatgtataatatcattagaattcacaatcagaataacgagcaggcttggaaggagattttgaagtgggaagcccttcatgctgcagagtgtccttgtggtccatcattgatccggtttggagggaaagcaaaagagtattcaccaagggcacgaattcgttcctggatggggtatgagttgccttttgataggcacgattggatcataaaccgttgcgggacagaagttagatatgtgattgattattatgatggtggtgaagtcaacaaggactaccagttcaccatcctggacgtccgtcctgccttagattcactttcggcagtatgggacagaatgaaagtcgcttggtggcgttggacctcgtaaagcactgtttcagatggaaaaatataaactatttttttctgagcgatacattaaactattttccccagattgaattgcactcatgatgtaatgggaacttcaagtgggtaatcacactttttccttcacttaacgaaggatactatgcactgttcacttttgacttgtgttgtaccttgcagtttatagcagatcattttgttttcttcctacttagcttaagtgggaagcagtctctcagtttttcctttacctgcagtattgtctgtatatttcatctcgaaaagcctgaacaacctctgaaaaagagcttttaaaaagtgatgaaagttgcttttttttcttactattttctcaggaatactccagagatgtaaagcctgagagtccatggtgatgctcaagagctttcatctggccaaatattttaactaaagctgttcattataaataagaggtgattataccttttttaaaaaaagttaccattatttctaaagcccctatggtatgattgtgacctttaacaaaatgcaaaggtatacactggaaaggtactcagcaaaattctctccaaattctgatttatatgaatttcttggactggatagagtactttcaactataccttcctttggaacataccttttaaaaaatgttccctttaaatcctgttattctaatatgtaactctgctcccaacaaacaggtctcctcattgtccttggcatttgacaagttatcccaacttcgaatctcatttcttcctttgctggcagcctccacccttccccacatcagtcggcctaatccaaaccttgaaagcctggcttaagtcccagtatcagtgatggtccccctctaaaacatgattttatatttggctgagtgttaaaattcacaagatgagcatttttttcccagatggagaacgcttcaactcagtctagattttttttgtttgttttaaggaagctctaagtttgccattgaaactttttgtaccagtaatccataaactggttgttctatttatagcagcatgttacaaatgactgctttttttttttaactgtctatactattaaatcctttaatttatcctgaatgctgtagtgttaaattagtggatgaaattggcagtctgtgggtgattaatttggtatggatttgtcagttttgtgtggagtttaagaaatagaacagccttaaactctacatttcaaaatacttgtatattttaaaataaagctgattagttcacaggttttgaaaaaaaaatg

SEQ ID NO: 72077 - DNA, 1159 bp, Homo sapiens
cttctaaaaaggaagtaggggtgcgtgagaacgccggcggtgaccgcagccacagcggtgaccgagtgagaggaaggcggcggcggcggcggcggcggcggcgtgaagtcactgctgctctgggttcgggttggcgactgaaggcggtaccggcctcccggaacagcccgggggagggcttaggtgcagaagggcaggctggccgcggccggtttggtctggggaccacgggctggagcaggtggaaatttaaaattgtttacagtcaacactgtttccagccatgggtttgtctccatctgctcctgctgttgcagttcaggcctcaaatgcttcagcgtccccaccttcaggatgcccgatgcatgaagggaaaatgaaaggctgtccagtgaatacagagccatctggcccaacctgtgagaagaaaacatactctgtgcctgcccaccaggaacgcgcctatgagtacgtggagtgtcccattaggggcactgcggctgagaataaggagaacctagatccttcaaatctgatgccaccaccaaatcaaacaccagctccagatcagccatttgcattgtctactgtcagagaagagtcatccattccgagagcagattcagagaaaaagtgggtttacccttctgagcagatgttctggaatgcaatgttaaagaaagggtggaagtggaaggatgaggatatcagtcagaaggatatgtataatatcattagaattcacaatcagaataacgagcaggcttggaaggagattttgaagtgggaagcccttcatgctgcagagtgtccttgtggtccatcattgatccggtttggagggaaagcaaaagagtattcaccaagggcacgaattcgttcctggatggggtatgagttgccttttgataggcacgattggatcataaaccgttgcgggacagaagttagatatgtgattgattattatgatggtggtgaagtcaacaaggactaccagttcaccatcctggacgtccgtcctgccttagattcactttcggcagtatgggacagaatgaaagtcgcttggtggcgttggacctcgtaaagcactgtttcagatggaaaaatataaactatttttttctgagcgatacattaaactattttccccaga

SEQ ID NO: 72078 - DNA, 2373 bp, Homo sapiens
cttctaaaaaggaagtaggggtgcgtgagaacgccggcggtgaccgcagccacagcggtgaccgagtgagaggaaggcggcggcggcggcggcggcggcggcgtgaagtcactgctgctctgggttcgggttggcgactgaaggcggtaccggcctcccggaacagcccgggggagggcttaggtgcagaagggcaggctggccgcggccggtttggtctggggaccacgggctggagcaggtggaaatttaaaattgtttacagtcaacactgtttccagccatgggtttgtctccatctgctcctgctgttgcagttcaggcctcaaatgcttcagcgtccccaccttcaggatgcccgatgcatgaagggaaaatgaaaggctgtccagtgaatacagagccatctggcccaacctgtgagaagaaaacatactctgtgcctgcccaccaggaacgcgcctatgagtacgtggagtgtcccattaggggcactgcggctgagaataaggagaacctagatccttcaaatctgatgccaccaccaaatcaaacaccagctccagatcagccatttgcattgtctactgtcagagaagagtcatccattccgagagcagattcagagaaaaagtgggtttacccttctgagcagatgttctggaatgcaatgttaaagaaagggtggaagtggaaggatgaggatatcagtcagaaggatatgtataatatcattagaattcacaatcagaataacgagcaggcttggaaggagattttgaagtgggaagcccttcatgctgcagagtgtccttgtggtccatcattgatccggtttggagggaaagcaaaagagtattcaccaagggcacgaattcgttcctggatggggtatgagttgccttttgataggcacgattggatcataaaccgttgcgggacagaagttagatatgtgattgattattatgatggtggtgaagtcaacaaggactaccagttcaccatcctggacgtccgtcctgccttagattcactttcggcagtatgggacagaatgaaagtcgcttggtggcgttggacctcgtaaagcactgtttcagatggaaaaatataaactatttttttctgagcgatacattaaactattttccccagattgaattgcactcatgatgtaatgggaacttcaagtgggtaatcacactttttccttcacttaacgaaggatactatgcactgttcacttttgacttgtgttgtaccttgcagtttatagcagatcattttgttttcttcctacttagcttaagtgggaagcagtctctcagtttttcctttacctgcagtattgtctgtatatttcatctcgaaaagcctgaacaacctctgaaaaagagcttttaaaaagtgatgaaagttgcttttttttcttactattttctcaggaatactccagagatgtaaagcctgagagtccatggtgatgctcaagagctttcatctggccaaatattttaactaaagctgttcattataaataagaggtgattataccttttttaaaaaaagttaccattatttctaaagcccctatggtatgattgtgacctttaacaaaatgcaaaggtatacactggaaaggtactcagcaaaattctctccaaattctgatttatatgaatttcttggactggatagagtactttcaactataccttcctttggaacataccttttaaaaaatgttccctttaaatcctgttattctaatatgtaactctgctcccaacaaacaggtctcctcattgtccttggcatttgacaagttatcccaacttcgaatctcatttcttcctttgctggcagcctccacccttccccacatcagtcggcctaatccaaaccttgaaagcctggcttaagtcccagtatcagtgatggtccccctctaaaacatgattttatatttggctgagtgttaaaattcacaagatgagcatttttttcccagatggagaacgcttcaactcagtctagattttttttgtttgttttaaggaagctctaagtttgccattgaaactttttgtaccagtaatccataaactggttgttctatttatagcagcatgttacaaatgactgctttttttttttaactgtctatactattaaatcctttaatttatcctgaatgctgtagtgttaaattagtggatgaaattggcagtctgtgggtgattaatttggtatggatttgtcagttttgtgtggagtttaagaaatagaacagccttaaactctacatttcaaaatacttgtatattttaaaataaagctgattagttcacaggttttgaaaaaaaaatg

SEQ ID NO: 72079 - DNA, 2315 bp, Homo sapiens
cttctaaaaaggaagtaggggtgcgtgagaacgccggcggtgaccgcagccacagcggtgaccgagtgagaggaaggcggcggcggcggcggcggcggcggcgtgaagtcactgctgctctgggttcgggttggcgactgaaggcggtaccggcctcccggaacagcccgggggagggcttaggtggaaatttaaaattgtttacagtcaacactgtttccagccatgggtttgtctccatctgctcctgctgttgcagttcaggcctcaaatgcttcagcgtccccaccttcaggatgcccgatgcatgaagggaaaatgaaaggctgtccagtgaatacagagccatctggcccaacctgtgagaagaaaacatactctgtgcctgcccaccaggaacgcgcctatgagtacgtggagtgtcccattaggggcactgcggctgagaataaggagaacctagatccttcaaatctgatgccaccaccaaatcaaacaccagctccagatcagccatttgcattgtctactgtcagagaagagtcatccattccgagagcagattcagagaaaaagtgggtttacccttctgagcagatgttctggaatgcaatgttaaagaaagggtggaagtggaaggatgaggatatcagtcagaaggatatgtataatatcattagaattcacaatcagaataacgagcaggcttggaaggagattttgaagtgggaagcccttcatgctgcagagtgtccttgtggtccatcattgatccggtttggagggaaagcaaaagagtattcaccaagggcacgaattcgttcctggatggggtatgagttgccttttgataggcacgattggatcataaaccgttgcgggacagaagttagatatgtgattgattattatgatggtggtgaagtcaacaaggactaccagttcaccatcctggacgtccgtcctgccttagattcactttcggcagtatgggacagaatgaaagtcgcttggtggcgttggacctcgtaaagcactgtttcagatggaaaaatataaactatttttttctgagcgatacattaaactattttccccagattgaattgcactcatgatgtaatgggaacttcaagtgggtaatcacactttttccttcacttaacgaaggatactatgcactgttcacttttgacttgtgttgtaccttgcagtttatagcagatcattttgttttcttcctacttagcttaagtgggaagcagtctctcagtttttcctttacctgcagtattgtctgtatatttcatctcgaaaagcctgaacaacctctgaaaaagagcttttaaaaagtgatgaaagttgcttttttttcttactattttctcaggaatactccagagatgtaaagcctgagagtccatggtgatgctcaagagctttcatctggccaaatattttaactaaagctgttcattataaataagaggtgattataccttttttaaaaaaagttaccattatttctaaagcccctatggtatgattgtgacctttaacaaaatgcaaaggtatacactggaaaggtactcagcaaaattctctccaaattctgatttatatgaatttcttggactggatagagtactttcaactataccttcctttggaacataccttttaaaaaatgttccctttaaatcctgttattctaatatgtaactctgctcccaacaaacaggtctcctcattgtccttggcatttgacaagttatcccaacttcgaatctcatttcttcctttgctggcagcctccacccttccccacatcagtcggcctaatccaaaccttgaaagcctggcttaagtcccagtatcagtgatggtccccctctaaaacatgattttatatttggctgagtgttaaaattcacaagatgagcatttttttcccagatggagaacgcttcaactcagtctagattttttttgtttgttttaaggaagctctaagtttgccattgaaactttttgtaccagtaatccataaactggttgttctatttatagcagcatgttacaaatgactgctttttttttttaactgtctatactattaaatcctttaatttatcctgaatgctgtagtgttaaattagtggatgaaattggcagtctgtgggtgattaatttggtatggatttgtcagttttgtgtggagtttaagaaatagaacagccttaaactctacatttcaaaatacttgtatattttaaaataaagctgattagttcacaggttttgaaaaaaaaatg

SEQ ID NO: 72080 - DNA, 1635 bp, Homo sapiens
gcggccgcctactactactactactgctcgaattcaagcttctaacgatgtacggggacatgctgcagagtgtccttgtggtccatcattgatccggtttggagggaaagcaaaagagtattcaccaagggcacgaattcgttcctggatggggtatgagttgccttttgataggcacgattggatcataaaccgttgcgggacagaagttagatatgtgattgattattatgatggtggtgaagtcaacaaggactaccagttcaccatcctggacgtccgtcctgccttagattcactttcggcagtatgggacagaatgaaagtcgcttggtggcgttggacctcgtaaagcactgtttcagatggaaaaatataaactatttttttctgagcgatacattaaactattttccccagattgaattgcactcatgatgtaatgggaacttcaagtgggtaatcacactttttccttcacttaacgaaggatactatgcactgttcacttttgacttgtgttgtaccttgcagtttatagcagatcattttgttttcttcctacttagcttaagtgggaagcagtctctcagtttttcctttacctgcagtattgtctgtatatttcatctcgaaaagcctgaacaacctctgaaaaagagcttttaaaaagtgatgaaagttgcttttttttcttactattttctcaggaatactccagagatgtaaagcctgagagtccatggtgatgctcaagagctttcatctggccaaatattttaactaaagctgttcattataaataagaggtgattataccttttttaaaaaaagttaccattatttctaaagcccctatggtatgattgtgacctttaacaaaatgcaaaggtatacactggaaaggtactcagcaaaattctctccaaattctgatttatatgaatttcttggactggatagagtactttcaactataccttcctttggaacataccttttaaaaaatgttccctttaaatcctgttattctaatatgtaactctgctcccaacaaacaggtctcctcattgtccttggcatttgacaagttatcccaacttcgaatctcatttcttcctttgctggcagcctccacccttccccacatcagtcggcctaatccaaaccttgaaagcctggcttaagtcccagtatcagtgatggtccccctctaaaacatgattttatatttggctgagtgttaaaattcacaagatgagcatttttttcccagatggagaacgcttcaactcagtctagattttttttgtttgttttaaggaagctctaagtttgccattgaaactttttgtaccagtaatccataaactggttgttctatttatagcagcatgttacaaatgactgctttttttttttaactgtctatactattaaatcctttaatttatcctgaatgctgtagtgttaaattagtggatgaaattggcagtctgtgggtgattaatttggtatggatttgtcagttttgtgtggagtttaagaaatagaacagccttaaactctacatttcaaaatacttgtatattttaaaataaagctgattagttcacaggttttgaaaaaaaaatg

SEQ ID NO: 72081 - DNA, 5724 bp, Homo sapiens
gctgccgtgggctgcgcggggcccgcggtgtgtagagtccgccgccccggagccgcgtcccgcacccggacggtcccgagccatgggggtgttgatgtccaagcggcagacagtggagcaggtgcagaaggtgagtctggctgtgtctgctttcaaggatgggctgcgggacaggccttccatccgacgcacaggtgagctgccagggtcccgccgtggcactgtagagggctccgtccaggaggtacaggaggagaaggaagcagaagcaggaacctcggtggtccaggaagagagtagtgccggccgcgcagcctgggagcggctccgagatgggcgcggcgtggagcctgaggagtttgacaggacaagtcgattcacaccccctgcgttcatccgccccacccggaagctggatgatgacaaacctccagaaatctgcctggagcccagagagcctgttgtcaacgatgagatgtgtgatgtttgtgaggtctggacagctgagagcctcttcccgtgcagggtctgcaccagggttttccatgatggctgcctgcgccgcatgggctacatccaaggagacagtgcagcggaggtgacggagatggcccacacagaaacaggctggagctgccactactgtgacaacatcaacttgctgcttactgaggaggaaatgtatagcctcacggagacctttcagcggtgtaaagtcatccctgattgctccctgacactggaggactttctgcgttaccgccaccaagcagccaagcggggggaccgtgacagggccctgagtgaggagcaagaagagcaggcggcccgccagtttgctgccctggaccctgaacatcgaggccacatagagtggcctgacttcttgtcccatgagtccctcctgcttctgcagcagttgcgtccccagaactctctgttgaggcttctgacagtgaaggagcgggagcgagcccgagccgccttcctggctcggggcagtgggagcaccgtcagtgaggcagagtgccgccgggcccagcactcttggttttgcaaacggttcccagaggctccttcctgcagtgtcagcatcagccatgtgggtcccatcgcagatagcagcccagccagcagcagcagcaagagtcaggacaagaccctgctgcccacagagcaggagtccagatttgtggactggcctaccttcctgcaagagaatgtcctctacatcctggctgctcgccccaacagcgcagccattcacctgaagcccccaggatagcatggagcagagaagctcggtttgaggacagtgacatcctctccctcctttcctttctcccttcccccaccaacctctggcacagagactcatggggttgggacactgccagcgtcttaacttgtcactaagctttaaggcactgaaatcaccattcccctcacaatagaggcagtgaatgcattgccacaaggagaagccctgggagctgtggcagcatcctctcctggaccgcccctgccccacatcatagacgggacctgccaccacacttatatacatgtgcacatgctgcccagctgtccatgccttcagaagcctggttctttttggttgagaaaggaccaaagtccctttgtgaagcccctggtatagaggagggggtctctactcaccccttctataggcaggccagttctaatttccaatagataagtctctggccaagtgattcttaggaagggggcatgtcagactcgcatgcctgcctagagctcctggagatcctaatgggccccgctttctccaccaaaaatcccttctgcagtcagctgctgttactagtaggtgtgcattatgtacctcggctgtactgagttgggaaaagagttaaacatcaccactgaaattcagccctttatttatttaaattccaattcctggtgacagaaaaggcaactagcctggagaatcctgactggaagagggggaggcagcccttcccagggactcgggattctaggaacctctcagtcaggtcacctgagtccaaaagtctttagcagggtagtcaaaaatcaaggtgagccttcttggccccatttttcagatggtagctcatggcctagggccaagggggcctgaatggagcaaacacactggcaggagccacagccctctgtgttagatgcttcacccaagtcaccgaccacagagactgacgagagcacactctggaggaagaggagagaacggggctctgcttcctcatcattccagctcaactcaactgtagacaccttccacagcccaagaaagatctgcagagccctgagcagggactctttcagccatcctgacaaacaggataagaggctggggcttaagaagaggctctgcagagaaggtcctgggaaagccttacagaagttttccgcttctccctatcactgagactcggcttgagtggctgcttctcctcactgctcatcacatgtccttccccagcaggctagggcttgggcctggcatggaaggccttttggggcaatcagaggctgccacaagagcaccaagcctggcctccaagccccagccctccttcctaagtactcatcaaattcaaattcttcagtccgtgtgttatggctcatcttggccggccgtggggtccatgttctaggcttctgtttccaacttaatgacttaggcatagcgagatctgactaccaagagttattcaaaagggagtggagtgcagtcatgcagaagcaaacacgtcttcattgctcgaggcccttgtgctaaatcgggtgcgtacagaagaacacacaccgctcggtgctgaatgtttcgaggaaagcaaggagctgcggccaggggcttcttgagagccctgtgtagtctcctcctgtaggaaccaccttagctggaagcagggtggtgagctgctggggttggattatttgggactgaaatgaagcagacaggagacaaatctgggctcaggtgtatggcccacagcttttagaaatgctcttcagccgtcccccaggattgatccataggaggggccattattcagtctagtcaaaacaagaaagcgcaggactcctgggcctaagaactgcatctgaagcagccaggcctggggttttgcactgagatgaaagcacattaagcacaggggctcttacctactctcctggcaaatcatctcctgtgccactggccttgggctgctcgatctcacagacggggcattttgagtagagacaagctctgggctttgagagctgaatagcatttttctcctgcctcatcagtcacagggactggaagtccatcttgttccctgatccttcacagatcaaggtgatgcctacctctttggagctgctgcctctagctctccacgggtgagtgaggagagttggtgggccaggtcaggcctgccgtattccagggcctggcaaagcagccccagagttcttccacaacaggaacaggcccatttggatcacgcttctccctattccagaacagcaaacttcctgggtgagggcctgctacagagatcccaggggacacttccctcagcaaagagtagagttcccatcccacaagagtcctaggaagcaggaaagcacgaaggagcagccagcctcttctccacaggcagtcatctagctttttaccaaaggggaagtgccgttgctccccaagtccagagttgcagacgccctgccccaacccccgtccagaatctccctttgcagtgttctaatccccagagcccctctgcggtatgtatagagttgttaaaaacgttcagaaacccagtgaagcccatttcgttttcaagccctcccatcactgtgactctgaaattctgccaagtacaaatattagcgtttggctctaataagggtatgagaaaatgtttcagtcttttctttgtggctacccaaaattgagatcagtgtttctaaccaaggaaggcctgggttatagacaggctcctctgaagcccacttgccctaagcatttttcacctagcattcctcttcctcatgttcagatgtgaatgaaggggcagctggaggatgtggtggagctgcagggaccgagggtcagctgagcagtggccctggccacaaaaccactccaagtctgctccttggcttcctctcctgagcccagccttccccaacagaacacttgagcaagggcccctagagtatcccagggatggagcagtcccctcactctaggtactgatctaaccttcaagtgctcctcttcatttgaggacacctacagtagaaaccatgaggacattgcctctttctgccctcagcccaagtacctggggctagcagggcagataccagcctttctggtcctgctgctccctatgggatgtcaccctgaccttgcttaagtggccaagtcttagggtccccttattcctgtcaccattatgaaaaacacagcattaaactgcctgggaagaggacacctccttgggggagtgagccccaaggttatacccaggactcatagcccaaagcacaacctcggccattgcaggtttcacagcttcagtcagagtggtgccaggaagcccaaaagccaagagggaaggtcagcagaagctgcctggcaaggccccaggccagccaggcccaccccagagccaagagaaacttcaagcaggactgagaactggtagctggctctagtgatcctgaaagcatgttcccttcagaccagcagagtgaagacagacagatgtgtggccctaaaaggcagaacagttttgatgccagaacttcaggactgtcaccacagtccctttttacccctcctctatttacagtgaaataaaattcctattttctttttttttttttttttaattttccttatttcaagctcttatctgaaaaaatgctactttctcctaccacttagtttgaatttgcccaggatatctgtctgggcccctggctgcaacccagacaatggcgagatctcctggagtgggggatattcacgcatcgtgcctgttcctgacagctcagccctggtgtagggtgggactgggcattttctctgctgttacttttctgctaccactatttttgggaaccttggaaagaaaataaacaggttacagaatttcggctagcactaagggaaagctttttcctctgggccacatgccccagtgacccagagcatggaaagggggtcagctctggtctgggccagtgactaagaagcccaatcacattccagtttctatagcactgggtaggcacaacccacagttaagaacatcaagttataagtagccaggcctttccatagccatggtgacacaaaggccctcaagattagcctcctgccatcatgggttggcctgtgatctgtcccccagccaaacccaagtttgtgagagggactctgagaacacttgagtaacacttgggaatccaatgcgctctggtccctcatgcccttcccatgtgcttttctgcagaaggtaacttgacagcaagctgaggggaacgtccccaagccctgtctccctgtctctacagctgcatgctcctctgcgtggcccagccttcacagcgctccagaagaagctgatgccctgaggctgggcacagtggaaatcataataaagcgattgcgatgctcaaaaagct

SEQ ID NO: 72082 - DNA, 352 bp, Homo sapiens
aggaaaatatgataacgtcgaactacgggacaggacaggtcttaactgagcgactctcttaattttcaccgctacacgcatagcgagatctgactaccaagagttattcaaaagggagtggagtgcagtcatgcagaagcaaacacgtcttcattgctcgaggcccttgtgctaaatcggaaggtaacttgacagcaagctgaggggaacgtccccaagccctgtctccctgtctctacagctgcatgctcctctgcgtggcccagccttcacagcgctccagaagaagctgatgccctgaggctgggcacagtggaaatcataataaagcgattgcgatgctcaaaaagct

SEQ ID NO: 72083 - DNA, 5735 bp, Homo sapiens
  misc_feature (33)..(34): n is a, c, g, or t
  misc_feature (36)..(36): n is a, c, g, or t
cagaaaacggcgcatagggtaggctgggcagcnnanagattatgtgaaggttcgttgggaccctccggagccagtggggtactgcaaagagccatgggggtgttgatgtccaagcggcagacagtggagcaggtgcagaaggtgagtctggctgtgtctgctttcaaggatgggctgcgggacaggccttccatccgacgcacaggtgagctgccagggtcccgccgtggcactgtagagggctccgtccaggaggtacaggaggagaaggaagcagaagcaggaacctcggtggtccaggaagagagtagtgccggccgcgcagcctgggagcggctccgagatgggcgcggcgtggagcctgaggagtttgacaggacaagtcgattcacaccccctgcgttcatccgccccacccggaagctggatgatgacaaacctccagaaatctgcctggagcccagagagcctgttgtcaacgatgagatgtgtgatgtttgtgaggtctggacagctgagagcctcttcccgtgcagggtctgcaccagggttttccatgatggctgcctgcgccgcatgggctacatccaaggagacagtgcagcggaggtgacggagatggcccacacagaaacaggctggagctgccactactgtgacaacatcaacttgctgcttactgaggaggaaatgtatagcctcacggagacctttcagcggtgtaaagtcatccctgattgctccctgacactggaggactttctgcgttaccgccaccaagcagccaagcggggggaccgtgacagggccctgagtgaggagcaagaagagcaggcggcccgccagtttgctgccctggaccctgaacatcgaggccacatagagtggcctgacttcttgtcccatgagtccctcctgcttctgcagcagttgcgtccccagaactctctgttgaggcttctgacagtgaaggagcgggagcgagcccgagccgccttcctggctcggggcagtgggagcaccgtcagtgaggcagagtgccgccgggcccagcactcttggttttgcaaacggttcccagaggctccttcctgcagtgtcagcatcagccatgtgggtcccatcgcagatagcagcccagccagcagcagcagcaagagtcaggacaagaccctgctgcccacagagcaggagtccagatttgtggactggcctaccttcctgcaagagaatgtcctctacatcctggctgctcgccccaacagcgcagccattcacctgaagcccccaggatagcatggagcagagaagctcggtttgaggacagtgacatcctctccctcctttcctttctcccttcccccaccaacctctggcacagagactcatggggttgggacactgccagcgtcttaacttgtcactaagctttaaggcactgaaatcaccattcccctcacaatagaggcagtgaatgcattgccacaaggagaagccctgggagctgtggcagcatcctctcctggaccgcccctgccccacatcatagacgggacctgccaccacacttatatacatgtgcacatgctgcccagctgtccatgccttcagaagcctggttctttttggttgagaaaggaccaaagtccctttgtgaagcccctggtatagaggagggggtctctactcaccccttctataggcaggccagttctaatttccaatagataagtctctggccaagtgattcttaggaagggggcatgtcagactcgcatgcctgcctagagctcctggagatcctaatgggccccgctttctccaccaaaaatcccttctgcagtcagctgctgttactagtaggtgtgcattatgtacctcggctgtactgagttgggaaaagagttaaacatcaccactgaaattcagccctttatttatttaaattccaattcctggtgacagaaaaggcaactagcctggagaatcctgactggaagagggggaggcagcccttcccagggactcgggattctaggaacctctcagtcaggtcacctgagtccaaaagtctttagcagggtagtcaaaaatcaaggtgagccttcttggccccatttttcagatggtagctcatggcctagggccaagggggcctgaatggagcaaacacactggcaggagccacagccctctgtgttagatgcttcacccaagtcaccgaccacagagactgacgagagcacactctggaggaagaggagagaacggggctctgcttcctcatcattccagctcaactcaactgtagacaccttccacagcccaagaaagatctgcagagccctgagcagggactctttcagccatcctgacaaacaggataagaggctggggcttaagaagaggctctgcagagaaggtcctgggaaagccttacagaagttttccgcttctccctatcactgagactcggcttgagtggctgcttctcctcactgctcatcacatgtccttccccagcaggctagggcttgggcctggcatggaaggccttttggggcaatcagaggctgccacaagagcaccaagcctggcctccaagccccagccctccttcctaagtactcatcaaattcaaattcttcagtccgtgtgttatggctcatcttggccggccgtggggtccatgttctaggcttctgtttccaacttaatgacttaggcatagcgagatctgactaccaagagttattcaaaagggagtggagtgcagtcatgcagaagcaaacacgtcttcattgctcgaggcccttgtgctaaatcgggtgcgtacagaagaacacacaccgctcggtgctgaatgtttcgaggaaagcaaggagctgcggccaggggcttcttgagagccctgtgtagtctcctcctgtaggaaccaccttagctggaagcagggtggtgagctgctggggttggattatttgggactgaaatgaagcagacaggagacaaatctgggctcaggtgtatggcccacagcttttagaaatgctcttcagccgtcccccaggattgatccataggaggggccattattcagtctagtcaaaacaagaaagcgcaggactcctgggcctaagaactgcatctgaagcagccaggcctggggttttgcactgagatgaaagcacattaagcacaggggctcttacctactctcctggcaaatcatctcctgtgccactggccttgggctgctcgatctcacagacggggcattttgagtagagacaagctctgggctttgagagctgaatagcatttttctcctgcctcatcagtcacagggactggaagtccatcttgttccctgatccttcacagatcaaggtgatgcctacctctttggagctgctgcctctagctctccacgggtgagtgaggagagttggtgggccaggtcaggcctgccgtattccagggcctggcaaagcagccccagagttcttccacaacaggaacaggcccatttggatcacgcttctccctattccagaacagcaaacttcctgggtgagggcctgctacagagatcccaggggacacttccctcagcaaagagtagagttcccatcccacaagagtcctaggaagcaggaaagcacgaaggagcagccagcctcttctccacaggcagtcatctagctttttaccaaaggggaagtgccgttgctccccaagtccagagttgcagacgccctgccccaacccccgtccagaatctccctttgcagtgttctaatccccagagcccctctgcggtatgtatagagttgttaaaaacgttcagaaacccagtgaagcccatttcgttttcaagccctcccatcactgtgactctgaaattctgccaagtacaaatattagcgtttggctctaataagggtatgagaaaatgtttcagtcttttctttgtggctacccaaaattgagatcagtgtttctaaccaaggaaggcctgggttatagacaggctcctctgaagcccacttgccctaagcatttttcacctagcattcctcttcctcatgttcagatgtgaatgaaggggcagctggaggatgtggtggagctgcagggaccgagggtcagctgagcagtggccctggccacaaaaccactccaagtctgctccttggcttcctctcctgagcccagccttccccaacagaacacttgagcaagggcccctagagtatcccagggatggagcagtcccctcactctaggtactgatctaaccttcaagtgctcctcttcatttgaggacacctacagtagaaaccatgaggacattgcctctttctgccctcagcccaagtacctggggctagcagggcagataccagcctttctggtcctgctgctccctatgggatgtcaccctgaccttgcttaagtggccaagtcttagggtccccttattcctgtcaccattatgaaaaacacagcattaaactgcctgggaagaggacacctccttgggggagtgagccccaaggttatacccaggactcatagcccaaagcacaacctcggccattgcaggtttcacagcttcagtcagagtggtgccaggaagcccaaaagccaagagggaaggtcagcagaagctgcctggcaaggccccaggccagccaggcccaccccagagccaagagaaacttcaagcaggactgagaactggtagctggctctagtgatcctgaaagcatgttcccttcagaccagcagagtgaagacagacagatgtgtggccctaaaaggcagaacagttttgatgccagaacttcaggactgtcaccacagtccctttttacccctcctctatttacagtgaaataaaattcctattttctttttttttttttttttaattttccttatttcaagctcttatctgaaaaaatgctactttctcctaccacttagtttgaatttgcccaggatatctgtctgggcccctggctgcaacccagacaatggcgagatctcctggagtgggggatattcacgcatcgtgcctgttcctgacagctcagccctggtgtagggtgggactgggcattttctctgctgttacttttctgctaccactatttttgggaaccttggaaagaaaataaacaggttacagaatttcggctagcactaagggaaagctttttcctctgggccacatgccccagtgacccagagcatggaaagggggtcagctctggtctgggccagtgactaagaagcccaatcacattccagtttctatagcactgggtaggcacaacccacagttaagaacatcaagttataagtagccaggcctttccatagccatggtgacacaaaggccctcaagattagcctcctgccatcatgggttggcctgtgatctgtcccccagccaaacccaagtttgtgagagggactctgagaacacttgagtaacacttgggaatccaatgcgctctggtccctcatgcccttcccatgtgcttttctgcagaaggtaacttgacagcaagctgaggggaacgtccccaagccctgtctccctgtctctacagctgcatgctcctctgcgtggcccagccttcacagcgctccagaagaagctgatgccctgaggctgggcacagtggaaatcataataaagcgattgcgatgctcaaaaagct

SEQ ID NO: 72084 - DNA, 1544 bp, Homo sapiens
caggctggtacggtcccagcttgatcaccttccccaacagaacacttgagcaagggcccctagagtatcccagggatggagcagtcccctcactctaggtactgatctaaccttcaagtgctcctcttcatttgaggacacctacagtagaaaccatgaggacattgcctctttctgccctcagcccaagtacctggggctagcagggcagataccagcctttctggtcctgctgctccctatgggatgtcaccctgaccttgcttaagtggccaagtcttagggtccccttattcctgtcaccattatgaaaaacacagcattaaactgcctgggaagaggacacctccttgggggagtgagccccaaggttatacccaggactcatagcccaaagcacaacctcggccattgcaggtttcacagcttcagtcagagtggtgccaggaagcccaaaagccaagagggaaggtcagcagaagctgcctggcaaggccccaggccagccaggcccaccccagagccaagagaaacttcaagcaggactgagaactggtagctggctctagtgatcctgaaagcatgttcccttcagaccagcagagtgaagacagacagatgtgtggccctaaaaggcagaacagttttgatgccagaacttcaggactgtcaccacagtccctttttacccctcctctatttacagtgaaataaaattcctattttctttttttttttttttttaattttccttatttcaagctcttatctgaaaaaatgctactttctcctaccacttagtttgaatttgcccaggatatctgtctgggcccctggctgcaacccagacaatggcgagatctcctggagtgggggatattcacgcatcgtgcctgttcctgacagctcagccctggtgtagggtgggactgggcattttctctgctgttacttttctgctaccactatttttgggaaccttggaaagaaaataaacaggttacagaatttcggctagcactaagggaaagctttttcctctgggccacatgccccagtgacccagagcatggaaagggggtcagctctggtctgggccagtgactaagaagcccaatcacattccagtttctatagcactgggtaggcacaacccacagttaagaacatcaagttataagtagccaggcctttccatagccatggtgacacaaaggccctcaagattagcctcctgccatcatgggttggcctgtgatctgtcccccagccaaacccaagtttgtgagagggactctgagaacacttgagtaacacttgggaatccaatgcgctctggtccctcatgcccttcccatgtgcttttctgcagaaggtaacttgacagcaagctgaggggaacgtccccaagccctgtctccctgtctctacagctgcatgctcctctgcgtggcccagccttcacagcgctccagaagaagctgatgccctgaggctgggcacagtggaaatcataataaagcgattgcgatgctcaaaaagct

SEQ ID NO: 72085 - DNA, 4963 bp, Homo sapiens
  misc_feature (33)..(34): n is a, c, g, or t
  misc_feature (36)..(36): n is a, c, g, or t
cagaaaacggcgcatagggtaggctgggcagcnnanagattatgtgaaggttcgttgggaccctccggagccagtggggtactgcaaagagccatgggggtgttgatgtccaagcggcagacagtggagcaggtgcagaaggtgagtctggctgtgtctgctttcaaggatgggctgcgggacaggccttccatccgacgcacaggtgagctgccagggtcccgccgtggcactgtagagggctccgtccaggaggtacaggaggagaaggaagcagaagcaggaacctcggtggtccaggaagagagtagtgccggccgcgcagcctgggagcggctccgagatgggcgcggcgtggagcctgaggagtttgacaggacaagtcgattcacaccccctgcgttcatccgccccacccggaagctggatgatgacaaacctccagaaatctgcctggagcccagagagcctgttgtcaacgatgagatgtgtgatgtttgtgaggtctggacagctgagagcctcttcccgtgcagggtctgcaccagggttttccatgatggctgcctgcgccgcatgggctacatccaaggagacagtgcagcggaggtgacggagatggcccacacagaaacaggctggagctgccactactgtgacaacatcaacttgctgcttactgaggaggaaatgtatagcctcacggagacctttcagcggtgtaaagtcatccctgattgctccctgacactggaggactttctgcgttaccgccaccaagcagccaagcggggggaccgtgacagggccctgagtgaggagcaagaagagcaggcggcccgccagtttgctgccctggaccctgaacatcgaggccacatagagtggcctgacttcttgtcccatgagtccctcctgcttctgcagcagttgcgtccccagaactctctgttgaggcttctgacagtgaaggagcgggagcgagcccgagccgccttcctggctcggggcagtgggagcaccgtcagtgaggcagagtgccgccgggcccagcactcttggttttgcaaacggttcccagaggctccttcctgcagtgtcagcatcagccatgtgggtcccatcgcagatagcagcccagccagcagcagcagcaagagtcaggacaagaccctgctgcccacagagcaggagtccagatttgtggactggcctaccttcctgcaagagaatgtcctctacatcctggctgctcgccccaacagcgcagccattcacctgaagcccccaggatagcatggagcagagaagctcggtttgaggacagtgacatcctctccctcctttcctttctcccttcccccaccaacctctggcacagagactcatggggttgggacactgccagcgtcttaacttgtcactaagctttaaggcactgaaatcaccattcccctcacaatagaggcagtgaatgcattgccacaaggagaagccctgggagctgtggcagcatcctctcctggaccgcccctgccccacatcatagacgggacctgccaccacacttatatacatgtgcacatgctgcccagctgtccatgccttcagaagcctggttctttttggttgagaaaggaccaaagtccctttgtgaagcccctggtatagaggagggggtctctactcaccccttctataggcaggccagttctaatttccaatagataagtctctggccaagtgattcttaggaagggggcatgtcagactcgcatgcctgcctagagctcctggagatcctaatgggccccgctttctccaccaaaaatcccttctgcagtcagctgctgttactagtaggtgtgcattatgtacctcggctgtactgagttgggaaaagagttaaacatcaccactgaaattcagccctttatttatttaaattccaattcctggtgacagaaaaggcaactagcctggagaatcctgactggaagagggggaggcagcccttcccagggactcgggattctaggaacctctcagtcaggtcacctgagtccaaaagtctttagcagggtagtcaaaaatcaaggtgagccttcttggccccatttttcagatggtagctcatggcctagggccaagggggcctgaatggagcaaacacactggcaggagccacagccctctgtgttagatgcttcacccaagtcaccgaccacagagactgacgagagcacactctggaggaagaggagagaacggggctctgcttcctcatcattccagctcaactcaactgtagacaccttccacagcccaagaaagatctgcagagccctgagcagggactctttcagccatcctgacaaacaggataagaggctggggcttaagaagaggctctgcagagaaggtcctgggaaagccttacagaagttttccgcttctccctatcactgagactcggcttgagtggctgcttctcctcactgctcatcacatgtccttccccagcaggctagggcttgggcctggcatggaaggccttttggggcaatcagaggctgccacaagagcaccaagcctggcctccaagccccagccctccttcctaagtactcatcaaattcaaattcttcagtccgtgtgttatggctcatcttggccggccgtggggtccatgttctaggcttctgtttccaacttaatgacttaggcatagcgagatctgactaccaagagttattcaaaagggagtggagtgcagtcatgcagaagcaaacacgtcttcattgctcgaggcccttgtgctaaatcgggtgcgtacagaagaacacacaccgctcggtgctgaatgtttcgaggaaagcaaggagctgcggccaggggcttcttgagagccctgtgtagtctcctcctgtaggaaccaccttagctggaagcagggtggtgagctgctggggttggattatttgggactgaaatgaagcagacaggagacaaatctgggctcaggtgtatggcccacagcttttagaaatgctcttcagccgtcccccaggattgatccataggaggggccattattcagtctagtcaaaacaagaaagcgcaggactcctgggcctaagaactgcatctgaagcagccaggcctggggttttgcactgagatgaaagcacattaagcacaggggctcttacctactctcctggcaaatcatctcctgtgccactggccttgggctgctcgatctcacagacggggcattttgagtagagacaagctctgggctttgagagctgaatagcatttttctcctgcctcatcagtcacagggactggaagtccatcttgttccctgatccttcacagatcaaggtgatgcctacctctttggagctgctgcctctagctctccacgggtgagtgaggagagttggtgggccaggtcaggcctgccgtattccagggcctggcaaagcagccccagagttcttccacaacaggaacaggcccatttggatcacgcttctccctattccagaacagcaaacttcctgggtgagggcctgctacagagatcccaggggacacttccctcagcaaagagtagagttcccatcccacaagagtcctaggaagcaggaaagcacgaaggagcagccagcctcttctccacaggcagtcatctagctttttaccaaaggggaagtgccgttgctccccaagtccagagttgcagacgccctgccccaacccccgtccagaatctccctttgcagtgttctaatccccagagcccctctgcggtatgtatagagttgttaaaaacgttcagaaacccagtgaagcccatttcgttttcaagccctcccatcactgtgactctgaaattctgccaagtacaaatattagcgtttggctctaataagggtatgagaaaatgtttcagtcttttctttgtggctacccaaaattgagatcagtgtttctaaccaaggaaggcctgggttatagacaggctcctctgaagcccacttgccctaagcatttttcacctagcattcctcttcctcatgttcagatgtgaatgaaggggcagctggaggatgtggtggagctgcagggaccgagggtcagctgagcagtggccctggccacaaaaccactccaagtctgctccttggcttcctctcctgagcccagccttccccaacagaacacttgagcaagggcccctagagtatcccagggatggagcagtcccctcactctaggtactgatctaaccttcaagtgctcctcttcatttgaggacacctacagtagaaaccatgaggacattgcctctttctgccctcagcccaagtacctggggctagcagggcagataccagcctttctggtcctgctgctccctatgggatgtcaccctgaccttgcttaagtggccaagtcttagggtccccttattcctgtcaccattatgaaaaacacagcattaaactgcctgggaagaggacacctccttgggggagtgagccccaaggttatacccaggactcatagcccaaagcacaacctcggccattgcaggtttcacagcttcagtcagagtggtgccaggaagcccaaaagccaagagggaaggtcagcagaagctgcctggcaaggccccaggccagccaggcccaccccagagccaagagaaacttcaagcaggactgagaactggtagctggctctagtgatcctgaaagcatgttcccttcagaccagcagagtgaagacagacagatgtgtggccctaaaaggcagaacagttttgatgccagaacttcaggactgtcaccacagtccctttttacccctcctctatttacagtgaaataaaattcctattttcgttactgggtgttccaacctaaataatggtgctcatttcaaagct

SEQ ID NO: 72086 - DNA, 3745 bp, Homo sapiens
  misc_feature (33)..(34): n is a, c, g, or t
  misc_feature (36)..(36): n is a, c, g, or t
cagaaaacggcgcatagggtaggctgggcagcnnanagattatgtgaaggttcgttgggaccctccggagccagtggggtactgcaaagagccatgggggtgttgatgtccaagcggcagacagtggagcaggtgcagaaggtgagtctggctgtgtctgctttcaaggatgggctgcgggacaggccttccatccgacgcacaggtgagctgccagggtcccgccgtggcactgtagagggctccgtccaggaggtacaggaggagaaggaagcagaagcaggaacctcggtggtccaggaagagagtagtgccggccgcgcagcctgggagcggctccgagatgggcgcggcgtggagcctgaggagtttgacaggacaagtcgattcacaccccctgcgttcatccgccccacccggaagctggatgatgacaaacctccagaaatctgcctggagcccagagagcctgttgtcaacgatgagatgtgtgatgtttgtgaggtctggacagctgagagcctcttcccgtgcagggtctgcaccagggttttccatgatggctgcctgcgccgcatgggctacatccaaggagacagtgcagcggaggtgacggagatggcccacacagaaacaggctggagctgccactactgtgacaacatcaacttgctgcttactgaggaggaaatgtatagcctcacggagacctttcagcggtgtaaagtcatccctgattgctccctgacactggaggactttctgcgttaccgccaccaagcagccaagcggggggaccgtgacagggccctgagtgaggagcaagaagagcaggcggcccgccagtttgctgccctggaccctgaacatcgaggccacatagagtggcctgacttcttgtcccatgagtccctcctgcttctgcagcagttgcgtccccagaactctctgttgaggcttctgacagtgaaggagcgggagcgagcccgagccgccttcctggctcggggcagtgggagcaccgtcagtgaggcagagtgccgccgggcccagcactcttggttttgcaaacggttcccagaggctccttcctgcagtgtcagcatcagccatgtgggtcccatcgcagatagcagcccagccagcagcagcagcaagagtcaggacaagaccctgctgcccacagagcaggagtccagatttgtggactggcctaccttcctgcaagagaatgtcctctacatcctggctgctcgccccaacagcgcagccattcacctgaagcccccaggatagcatggagcagagaagctcggtttgaggacagtgacatcctctccctcctttcctttctcccttcccccaccaacctctggcacagagactcatggggttgggacactgccagcgtcttaacttgtcactaagctttaaggcactgaaatcaccattcccctcacaatagaggcagtgaatgcattgccacaaggagaagccctgggagctgtggcagcatcctctcctggaccgcccctgccccacatcatagacgggacctgccaccacacttatatacatgtgcacatgctgcccagctgtccatgccttcagaagcctggttctttttggttgagaaaggaccaaagtccctttgtgaagcccctggtatagaggagggggtctctactcaccccttctataggcaggccagttctaatttccaatagataagtctctggccaagtgattcttaggaagggggcatgtcagactcgcatgcctgcctagagctcctggagatcctaatgggccccgctttctccaccaaaaatcccttctgcagtcagctgctgttactagtaggtgtgcattatgtacctcggctgtactgagttgggaaaagagttaaacatcaccactgaaattcagccctttatttatttaaattccaattcctggtgacagaaaaggcaactagcctggagaatcctgactggaagagggggaggcagcccttcccagggactcgggattctaggaacctctcagtcaggtcacctgagtccaaaagtctttagcagggtagtcaaaaatcaaggtgagccttcttggccccatttttcagatggtagctcatggcctagggccaagggggcctgaatggagcaaacacactggcaggagccacagccctctgtgttagatgcttcacccaagtcaccgaccacagagactgacgagagcacactctggaggaagaggagagaacggggctctgcttcctcatcattccagctcaactcaactgtagacaccttccacagcccaagaaagatctgcagagccctgagcagggactctttcagccatcctgacaaacaggataagaggctggggcttaagaagaggctctgcagagaaggtcctgggaaagccttacagaagttttccgcttctccctatcactgagactcggcttgagtggctgcttctcctcactgctcatcacatgtccttccccagcaggctagggcttgggcctggcatggaaggccttttggggcaatcagaggctgccacaagagcaccaagcctggcctccaagccccagccctccttcctaagtactcatcaaattcaaattcttcagtccgtgtgttatggctcatcttggccggccgtggggtccatgttctaggcttctgtttccaacttaatgacttaggcatagcgagatctgactaccaagagttattcaaaagggagtggagtgcagtcatgcagaagcaaacacgtcttcattgctcgaggcccttgtgctaaatcgggtgcgtacagaagaacacacaccgctcggtgctgaatgtttcgaggaaagcaaggagctgcggccaggggcttcttgagagccctgtgtagtctcctcctgtaggaaccaccttagctggaagcagggtggtgagctgctggggttggattatttgggactgaaatgaagcagacaggagacaaatctgggctcaggtgtatggcccacagcttttagaaatgctcttcagccgtcccccaggattgatccataggaggggccattattcagtctagtcaaaacaagaaagcgcaggactcctgggcctaagaactgcatctgaagcagccaggcctggggttttgcactgagatgaaagcacattaagcacaggggctcttacctactctcctggcaaatcatctcctgtgccactggccttgggctgctcgatctcacagacggggcattttgagtagagacaagctctgggctttgagagctgaatagcatttttctcctgcctcatcagtcacagggactggaagtccatcttgttccctgatccttcacagatcaaggtgatgcctacctctttggagctgctgcctctagctctccacgggtgagtgaggagagttggtgggccaggtcaggcctgccgtattccagggcctggcaaagcagccccagagttcttccacaacaggaacaggcccatttggatcacgcttctccctattccagaacagcaaacttcctggaaggtaacttgacagcaagctgaggggaacgtccccaagccctgtctccctgtctctacagctgcatgctcctctgcgtggcccagccttcacagcgctccagaagaagctgatgccctgaggctgggcacagtggaaatcataataaagcgattgcgatgctcaaaaagct

SEQ ID NO: 72087 - DNA, 3545 bp, Homo sapiens
  misc_feature (33)..(34): n is a, c, g, or t
  misc_feature (36)..(36): n is a, c, g, or t
cagaaaacggcgcatagggtaggctgggcagcnnanagattatgtgaaggttcgttgggaccctccggagccagtggggtactgcaaagagccatgggggtgttgatgtccaagcggcagacagtggagcaggtgcagaaggtgagtctggctgtgtctgctttcaaggatgggctgcgggacaggccttccatccgacgcacaggtgagctgccagggtcccgccgtggcactgtagagggctccgtccaggaggtacaggaggagaaggaagcagaagcaggaacctcggtggtccaggaagagagtagtgccggccgcgcagcctgggagcggctccgagatgggcgcggcgtggagcctgaggagtttgacaggacaagtcgattcacaccccctgcgttcatccgccccacccggaagctggatgatgacaaacctccagaaatctgcctggagcccagagagcctgttgtcaacgatgagatgtgtgatgtttgtgaggtctggacagctgagagcctcttcccgtgcagggtctgcaccagggttttccatgatggctgcctgcgccgcatgggctacatccaaggagacagtgcagcggaggtgacggagatggcccacacagaaacaggctggagctgccactactgtgacaacatcaacttgctgcttactgaggaggaaatgtatagcctcacggagacctttcagcggtgtaaagtcatccctgattgctccctgacactggaggactttctgcgttaccgccaccaagcagccaagcggggggaccgtgacagggccctgagtgaggagcaagaagagcaggcggcccgccagtttgctgccctggaccctgaacatcgaggccacatagagtggcctgacttcttgtcccatgagtccctcctgcttctgcagcagttgcgtccccagaactctctgttgaggcttctgacagtgaaggagcgggagcgagcccgagccgccttcctggctcggggcagtgggagcaccgtcagtgaggcagagtgccgccgggcccagcactcttggttttgcaaacggttcccagaggctccttcctgcagtgtcagcatcagccatgtgggtcccatcgcagatagcagcccagccagcagcagcagcaagagtcaggacaagaccctgctgcccacagagcaggagtccagatttgtggactggcctaccttcctgcaagagaatgtcctctacatcctggctgctcgccccaacagcgcagccattcacctgaagcccccaggatagcatggagcagagaagctcggtttgaggacagtgacatcctctccctcctttcctttctcccttcccccaccaacctctggcacagagactcatggggttgggacactgccagcgtcttaacttgtcactaagctttaaggcactgaaatcaccattcccctcacaatagaggcagtgaatgcattgccacaaggagaagccctgggagctgtggcagcatcctctcctggaccgcccctgccccacatcatagacgggacctgccaccacacttatatacatgtgcacatgctgcccagctgtccatgccttcagaagcctggttctttttggttgagaaaggaccaaagtccctttgtgaagcccctggtatagaggagggggtctctactcaccccttctataggcaggccagttctaatttccaatagataagtctctggccaagtgattcttaggaagggggcatgtcagactcgcatgcctgcctagagctcctggagatcctaatgggccccgctttctccaccaaaaatcccttctgcagtcagctgctgttactagtaggtgtgcattatgtacctcggctgtactgagttgggaaaagagttaaacatcaccactgaaattcagccctttatttatttaaattccaattcctggtgacagaaaaggcaactagcctggagaatcctgactggaagagggggaggcagcccttcccagggactcgggattctaggaacctctcagtcaggtcacctgagtccaaaagtctttagcagggtagtcaaaaatcaaggtgagccttcttggccccatttttcagatggtagctcatggcctagggccaagggggcctgaatggagcaaacacactggcaggagccacagccctctgtgttagatgcttcacccaagtcaccgaccacagagactgacgagagcacactctggaggaagaggagagaacggggctctgcttcctcatcattccagctcaactcaactgtagacaccttccacagcccaagaaagatctgcagagccctgagcagggactctttcagccatcctgacaaacaggataagaggctggggcttaagaagaggctctgcagagaaggtcctgggaaagccttacagaagttttccgcttctccctatcactgagactcggcttgagtggctgcttctcctcactgctcatcacatgtccttccccagcaggctagggcttgggcctggcatggaaggccttttggggcaatcagaggctgccacaagagcaccaagcctggcctccaagccccagccctccttcctaagtactcatcaaattcaaattcttcagtccgtgtgttatggctcatcttggccggccgtggggtccatgttctaggcttctgtttccaacttaatgacttaggcatagcgagatctgactaccaagagttattcaaaagggagtggagtgcagtcatgcagaagcaaacacgtcttcattgctcgaggcccttgtgctaaatcgggtgcgtacagaagaacacacaccgctcggtgctgaatgtttcgaggaaagcaaggagctgcggccaggggcttcttgagagccctgtgtagtctcctcctgtaggaaccaccttagctggaagcagggtggtgagctgctggggttggattatttgggactgaaatgaagcagacaggagacaaatctgggctcaggtgtatggcccacagcttttagaaatgctcttcagccgtcccccaggattgatccataggaggggccattattcagtctagtcaaaacaagaaagcgcaggactcctgggcctaagaactgcatctgaagcagccaggcctggggttttgcactgagatgaaagcacattaagcacaggggctcttacctactctcctggcaaatcatctcctgtgccactggccttgggctgctcgatctcacagacggggcattttgagtagagacaagctctgggctttgagagctgaatagcatttttctcctgcctcatcagtcacagggactggaagtccatcttgttccctgatccttcacagatcaaggtgatgcctacctctttggagctgctgcctctagctctccacggctgcatgctcctctgcgtggcccagccttcacagcgctccagaagaagctgatgccctgaggctgggcacagtggaaatcataataaagcgattgcgatgctcaaaaagct

SEQ ID NO: 72088 - DNA, 3177 bp, Homo sapiens
  misc_feature (33)..(34): n is a, c, g, or t
  misc_feature (36)..(36): n is a, c, g, or t
cagaaaacggcgcatagggtaggctgggcagcnnanagattatgtgaaggttcgttgggaccctccggagccagtggggtactgcaaagagccatgggggtgttgatgtccaagcggcagacagtggagcaggtgcagaaggtgagtctggctgtgtctgctttcaaggatgggctgcgggacaggccttccatccgacgcacaggtgagctgccagggtcccgccgtggcactgtagagggctccgtccaggaggtacaggaggagaaggaagcagaagcaggaacctcggtggtccaggaagagagtagtgccggccgcgcagcctgggagcggctccgagatgggcgcggcgtggagcctgaggagtttgacaggacaagtcgattcacaccccctgcgttcatccgccccacccggaagctggatgatgacaaacctccagaaatctgcctggagcccagagagcctgttgtcaacgatgagatgtgtgatgtttgtgaggtctggacagctgagagcctcttcccgtgcagggtctgcaccagggttttccatgatggctgcctgcgccgcatgggctacatccaaggagacagtgcagcggaggtgacggagatggcccacacagaaacaggctggagctgccactactgtgacaacatcaacttgctgcttactgaggaggaaatgtatagcctcacggagacctttcagcggtgtaaagtcatccctgattgctccctgacactggaggactttctgcgttaccgccaccaagcagccaagcggggggaccgtgacagggccctgagtgaggagcaagaagagcaggcggcccgccagtttgctgccctggaccctgaacatcgaggccacatagagtggcctgacttcttgtcccatgagtccctcctgcttctgcagcagttgcgtccccagaactctctgttgaggcttctgacagtgaaggagcgggagcgagcccgagccgccttcctggctcggggcagtgggagcaccgtcagtgaggcagagtgccgccgggcccagcactcttggttttgcaaacggttcccagaggctccttcctgcagtgtcagcatcagccatgtgggtcccatcgcagatagcagcccagccagcagcagcagcaagagtcaggacaagaccctgctgcccacagagcaggagtccagatttgtggactggcctaccttcctgcaagagaatgtcctctacatcctggctgctcgccccaacagcgcagccattcacctgaagcccccaggatagcatggagcagagaagctcggtttgaggacagtgacatcctctccctcctttcctttctcccttcccccaccaacctctggcacagagactcatggggttgggacactgccagcgtcttaacttgtcactaagctttaaggcactgaaatcaccattcccctcacaatagaggcagtgaatgcattgccacaaggagaagccctgggagctgtggcagcatcctctcctggaccgcccctgccccacatcatagacgggacctgccaccacacttatatacatgtgcacatgctgcccagctgtccatgccttcagaagcctggttctttttggttgagaaaggaccaaagtccctttgtgaagcccctggtatagaggagggggtctctactcaccccttctataggcaggccagttctaatttccaatagataagtctctggccaagtgattcttaggaagggggcatgtcagactcgcatgcctgcctagagctcctggagatcctaatgggccccgctttctccaccaaaaatcccttctgcagtcagctgctgttactagtaggtgtgcattatgtacctcggctgtactgagttgggaaaagagttaaacatcaccactgaaattcagccctttatttatttaaattccaattcctggtgacagaaaaggcaactagcctggagaatcctgactggaagagggggaggcagcccttcccagggactcgggattctaggaacctctcagtcaggtcacctgagtccaaaagtctttagcagggtagtcaaaaatcaaggtgagccttcttggccccatttttcagatggtagctcatggcctagggccaagggggcctgaatggagcaaacacactggcaggagccacagccctctgtgttagatgcttcacccaagtcaccgaccacagagactgacgagagcacactctggaggaagaggagagaacggggctctgcttcctcatcattccagctcaactcaactgtagacaccttccacagcccaagaaagatctgcagagccctgagcagggactctttcagccatcctgacaaacaggataagaggctggggcttaagaagaggctctgcagagaaggtcctgggaaagccttacagaagttttccgcttctccctatcactgagactcggcttgagtggctgcttctcctcactgctcatcacatgtccttccccagcaggctagggcttgggcctggcatggaaggccttttggggcaatcagaggctgccacaagagcaccaagcctggcctccaagccccagccctccttcctaagtactcatcaaattcaaattcttcagtccgtgtgttatggctcatcttggccggccgtggggtccatgttctaggcttctgtttccaacttaatgacttaggcatagcgagatctgactaccaagagttattcaaaagggagtggagtgcagtcatgcagaagcaaacacgtcttcattgctcgaggcccttgtgctaaatcgggtgcgtacagaagaacacacaccgctcggtgctgaatgtttcgaggaaagcaaggagctgcggccaggggcttcttgagagccctgtgtagtctcctcctgtaggaaccaccttagctggaagcagggtggtgagctgctggggttggattatttgggactgaaatgaagcagacagaaggtaacttgacagcaagctgaggggaacgtccccaagccctgtctccctgtctctacagctgcatgctcctctgcgtggcccagccttcacagcgctccagaagaagctgatgccctgaggctgggcacagtggaaatcataataaagcgattgcgatgctcaaaaagct

SEQ ID NO: 72089 - DNA, 1491 bp, Homo sapiens
  misc_feature (33)..(34): n is a, c, g, or t
  misc_feature (36)..(36): n is a, c, g, or t
cagaaaacggcgcatagggtaggctgggcagcnnanagattatgtgaaggttcgttgggaccctccggagccagtggggtactgcaaagagccatgggggtgttgatgtccaagcggcagacagtggagcaggtgcagaaggtgagtctggctgtgtctgctttcaaggatgggctgcgggacaggccttccatccgacgcacaggtgagctgccagggtcccgccgtggcactgtagagggctccgtccaggaggtacaggaggagaaggaagcagaagcaggaacctcggtggtccaggaagagagtagtgccggccgcgcagcctgggagcggctccgagatgggcgcggcgtggagcctgaggagtttgacaggacaagtcgattcacaccccctgcgttcatccgccccacccggaagctggatgatgacaaacctccagaaatctgcctggagcccagagagcctgttgtcaacgatgagatgtgtgatgtttgtgaggtctggacagctgagagcctcttcccgtgcagggtctgcaccagggttttccatgatggctgcctgcgccgcatgggctacatccaaggagacagtgcagcggaggtgacggagatggcccacacagaaacaggctggagctgccactactgtgacaacatcaacttgctgcttactgaggaggaaatgtatagcctcacggagacctttcagcggtgtaaagtcatccctgattgctccctgacactggaggactttctgcgttaccgccaccaagcagccaagcggggggaccgtgacagggccctgagtgaggagcaagaagagcaggcggcccgccagtttgctgccctggaccctgaacatcgaggccacatagagtggcctgacttcttgtcccatgagtccctcctgcttctgcagcagttgcgtccccagaactctctgttgaggcttctgacagtgaaggagcgggagcgagcccgagccgccttcctggctcggggcagtgggagcaccgtcagtgaggcagagtgccgccgggcccagcactcttggttttgcaaacggttcccagaggctccttcctgcagtgtcagcatcagccatgtgggtcccatcgcagatagcagcccagccagcagcagcagcaagagtcaggacaagaccctgctgcccacagagcaggagtccagatttgtggactggcctaccttcctgcaagagaatgtcctctacatcctggctgctcgccccaacagcgcagccattcacctgaagcccccaggatagcatggagcagagaagctcggtttgaggacagtgacatcctctccctcctttcctttctcccttcccccaccaacctctggcacagagactcatggggttgggacactgccagcgtcttaacttgtcactaagctttaacgtcgtctagatcatcactactccctcacgttagagctgccgacgtaggggatcctc

SEQ ID NO: 72090 - DNA, 1371 bp, Homo sapiens
  misc_feature (33)..(34): n is a, c, g, or t
  misc_feature (36)..(36): n is a, c, g, or t
cagaaaacggcgcatagggtaggctgggcagcnnanagattatgtgaaggttcgttgggaccctccggagccagtggggtactgcaaagagccatgggggtgttgatgtccaagcggcagacagtggagcaggtgcagaaggtgagtctggctgtgtctgctttcaaggatgggctgcgggacaggccttccatccgacgcacaggtgagctgccagggtcccgccgtggcactgtagagggctccgtccaggaggtacaggaggagaaggaagcagaagcaggaacctcggtggtccaggaagagagtagtgccggccgcgcagcctgggagcggctccgagatgggcgcggcgtggagcctgaggagtttgacaggacaagtcgattcacaccccctgcgttcatccgccccacccggaagctggatgatgacaaacctccagaaatctgcctggagcccagagagcctgttgtcaacgatgagatgtgtgatgtttgtgaggtctggacagctgagagcctcttcccgtgcagggtctgcaccagggttttccatgatggctgcctgcgccgcatgggctacatccaaggagacagtgcagcggaggtgacggagatggcccacacagaaacaggctggagctgccactactgtgacaacatcaacttgctgcttactgaggaggaaatgtatagcctcacggagacctttcagcggtgtaaagtcatccctgattgctccctgacactggaggactttctgcgttaccgccaccaagcagccaagcggggggaccgtgacagggccctgagtgaggagcaagaagagcaggcggcccgccagtttgctgccctggaccctgaacatcgaggccacatagagtggcctgacttcttgtcccatgagtccctcctgcttctgcagcagttgcgtccccagaactctctgttgaggcttctgacagtgaaggagcgggagcgagcccgagccgccttcctggctcggggcagtgggagcaccgtcagtgaggcagagtgccgccgggcccagcactcttggttttgcaaacggttcccagaggctccttcctgcagtgtcagcatcagccatgtgggtcccatcgcagatagcagcccagccagcagcagcagcaagagtcaggacaagaccctgctgcccacagagcaggagtccagaaggtaacttgacagcaagctgaggggaacgtccccaagccctgtctccctgtctctacagctgcatgctcctctgcgtggcccagccttcacagcgctccagaagaagctgatgccctgaggctgggcacagtggaaatcataataaagcgattgcgatgctcaaaaagct

SEQ ID NO: 72091 - DNA, 5559 bp, Homo sapiens
  misc_feature (33)..(34): n is a, c, g, or t
  misc_feature (36)..(36): n is a, c, g, or t
cagaaaacggcgcatagggtaggctgggcagcnnanagattatgtgaaggttcgttgggaccctccggagccagtggggtactgcaaagagccatgggggtgttgatgtccaagcggcagacagtggagcaggtgcagaaggtgagtctggctgtgtctgctttcaaggatgggctgcgggacaggccttccatccgacgcacaggtgagctgccagggtcccgccgtggcactgtagagggctccgtccaggaggtacaggaggagaaggaagcagaagcaggaacctcggtggtccaggaagagagtagtgccggccgcgcagcctgggagcggctccgagatgggcgcggcgtggagcctgaggagtttgacaggacaagtcgattcacaccccctgcgttcatccgccccacccggaagctggatgatgacaaacctccagaaatctgcctggagcccagagagcctgttgtcaacgatgagatgtgtgatgtttgtgaggtctggacagctgagagcctcttcccgtgcagggtctgcaccagggttttccatgatggctgcctgcgccgcatgggctacatccaaggagacagtgcagcggaggtgacggagatggcccacacagaaacaggctggagctgccactactgtgacaacatcaacttgctgcttactgaggaggaaatgtatagcctcacggagacctttcagcggtgtaaagtcatccctgattgctccctgacactggaggactttctgcgttaccgccaccaagcagccaagcggggggaccgtgacagggccctgagtgaggagcaagaagagcaggcggcccgccagtttgctgccctggaccctgaacatcgaggccacatagagtggcctgacttcttgtcccatgagtccctcctgcttctgcagcagttgcgtccccagaactctctgttgaggcttctgacagtgaaggagcgggagcgagcccgagccgccttcctggctcggggcagtgggagcaccgtcagtgaggcagagtgccgccgggcccagcactcttggttttgcaaacggttcccagaggctccttcctgcagtgtcagcatcagccatgtgggtcccatcgcagatagcagcccagccagcagcagcagcaagagtcaggacaagaccctgctgcccacagagcaggagtccagatttgtggactggcctaccttcctgcaagagaatgtcctctacatcctggctgctcgccccaacagcgcagccattcacctgaagcccccaggatagcatggagcagagaagctcggtttgaggacagtgacatcctctccctcctttcctttctcccttcccccaccaacctctggcacagagactcatggggttgggacactgccagcgtcttaacttgtcactaagctttaaggcactgaaatcaccattcccctcacaatagaggcagtgaatgcattgccacaaggagaagccctgggagctgtggcagcatcctctcctggaccgcccctgccccacatcatagacgggacctgccaccacacttatatacatgtgcacatgctgcccagctgtccatgccttcagaagcctggttctttttggttgagaaaggaccaaagtccctttgtgaagcccctggtatagaggagggggtctctactcaccccttctataggcaggccagttctaatttccaatagataagtctctggccaagtgattcttaggaagggggcatgtcagactcgcatgcctgcctagagctcctggagatcctaatgggccccgctttctccaccaaaaatcccttctgcagtcagctgctgttactagtaggtgtgcattatgtacctcggctgtactgagttgggaaaagagttaaacatcaccactgaaattcagccctttatttatttaaattccaattcctggtgacagaaaaggcaactagcctggagaatcctgactggaagagggggaggcagcccttcccagggactcgggattctaggaacctctcagtcaggtcacctgagtccaaaagtctttagcagggtagtcaaaaatcaaggtgagccttcttggccccatttttcagatggtagctcatggcctagggccaagggggcctgaatggagcaaacacactggcaggagccacagccctctgtgttagatgcttcacccaagtcaccgaccacagagactgacgagagcacactctggaggaagaggagagaacggggctctgcttcctcatcattccagctcaactcaactgtagacaccttccacagcccaagaaagatctgcagagccctgagcagggactctttcagccatcctgacaaacaggataagaggctggggcttaagaagaggctctgcagagaaggtcctgggaaagccttacagaagttttccgcttctccctatcactgagactcggcttgagtggctgcttctcctcactgctcatcacatgtccttccccagcaggctagggcttgggcctggcatggaaggccttttggggcaatcagaggctgccacaagagcaccaagcctggcctccaagccccagccctccttcctaagtactcatcaaattcaaattcttcagtccgtgtgttatggctcatcttggccggccgtggggtccatgttctaggcttctgtttccaacttaatgacttaggcatagcgagatctgactaccaagagttattcaaaagggagtggagtgcagtcatgcagaagcaaacacgtcttcattgctcgaggcccttgtgctaaatcgggtgcgtacagaagaacacacaccgctcggtgctgaatgtttcgaggaaagcaaggagctgcggccaggggcttcttgagagccctgtgtagtctcctcctgtaggaaccaccttagctggaagcagggtggtgagctgctggggttggattatttgggactgaaatgaagcagacaggagacaaatctgggctcaggtgtatggcccacagcttttagaaatgctcttcagccgtcccccaggattgatccataggaggggccattattcagtctagtcaaaacaagaaagcgcaggactcctgggcctaagaactgcatctgaagcagccaggcctggggttttgcactgagatgaaagcacattaagcacaggggctcttacctactctcctggcaaatcatctcctgtgccactggccttgggctgctcgatctcacagacggggcattttgagtagagacaagctctgggctttgagagctgaatagcatttttctcctgcctcatcagtcacagggactggaagtccatcttgttccctgatccttcacagatcaaggtgatgcctacctctttggagctgctgcctctagctctccacgggtgagtgaggagagttggtgggccaggtcaggcctgccgtattccagggcctggcaaagcagccccagagttcttccacaacaggaacaggcccatttggatcacgcttctccctattccagaacagcaaacttcctgggtgagggcctgctacagagatcccaggggacacttccctcagcaaagagtagagttcccatcccacaagagtcctaggaagcaggaaagcacgaaggagcagccagcctcttctccacaggcagtcatctagctttttaccaaaggggaagtgccgttgctccccaagtccagagttgcagacgccctgccccaacccccgtccagaatctccctttgcagtgttctaatccccagagcccctctgcggtatgtatagagttgttaaaaacgttcagaaacccagtgaagcccatttcgttttcaagccctcccatcactgtgactctgaaattctgccaagtacaaatattagcgtttggctctaataagggtatgagaaaatgtttcagtcttttctttgtggctacccaaaattgagatcagtgtttctaaccaaggaaggcctgggttatagacaggctcctctgaagcccacttgccctaagcatttttcacctagcattcctcttcctcatgttcagatgtgaatgaaggggcagctggaggatgtggtggagctgcagggaccgagggtcagctgagcagtggccctggccacaaaaccactccaagtctgctccttggcttcctctcctgagcccagccttccccaacagaacacttgagcaagggcccctagagtatcccagggatggagcagtcccctcactctaggtactgatctaaccttcaagtgctcctcttcatttgaggacacctacagtagaaaccatgaggacattgcctctttctgccctcagcccaagtacctggggctagcagggcagataccagcctttctggtcctgctgctccctatgggatgtcaccctgaccttgcttaagtggccaagtcttagggtccccttattcctgtcaccattatgaaaaacacagcattaaactgcctgggaagaggacacctccttgggggagtgagccccaaggttatacccaggactcatagcccaaagcacaacctcggccattgcaggtttcacagcttcagtcagagtggtgccaggaagcccaaaagccaagagggaaggtcagcagaagctgcctggcaaggccccaggccagccaggcccaccccagagccaagagaaacttcaagcaggactgagaactggtagctggctctagtgatcctgaaagcatgttcccttcagaccagcagagtgaagacagacagatgtgtggccctaaaaggcagaacagttttgatgccagaacttcaggactgtcaccacagtccctttttacccctcctctatttacagtgaaataaaattcctattttcaaaaaaaaaaaaaagaaaaaaaaaaaaaaagaaaaataacaaaaaaaaaggggggggggggccaaaataggaagaatccgcaccgaggggagggacacaggaagtaaacggcagacacacaagaattgttatttgagctaggaaaccaagaagagtgggccaccaatagaggtgagcgtaaatataaagaacaaaacggcgaacggaaggcggcaggcgaatacaacagagcgcggagacaagggggagaaacacgcggacacaacgtgggggcaaccaactcggaggaagaaagagacgagacacaactaacgaacagcagggggggggagggaggcacaaccacaataagtgtgggagggaaaaaagaaattactcttaaacaagaaagaaatattatacaaaagaagaagtacataaaaagagggggagaaagtaatttaaaagacaagatattatctaagagtgggagttagtacaaatacgggtgggtgtgaacgcaaaagcacagatgaggatgaaaaataatagagaagtaaagaggaaaagagtaagaaaaaaaagttataggtagataaacgaagaaggagggaatattgttaactaagagtacgaacagatatctatatttacttaacgag

SEQ ID NO: 72092 - DNA, 397 bp, Homo sapiens
tgaaagtgaatctgctccaggaagccttttctgttctgactgttcaggtctgggtccttattccttcctgtgccttcttttggttcacttttcagatagagactataagatggttaaaaacaaaccatatgttgaccaccaaccaggcatgggcacagactgagcatccttaaagacattattccactagagtctcataagagttcattgagggacgtattattatccctactttataaatgatgaaattcggagtcatgacccttcataacttgatccataggcaagcaggcagtaaatgcagatgactaacaatatgcagattcaaatccaggtctgctaatataaaacccacagtcttacccagttcaccgaagtgtaaatttaaagataagtg

SEQ ID NO: 72093 - DNA, 2652 bp, Homo sapiens
tgattctctaactgcgcatgcttctgcgcacgcgcaatagacattccaggacttccgggcacttcgtaaggtttaaaaaggatgcttcgcgttttctctctcctttttggagacagattcgcagtggtcgcttcttctccttggatttgttaaggattccaagtaactcttatttggagagaagacgatctgcacttcgcattttggcattgacatttaattttagggtcctttatatagaagggagagtagctacatgaatgtgtaagatcttggaggaagacagcagagagagagagagagatcagagatcccagggttaaaagttggagaaatttcacagtacatcatccaaaagaggagtccatgatggaggcagaggtaaacttggagaggacaggaagatgtcacccaagcgcatagctaaaagaaggtcccccccagcagatgccatccccaaaagcaagaaggtgaaggtctcacacaggtcccacagcacagaacccggcttggtgctgacactaggccagggcgacgtgggccagctggggctgggtgagaatgtgatggagaggaagaagccggccctggtatccattccggaggatgttgtgcaggctgaggctgggggcatgcacaccgtgtgtctaagcaaaagtggccaggtctattccttcggctgcaatgatgagggtgccctgggaagggacacatcagtggagggctcggagatggtccctgggaaagtggagctgcaagagaaggtggtacaggtgtcagcaggagacagtcacacagcagccctcaccgatgatggccgtgtcttcctctggggctccttccgggacaataacggtgtgattggactgttggagcccatgaagaagagcatggtgcctgtgcaggtgcagctggatgtgcctgtggtaaaggtggcctcaggaaacgaccacttggtgatgctgacagctgatggtgacctctacaccttgggctgcggggaacagggccagctaggccgtgtgcctgagttatttgccaaccgtggtggccggcaaggcctcgaacgactcctggtccccaagtgtgtgatgctgaaatccaggggaagccggggccacgtgagattccaggatgccttttgtggtgcctatttcacctttgccatctcccatgagggccacgtgtacggcttcggcctctccaactaccatcagcttggaactccgggcacagaatcttgcttcataccccagaacctaacatccttcaagaattccaccaagtcctgggtgggcttctctggtggccagcaccatacagtctgcatggattcggaaggaaaagcatacagcctgggccgggctgagtatgggcggctgggccttggagagggtgctgaggagaagagcatacccaccctcatctccaggctgcctgctgtctcctcggtggcttgtggggcctctgtggggtatgctgtgaccaaggatggtcgtgttttcgcctggggcatgggcaccaactaccagctgggcacagggcaggatgaggacgcctggagccctgtggagatgatgggcaaacagctggagaaccgtgtggtcttatctgtgtccagcgggggccagcatacagtcttattagtcaaggacaaagaacagagctgatgaagcctctgagggcctggcttctgtcctgcacaacctccctcacagaacagggaagcagtgacagctgcagatggcagcgggcctctccccagccctgagcactgtgtcagttcctgccttttctcatcagcagaacagaatccttttcctcttttccttcctcctctttggaattttcctgggacctacagaataaagggggggatggacagggggttttcaaaaggaacatggctcactcagagctatatggttagacgtttctccccttttccctaccttccatggtcctggttggccctggctttgcctactagaaaaccaaaacttcccccctggggttttgtgcccactctctgagaagttggggctccatcaagccccattctagtcatgtgcccctttcctgtccctaacagtccacaggcaaacaaatggtacagtcataagagccatctgtcacggacccacgcccagaggaacgtgcagaaaaaagcagagctacatggctgtgggcaactataagccaaatatttggctcagaacaggtgtccatgggacaaaaaagaacgatcctccacttgaccaagaaaaaagtgattctcccagaagcacaaagcatactcttgcccctcaggtgttgcttgtgtacatcgtacccatccattcggcttcacctgcagccaacggcctggaatcgcaaagagacaccactctgggcagagcagagcagggtatggggtggggagagagggtggagggttttataaacaaacttaacagcaatattgaaaggaggtgggggattgagggagggacagagtgttggagggccagagactagtcctgagatggaaacagcaacttgtacagtggctgagaaaataggatatagttttgatttttttaattgtaaaatattttggagggagaacaaaatcttttaacattttgaataaatttagagttttataaaata

SEQ ID NO: 72094 - DNA, 2430 bp, Homo sapiens
ccagcccgggagcgcgccacatgcagatcctgggatggccgccaggggccgccgggctctttgttttcctttctcacccgggtcggggccagaggcctgcagagcgcatgctctggggcagttcgcggcccggcggggagcgccggagttccttgtggccgacgtgcaccaaggacaggaagatgtcacccaagcgcatagctaaaagaaggtcccccccagcagatgccatccccaaaagcaagaaggtgaaggtctcacacaggtcccacagcacagaacccggcttggtgctgacactaggccagggcgacgtgggccagctggggctgggtgagaatgtgatggagaggaagaagccggccctggtatccattccggaggatgttgtgcaggctgaggctgggggcatgcacaccgtgtgtctaagcaaaagtggccaggtctattccttcggctgcaatgatgagggtgccctgggaagggacacatcagtggagggctcggagatggtccctgggaaagtggagctgcaagagaaggtggtacaggtgtcagcaggagacagtcacacagcagccctcaccgatgatggccgtgtcttcctctggggctccttccgggacaataacggtgtgattggactgttggagcccatgaagaagagcatggtgcctgtgcaggtgcagctggatgtgcctgtggtaaaggtggcctcaggaaacgaccacttggtgatgctgacagctgatggtgacctctacaccttgggctgcggggaacagggccagctaggccgtgtgcctgagttatttgccaaccgtggtggccggcaaggcctcgaacgactcctggtccccaagtgtgtgatgctgaaatccaggggaagccggggccacgtgagattccaggatgccttttgtggtgcctatttcacctttgccatctcccatgagggccacgtgtacggcttcggcctctccaactaccatcagcttggaactccgggcacagaatcttgcttcataccccagaacctaacatccttcaagaattccaccaagtcctgggtgggcttctctggtggccagcaccatacagtctgcatggattcggaaggaaaagcatacagcctgggccgggctgagtatgggcggctgggccttggagagggtgctgaggagaagagcatacccaccctcatctccaggctgcctgctgtctcctcggtggcttgtggggcctctgtggggtatgctgtgaccaaggatggtcgtgttttcgcctggggcatgggcaccaactaccagctgggcacagggcaggatgaggacgcctggagccctgtggagatgatgggcaaacagctggagaaccgtgtggtcttatctgtgtccagcgggggccagcatacagtcttattagtcaaggacaaagaacagagctgatgaagcctctgagggcctggcttctgtcctgcacaacctccctcacagaacagggaagcagtgacagctgcagatggcagcgggcctctccccagccctgagcactgtgtcagttcctgccttttctcatcagcagaacagaatccttttcctcttttccttcctcctctttggaattttcctgggacctacagaataaagggggggatggacagggggttttcaaaaggaacatggctcactcagagctatatggttagacgtttctccccttttccctaccttccatggtcctggttggccctggctttgcctactagaaaaccaaaacttcccccctggggttttgtgcccactctctgagaagttggggctccatcaagccccattctagtcatgtgcccctttcctgtccctaacagtccacaggcaaacaaatggtacagtcataagagccatctgtcacggacccacgcccagaggaacgtgcagaaaaaagcagagctacatggctgtgggcaactataagccaaatatttggctcagaacaggtgtccatgggacaaaaaagaacgatcctccacttgaccaagaaaaaagtgattctcccagaagcacaaagcatactcttgcccctcaggtgttgcttgtgtacatcgtacccatccattcggcttcacctgcagccaacggcctggaatcgcaaagagacaccactctgggcagagcagagcagggtatggggtggggagagagggtggagggttttataaacaaacttaacagcaatattgaaaggaggtgggggattgagggagggacagagtgttggagggccagagactagtcctgagatggaaacagcaacttgtacagtggctgagaaaataggatatagttttgatttttttaattgtaaaatattttggagggagaacaaaatcttttaacattttgaataaatttagagttttataaaata

SEQ ID NO: 72095 - DNA, 787 bp, Homo sapiens
  misc_feature (713)..(713): n is a, c, g, or t
  misc_feature (716)..(716): n is a, c, g, or t
  misc_feature (726)..(726): n is a, c, g, or t
gggctaggtagcggaggctgggttgcggacgtgcaccaaggacaggaagatgtcacccaagcgcatagctaaaagaaggtcccccccagcagatgccatccccaaaagcaagaaggtgaaggtctcacacaggtcccacagcacagaacccggcttggtgctgacactaggccagggcgacgtgggccagctggggctgggtgagaatgtgatggagaggaagaagccggccctggtatccattccggaggatgttgtgcaggctgaggctgggggcatgcacaccgtgtgtctaagcaaaagtggccaggtctattccttcggctgcaatgatgagggtgccctgggaagggacacatcagtggagggctcggagatggtccctgggaaagtggagctgcaagagaaggtggtacaggtgtcagcaggagacagtcacacagcagccctcaccgatgatggccgtgtcttcctctggggctccttccgggacaataacggtgtgattggactgttggagcccatgaagaagagcatggtgcctgtgcaggtgcagctggatgtgcctgtggtaaaggtggcctcaggaaacgaccacttggtgatgctgacagctgatggtgacctctacaccttgggctgcggggaacagggccagctaggccgtgtgcctgagttatttgccaaccgtggtggccggcaaggcctcgaangantctggtcccnatgtgtgttgtctaattccggaaaccggggccctgaaatccggagcctgggggccatactt

SEQ ID NO: 72096 - DNA, 730 bp, Homo sapiens
agggaacagccttcagctcatgcctagggatttcctggtcctgctgtaactacatagatctcacctgagtaaagtgatttttttctgaaccagtggttctagtatgttttcaatccatattctcaggtgggtttgggtaactgcagtgctgggcaggaaatgaatgaatttctattgacttgcaaggtagaggtgaagcaaagctgtcagtaggtgttcaggtcccactctgctaaacttcagcttgcaatacccctttcttagactttccaaacaggcacttctggccttgttctttgtgtaggcagacagtattggttgcctatcttaggagtactagactgggtttgaatcctgatcccaccacttgctgttcatgagactttgggtgagttactcagcccctctgcctcaatttcatgttcacaaaataagtgataaactacctcatagagttgtaataaggacaaaggagttggtatttgtgaaaagattcttagggtctctagatggagtgcagcagcatgatcacttattaaataacattcttttgtgacttctcaggaaccaaggatacagtatccaattttttgttttttgtttttttttttttttgagagggagtctcgctctgtcgcccaggctggagtgcagtggcacaatctcagctcactgcaagctcagcctccccagcagctgggactacaggtgcacgccgccacacccggct

SEQ ID NO: 72097 - DNA, 379 bp, Homo sapiens
ctccctttcacgtgaataatgtgctcagttcttaatctccacaaaaatcctgtgagagaggtcatttgtgtccccatttcacagatgacaaaacttagaaagttcatactaacagtctgtggcagagcaggggcttctgcacaggttgtctgatcccagagcctgtgacctctcctcgctgtcgtcatcctctacactcagggtctatcttcttcacccttcagtctcacacaggtcccacagcacagaacccggcttggtgggtctggcaaggagattgtgtgggaagagaagggaggatgtgatagataggaaatgtagcttcagaatcaggcagataggcctggcttgcttttctacgctgccctttacctgctgt

SEQ ID NO: 72098 - DNA, 3851 bp, Homo sapiens
tgattctctaactgcgcatgcttctgcgcacgcgcaatagacattccaggacttccgggcacttcgtaaggtttaaaaaggatgcttcgcgttttctctctcctttttggagacagattcgcagtggtcgcttcttctccttggatttgttaaggattccaagtaactcttatttggagagaagacgatctgcacttcgcattttggcattgacatttaattttagggtcctttatatagaagggagagtaggtaaactgatttttttttttaacagggagggtttgacaatctttggcagacttggagcaaaagattgaggtgcatttcatgcctccttttgagagtcttgctctgtcgcccaggctgtagtgcagtggcgcaatcttggctgcaacctcagcctcccaagtagctgggattacaaacataagccaccacgcccagccctcatacctcttttaaaagtcgacctgttttgcagaaagtctgctgtttttgtactaaaggctttggaatttggcatttagctaggaatgcacattctttcacctcattcatactttaagaaccacagaagtgactctgcttggccagaaggcacactgtgttggtggttatattaaaagtccttgagtattttgcttttcatgatcttgctcactgcaacttccgcctcccaggttcaggcgattctcctgcctcagcctcccaagtagctgcgactacaggcgtgtagcaccacacctggctaatttttgtatttttagtagagatgaggtttcaccatattggccaggctgttctcaactcctgacctcgtgatccgcccacctcagcctcctaaagtgctgggattacagctgtgagccaccctgcccggccacttttgtatgatttctaatgtatttgtaatttacctaacaaattgcctaatctgctatgttaatgtatttatgaattaaaataaatacgactgcatgtttgtggttcatttttgtggaggtggctgtggtgacatcagccaagaatctgaatggtactgttgaaggaaactagcatgatagcttcagttctaaaggccctgaaacctagtctcaggtgggtcccccttgggttcactttatattggcagtttattgggaaaatggatattaggtcctgaccaataggaccgtaagtctgggttgagtgcaagatgagttagaccgattctttagcttcctgcagtgtagtggaggaaaaatcgatggtagcaacgggaggttgtatccctagctgatgagttgtatgagcctctactacctggcgcacctccgcctgaagattgccagaattgcttgcctcatgacgtgagtcacaatggaaactttgtcaagccccctgcactggctgccaacataaatgttcagtaccctgaaggatgggactgaagggggatcatctagaagctacatgaatgtgtaagatcttggaggaagacagcagagagagagagagagatcagagatcccagggttaaaagttggagaaatttcacagtacatcatccaaaagaggagtccatgatggaggcagaggtaaacttggagaggacaggaagatgtcacccaagcgcatagctaaaagaaggtcccccccagcagatgccatccccaaaagcaagaaggtgaaggtctcacacaggtcccacagcacagaacccggcttggtgctgacactaggccagggcgacgtgggccagctggggctgggtgagaatgtgatggagaggaagaagccggccctggtatccattccggaggatgttgtgcaggctgaggctgggggcatgcacaccgtgtgtctaagcaaaagtggccaggtctattccttcggctgcaatgatgagggtgccctgggaagggacacatcagtggagggctcggagatggtccctgggaaagtggagctgcaagagaaggtggtacaggtgtcagcaggagacagtcacacagcagccctcaccgatgatggccgtgtcttcctctggggctccttccgggacaataacggtgtgattggactgttggagcccatgaagaagagcatggtgcctgtgcaggtgcagctggatgtgcctgtggtaaaggtggcctcaggaaacgaccacttggtgatgctgacagctgatggtgacctctacaccttgggctgcggggaacagggccagctaggccgtgtgcctgagttatttgccaaccgtggtggccggcaaggcctcgaacgactcctggtccccaagtgtgtgatgctgaaatccaggggaagccggggccacgtgagattccaggatgccttttgtggtgcctatttcacctttgccatctcccatgagggccacgtgtacggcttcggcctctccaactaccatcagcttggaactccgggcacagaatcttgcttcataccccagaacctaacatccttcaagaattccaccaagtcctgggtgggcttctctggtggccagcaccatacagtctgcatggattcggaaggaaaagcatacagcctgggccgggctgagtatgggcggctgggccttggagagggtgctgaggagaagagcatacccaccctcatctccaggctgcctgctgtctcctcggtggcttgtggggcctctgtggggtatgctgtgaccaaggatggtcgtgttttcgcctggggcatgggcaccaactaccagctgggcacagggcaggatgaggacgcctggagccctgtggagatgatgggcaaacagctggagaaccgtgtggtcttatctgtgtccagcgggggccagcatacagtcttattagtcaaggacaaagaacagagctgatgaagcctctgagggcctggcttctgtcctgcacaacctccctcacagaacagggaagcagtgacagctgcagatggcagcgggcctctccccagccctgagcactgtgtcagttcctgccttttctcatcagcagaacagaatccttttcctcttttccttcctcctctttggaattttcctgggacctacagaataaagggggggatggacagggggttttcaaaaggaacatggctcactcagagctatatggttagacgtttctccccttttccctaccttccatggtcctggttggccctggctttgcctactagaaaaccaaaacttcccccctggggttttgtgcccactctctgagaagttggggctccatcaagccccattctagtcatgtgcccctttcctgtccctaacagtccacaggcaaacaaatggtacagtcataagagccatctgtcacggacccacgcccagaggaacgtgcagaaaaaagcagagctacatggctgtgggcaactataagccaaatatttggctcagaacaggtgtccatgggacaaaaaagaacgatcctccacttgaccaagaaaaaagtgattctcccagaagcacaaagcatactcttgcccctcaggtgttgcttgtgtacatcgtacccatccattcggcttcacctgcagccaacggcctggaatcgcaaagagacaccactctgggcagagcagagcagggtatggggtggggagagagggtggagggttttataaacaaacttaacagcaatattgaaaggaggtgggggattgagggagggacagagtgttggagggccagagactagtcctgagatggaaacagcaacttgtacagtggctgagaaaataggatatagttttgatttttttaattgtaaaatattttggagggagaacaaaatcttttaacattttgaataaatttagagttttataaaata

SEQ ID NO: 72099 - DNA, 4325 bp, Homo sapiens
  misc_feature (4315)..(4315): n is a, c, g, or t
tgattctctaactgcgcatgcttctgcgcacgcgcaatagacattccaggacttccgggcacttcgtaaggtttaaaaaggatgcttcgcgttttctctctcctttttggagacagattcgcagtggtcgcttcttctccttggatttgttaaggattccaagtaactcttatttggagagaagacgatctgcacttcgcattttggcattgacatttaattttagggtcctttatatagaagggagagtaggtaaactgatttttttttttaacagggagggtttgacaatctttggcagacttggagcaaaagattgaggtgcatttcatgcctccttttgagagtcttgctctgtcgcccaggctgtagtgcagtggcgcaatcttggctgcaacctcagcctcccaagtagctgggattacaaacataagccaccacgcccagccctcatacctcttttaaaagtcgacctgttttgcagaaagtctgctgtttttgtactaaaggctttggaatttggcatttagctaggaatgcacattctttcacctcattcatactttaagaaccacagaagtgactctgcttggccagaaggcacactgtgttggtggttatattaaaagtccttgagtattttgcttttcatgatcttgctcactgcaacttccgcctcccaggttcaggcgattctcctgcctcagcctcccaagtagctgcgactacaggcgtgtagcaccacacctggctaatttttgtatttttagtagagatgaggtttcaccatattggccaggctgttctcaactcctgacctcgtgatccgcccacctcagcctcctaaagtgctgggattacagctgtgagccaccctgcccggccacttttgtatgatttctaatgtatttgtaatttacctaacaaattgcctaatctgctatgttaatgtatttatgaattaaaataaatacgactgcatgtttgtggttcatttttgtggaggtggctgtggtgacatcagccaagaatctgaatggtactgttgaaggaaactagcatgatagcttcagttctaaaggccctgaaacctagtctcaggtgggtcccccttgggttcactttatattggcagtttattgggaaaatggatattaggtcctgaccaataggaccgtaagtctgggttgagtgcaagatgagttagaccgattctttagcttcctgcagtgtagtggaggaaaaatcgatggtagcaacgggaggttgtatccctagctgatgagttgtatgagcctctactacctggcgcacctccgcctgaagattgccagaattgcttgcctcatgacgtgagtcacaatggaaactttgtcaagccccctgcactggctgccaacataaatgttcagtaccctgaaggatgggactgaagggggatcatctagaagctacatgaatgtgtaagatcttggaggaagacagcagagagagagagagagatcagagatcccagggttaaaagttggagaaatttcacagtacatcatccaaaagaggagtccatgatggaggcagaggtaaacttggagaggacaggaagatgtcacccaagcgcatagctaaaagaaggtcccccccagcagatgccatccccaaaagcaagaaggtgaaggtctcacacaggtcccacagcacagaacccggcttggtgctgacactaggccagggcgacgtgggccagctggggctgggtgagaatgtgatggagaggaagaagccggccctggtatccattccggaggatgttgtgcaggctgaggctgggggcatgcacaccgtgtgtctaagcaaaagtggccaggtctattccttcggctgcaatgatgagggtgccctgggaagggacacatcagtggagggctcggagatggtccctgggaaagtggagctgcaagagaaggtggtacaggtgtcagcaggagacagtcacacagcagccctcaccgatgatggccgtgtcttcctctggggctccttccgggacaataacggtgtgattggactgttggagcccatgaagaagagcatggtgcctgtgcaggtgcagctggatgtgcctgtggtaaaggtggcctcaggaaacgaccacttggtgatgctgacagctgatggtgacctctacaccttgggctgcggggaacagggccagctaggccgtgtgcctgagttatttgccaaccgtggtggccggcaaggcctcgaacgactcctggtccccaagtgtgtgatgctgaaatccaggggaagccggggccacgtgagattccaggatgccttttgtggtgcctatttcacctttgccatctcccatgagggccacgtgtacggcttcggcctctccaactaccatcagcttggaactccgggcacagaatcttgcttcataccccagaacctaacatccttcaagaattccaccaagtcctgggtgggcttctctggtggccagcaccatacagtctgcatggattcggaaggaaaagcatacagcctgggccgggctgagtatgggcggctgggccttggagagggtgctgaggagaagagcatacccaccctcatctccaggctgcctgctgtctcctcggtggcttgtggggcctctgtggggtatgctgtgaccaaggatggtcgtgttttcgcctggggcatgggcaccaactaccagctgggcacagggcaggatgaggacgcctggagccctgtggagatgatgggcaaacagctggagaaccgtgtggtcttatctgtgtccagcgggggccagcatacagtcttattagtcaaggacaaagaacagagctgatgaagcctctgagggcctggcttctgtcctgcacaacctccctcacagaacagggaagcagtgacagctgcagatggcagcgggcctctccccagccctgagcactgtgtcagttcctgccttttctcatcagcagaacagaatccttttcctcttttccttcctcctctttggaattttcctgggacctacagaataaagggggggatggacagggggttttcaaaaggaacatggctcactcagagctatatggttagacgtttctccccttttccctaccttccatggtcctggttggccctggctttgcctactagaaaaccaaaacttcccccctggggttttgtgcccactctctgagaagttggggctccatcaagccccattctagtcatgtgcccctttcctgtccctaacagtccacaggcaaacaaatggtacagtcataagagccatctgtcacggacccacgcccagaggaacgtgcagaaaaaagcagagctacatggctgtgggcaactataagccaaatatttggctcagaacaggtgtccatgggacaaaaaagaacgatcctccacttgaccaagaaaaaagtgattctcccagaagcacaaagcatactcttgcccctcaggtgttgcttgtgtacatcgtacccatccattcggcttcacctgcagccaacggcctggaatcgcaaagagacaccactctgggcagagcagagcagggtatggggtggggagagagggtggagggttttataaacaaacttaacagcaatattgaaaggaggtgggggattgagggagggacagagtgttggagggccagagactagtcctgagatggaaacagcaacttgtacagtggctgagaaaataggatatagttttgatttttttaattgtaaaatattttggagggagaacaaaatcttttaacattttgaataaatttagagttttataaaataggccacttgttttctacacattccctgctttttaagggagcacatattatgtgccaggcactgctgggaaagacagaataaactataaacctggtgttgaggctacaacttaagtgatgtcaagatgtcctgaggtgccaaccagctgtcagtgtgactgtaacaaaggcttcaaatctgtcaagaagtaaggaaaagttttgtttgagttttgtttgggtatttctgttttgggagtcactggattatttttaaatgctgcatagtacaatagaggcagggtggatcttttaataccaaaccaaaaaaaaaaaaaaaaaaagaaattggtcgggcgtggtgccgggtgcctgtggtcccagctgctcgggaggctggggcgggagagtggcgtgaacccgggaggtggagcttgcagtgggccgagatcgcaccactctactccagtctgggcgacagagcgnactctgtctc

SEQ ID NO: 72100 - DNA, 3752 bp, Homo sapiens
tgattctctaactgcgcatgcttctgcgcacgcgcaatagacattccaggacttccgggcacttcgtaaggtttaaaaaggatgcttcgcgttttctctctcctttttggagacagattcgcagtggtcgcttcttctccttggatttgttaaggattccaagtaactcttatttggagagaagacgatctgcacttcgcattttggcattgacatttaattttagggtcctttatatagaagggagagtaggtaaactgatttttttttttaacagggagggtttgacaatctttggcagacttggagcaaaagattgaggtgcatttcatgcctccttttgagagtcttgctctgtcgcccaggctgtagtgcagtggcgcaatcttggctgcaacctcagcctcccaagtagctgggattacaaacataagccaccacgcccagccctcatacctcttttaaaagtcgacctgttttgcagaaagtctgctgtttttgtactaaaggctttggaatttggcatttagctaggaatgcacattctttcacctcattcatactttaagaaccacagaagtgactctgcttggccagaaggcacactgtgttggtggttatattaaaagtccttgagtattttgcttttcatgatcttgctcactgcaacttccgcctcccaggttcaggcgattctcctgcctcagcctcccaagtagctgcgactacaggcgtgtagcaccacacctggctaatttttgtatttttagtagagatgaggtttcaccttttgtatgatttctaatgtatttgtaatttacctaacaaattgcctaatctgctatgttaatgtatttatgaattaaaataaatacgactgcatgtttgtggttcatttttgtggaggtggctgtggtgacatcagccaagaatctgaatggtactgttgaaggaaactagcatgatagcttcagttctaaaggccctgaaacctagtctcaggtgggtcccccttgggttcactttatattggcagtttattgggaaaatggatattaggtcctgaccaataggaccgtaagtctgggttgagtgcaagatgagttagaccgattctttagcttcctgcagtgtagtggaggaaaaatcgatggtagcaacgggaggttgtatccctagctgatgagttgtatgagcctctactacctggcgcacctccgcctgaagattgccagaattgcttgcctcatgacgtgagtcacaatggaaactttgtcaagccccctgcactggctgccaacataaatgttcagtaccctgaaggatgggactgaagggggatcatctagaagctacatgaatgtgtaagatcttggaggaagacagcagagagagagagagagatcagagatcccagggttaaaagttggagaaatttcacagtacatcatccaaaagaggagtccatgatggaggcagaggtaaacttggagaggacaggaagatgtcacccaagcgcatagctaaaagaaggtcccccccagcagatgccatccccaaaagcaagaaggtgaaggtctcacacaggtcccacagcacagaacccggcttggtgctgacactaggccagggcgacgtgggccagctggggctgggtgagaatgtgatggagaggaagaagccggccctggtatccattccggaggatgttgtgcaggctgaggctgggggcatgcacaccgtgtgtctaagcaaaagtggccaggtctattccttcggctgcaatgatgagggtgccctgggaagggacacatcagtggagggctcggagatggtccctgggaaagtggagctgcaagagaaggtggtacaggtgtcagcaggagacagtcacacagcagccctcaccgatgatggccgtgtcttcctctggggctccttccgggacaataacggtgtgattggactgttggagcccatgaagaagagcatggtgcctgtgcaggtgcagctggatgtgcctgtggtaaaggtggcctcaggaaacgaccacttggtgatgctgacagctgatggtgacctctacaccttgggctgcggggaacagggccagctaggccgtgtgcctgagttatttgccaaccgtggtggccggcaaggcctcgaacgactcctggtccccaagtgtgtgatgctgaaatccaggggaagccggggccacgtgagattccaggatgccttttgtggtgcctatttcacctttgccatctcccatgagggccacgtgtacggcttcggcctctccaactaccatcagcttggaactccgggcacagaatcttgcttcataccccagaacctaacatccttcaagaattccaccaagtcctgggtgggcttctctggtggccagcaccatacagtctgcatggattcggaaggaaaagcatacagcctgggccgggctgagtatgggcggctgggccttggagagggtgctgaggagaagagcatacccaccctcatctccaggctgcctgctgtctcctcggtggcttgtggggcctctgtggggtatgctgtgaccaaggatggtcgtgttttcgcctggggcatgggcaccaactaccagctgggcacagggcaggatgaggacgcctggagccctgtggagatgatgggcaaacagctggagaaccgtgtggtcttatctgtgtccagcgggggccagcatacagtcttattagtcaaggacaaagaacagagctgatgaagcctctgagggcctggcttctgtcctgcacaacctccctcacagaacagggaagcagtgacagctgcagatggcagcgggcctctccccagccctgagcactgtgtcagttcctgccttttctcatcagcagaacagaatccttttcctcttttccttcctcctctttggaattttcctgggacctacagaataaagggggggatggacagggggttttcaaaaggaacatggctcactcagagctatatggttagacgtttctccccttttccctaccttccatggtcctggttggccctggctttgcctactagaaaaccaaaacttcccccctggggttttgtgcccactctctgagaagttggggctccatcaagccccattctagtcatgtgcccctttcctgtccctaacagtccacaggcaaacaaatggtacagtcataagagccatctgtcacggacccacgcccagaggaacgtgcagaaaaaagcagagctacatggctgtgggcaactataagccaaatatttggctcagaacaggtgtccatgggacaaaaaagaacgatcctccacttgaccaagaaaaaagtgattctcccagaagcacaaagcatactcttgcccctcaggtgttgcttgtgtacatcgtacccatccattcggcttcacctgcagccaacggcctggaatcgcaaagagacaccactctgggcagagcagagcagggtatggggtggggagagagggtggagggttttataaacaaacttaacagcaatattgaaaggaggtgggggattgagggagggacagagtgttggagggccagagactagtcctgagatggaaacagcaacttgtacagtggctgagaaaataggatatagttttgatttttttaattgtaaaatattttggagggagaacaaaatcttttaacattttgaataaatttagagttttataaaata

SEQ ID NO: 72101 - DNA, 3745 bp, Homo sapiens
gcttttggagacagattcgcagggtcgcttcttctcctggattgttaaggattccaagtaactcttattggagagaagacgatctgcacttcgcattttggcattgacatttaattttagggtcctttatatagaagggagagtaggtaaactgatttttttttttaacagggagggtttgacaatctttggcagacttggagcaaaagattgaggtgcatttcatgcctccttttgagagtcttgctctgtcgcccaggctgtagtgcagtggcgcaatcttggctgcaacctcagcctcccaagtagctgggattacaaacataagccaccacgcccagccctcatacctcttttaaaagtcgacctgttttgcagaaagtctgctgtttttgtactaaaggctttggaatttggcatttagctaggaatgcacattctttcacctcattcatactttaagaaccacagaagtgactctgcttggccagaaggcacactgtgttggtggttatattaaaagtccttgagtattttgcttttcatgatcttgctcactgcaacttccgcctcccaggttcaggcgattctcctgcctcagcctcccaagtagctgcgactacaggcgtgtagcaccacacctggctaatttttgtatttttagtagagatgaggtttcaccatattggccaggctgttctcaactcctgacctcgtgatccgcccacctcagcctcctaaagtgctgggattacagctgtgagccaccctgcccggccacttttgtatgatttctaatgtatttgtaatttacctaacaaattgcctaatctgctatgttaatgtatttatgaattaaaataaatacgactgcatgtttgtggttcatttttgtggaggtggctgtggtgacatcagccaagaatctgaatggtactgttgaaggaaactagcatgatagcttcagttctaaaggccctgaaacctagtctcaggtgggtcccccttgggttcactttatattggcagtttattgggaaaatggatattaggtcctgaccaataggaccgtaagtctgggttgagtgcaagatgagttagaccgattctttagcttcctgcagtgtagtggaggaaaaatcgatggtagcaacgggaggttgtatccctagctgatgagttgtatgagcctctactacctggcgcacctccgcctgaagattgccagaattgcttgcctcatgacgtgagtcacaatggaaactttgtcaagccccctgcactggctgccaacataaatgttcagtaccctgaaggatgggactgaagggggatcatctagaagctacatgaatgtgtaagatcttggaggaagacagcagagagagagagagagatcagagatcccagggttaaaagttggagaaatttcacagtacatcatccaaaagaggagtccatgatggaggcagaggtaaacttggagaggacaggaagatgtcacccaagcgcatagctaaaagaaggtcccccccagcagatgccatccccaaaagcaagaaggtgaaggtctcacacaggtcccacagcacagaacccggcttggtgctgacactaggccagggcgacgtgggccagctggggctgggtgagaatgtgatggagaggaagaagccggccctggtatccattccggaggatgttgtgcaggctgaggctgggggcatgcacaccgtgtgtctaagcaaaagtggccaggtctattccttcggctgcaatgatgagggtgccctgggaagggacacatcagtggagggctcggagatggtccctgggaaagtggagctgcaagagaaggtggtacaggtgtcagcaggagacagtcacacagcagccctcaccgatgatggccgtgtcttcctctggggctccttccgggacaataacggtgtgattggactgttggagcccatgaagaagagcatggtgcctgtgcaggtgcagctggatgtgcctgtggtaaaggtggcctcaggaaacgaccacttggtgatgctgacagctgatggtgacctctacaccttgggctgcggggaacagggccagctaggccgtgtgcctgagttatttgccaaccgtggtggccggcaaggcctcgaacgactcctggtccccaagtgtgtgatgctgaaatccaggggaagccggggccacgtgagattccaggatgccttttgtggtgcctatttcacctttgccatctcccatgagggccacgtgtacggcttcggcctctccaactaccatcagcttggaactccgggcacagaatcttgcttcataccccagaacctaacatccttcaagaattccaccaagtcctgggtgggcttctctggtggccagcaccatacagtctgcatggattcggaaggaaaagcatacagcctgggccgggctgagtatgggcggctgggccttggagagggtgctgaggagaagagcatacccaccctcatctccaggctgcctgctgtctcctcggtggcttgtggggcctctgtggggtatgctgtgaccaaggatggtcgtgttttcgcctggggcatgggcaccaactaccagctgggcacagggcaggatgaggacgcctggagccctgtggagatgatgggcaaacagctggagaaccgtgtggtcttatctgtgtccagcgggggccagcatacagtcttattagtcaaggacaaagaacagagctgatgaagcctctgagggcctggcttctgtcctgcacaacctccctcacagaacagggaagcagtgacagctgcagatggcagcgggcctctccccagccctgagcactgtgtcagttcctgccttttctcatcagcagaacagaatccttttcctcttttccttcctcctctttggaattttcctgggacctacagaataaagggggggatggacagggggttttcaaaaggaacatggctcactcagagctatatggttagacgtttctccccttttccctaccttccatggtcctggttggccctggctttgcctactagaaaaccaaaacttcccccctggggttttgtgcccactctctgagaagttggggctccatcaagccccattctagtcatgtgcccctttcctgtccctaacagtccacaggcaaacaaatggtacagtcataagagccatctgtcacggacccacgcccagaggaacgtgcagaaaaaagcagagctacatggctgtgggcaactataagccaaatatttggctcagaacaggtgtccatgggacaaaaaagaacgatcctccacttgaccaagaaaaaagtgattctcccagaagcacaaagcatactcttgcccctcaggtgttgcttgtgtacatcgtacccatccattcggcttcacctgcagccaacggcctggaatcgcaaagagacaccactctgggcagagcagagcagggtatggggtggggagagagggtggagggttttataaacaaacttaacagcaatattgaaaggaggtgggggattgagggagggacagagtgttggagggccagagactagtcctgagatggaaacagcaacttgtacagtggctgagaaaataggatatagttttgatttttttaattgtaaaatattttggagggagaacaaaatcttttaacattttgaataaatttagagttttataaaata

SEQ ID NO: 72102 - DNA, 3944 bp, Homo sapiens
tgattctctaactgcgcatgcttctgcgcacgcgcaatagacattccaggacttccgggcacttcgtaaggtttaaaaaggatgcttcgcgttttctctctcctttttggagacagattcgcagtggtcgcttcttctccttggatttgttaaggattccaagtaactcttatttggagagaagacgatctgcacttcgcattttggcattgacatttaattttagggtcctttatatagaagggagagtaggtaaactgatttttttttttaacagggagggtttgacaatctttggcagacttggagcaaaagattgaggtgcatttcatgcctccttttgagagtcttgctctgtcgcccaggctgtagtgcagtggcgcaatcttggctgcaacctcagcctcccaagtagctgggattacaaacataagccaccacgcccagccctcatacctcttttaaaagtcgacctgttttgcagaaagtctgctgtttttgtactaaaggctttggaatttggcatttagctaggaatgcacattctttcacctcattcatactttaagaaccacagaagtgactctgcttggccagaaggcacactgtgttggtggttatattaaaagtccttgagtattttgcttttcatgatcttgctcactgcaacttccgcctcccaggttcaggcgattctcctgcctcagcctcccaagtagctgcgactacaggcgtgtagcaccacacctggctaatttttgtatttttagtagagatgaggtttcaccatattggccaggctgttctcaactcctgacctcgtgatccgcccacctcagcctcctaaagtgctgggattacagctgtgagccaccctgcccggccacttttgtatgatttctaatgtatttgtaatttacctaacaaattgcctaatctgctatgttaatgtatttatgaattaaaataaatacgactgcatgtttgtggttcatttttgtggaggtggctgtggtgacatcagccaagaatctgaatggtactgttgaaggaaactagcatgatagcttcagttctaaaggccctgaaacctagtctcaggtgggtcccccttgggttcactttatattggcagtttattgggaaaatggatattaggtcctgaccaataggaccgtaagtctgggttgagtgcaagatgagttagaccgattctttagcttcctgcagtgtagtggaggaaaaatcgatggtagcaacgggaggttgtatccctagctgatgagttgtatgagcctctactacctggcgcacctccgcctgaagattgccagaattgcttgcctcatgacgtgagtcacaatggaaactttgtcaagccccctgcactggctgccaacataaatgttcagtaccctgaaggatgggactgaagggggatcatctagaagctacatgaatgtgtaagatcttggaggaagacagcagagagagagagagagatcagagatcccagggttaaaagttggagaaatttcacagtacatcatccaaaagaggagtccatgatggaggcagaggtaaacttggagaggacaggaagatgtcacccaagcgcatagctaaaagaaggtcccccccagcagatgccatccccaaaagcaagaaggtgaaggacacgagggccgctgcctcccgccgcgttcctggcgcccgctcctgccaaggtgcctgcgggccgagccctcctgaccagaaaacccgaccagtctcacacaggtcccacagcacagaacccggcttggtgctgacactaggccagggcgacgtgggccagctggggctgggtgagaatgtgatggagaggaagaagccggccctggtatccattccggaggatgttgtgcaggctgaggctgggggcatgcacaccgtgtgtctaagcaaaagtggccaggtctattccttcggctgcaatgatgagggtgccctgggaagggacacatcagtggagggctcggagatggtccctgggaaagtggagctgcaagagaaggtggtacaggtgtcagcaggagacagtcacacagcagccctcaccgatgatggccgtgtcttcctctggggctccttccgggacaataacggtgtgattggactgttggagcccatgaagaagagcatggtgcctgtgcaggtgcagctggatgtgcctgtggtaaaggtggcctcaggaaacgaccacttggtgatgctgacagctgatggtgacctctacaccttgggctgcggggaacagggccagctaggccgtgtgcctgagttatttgccaaccgtggtggccggcaaggcctcgaacgactcctggtccccaagtgtgtgatgctgaaatccaggggaagccggggccacgtgagattccaggatgccttttgtggtgcctatttcacctttgccatctcccatgagggccacgtgtacggcttcggcctctccaactaccatcagcttggaactccgggcacagaatcttgcttcataccccagaacctaacatccttcaagaattccaccaagtcctgggtgggcttctctggtggccagcaccatacagtctgcatggattcggaaggaaaagcatacagcctgggccgggctgagtatgggcggctgggccttggagagggtgctgaggagaagagcatacccaccctcatctccaggctgcctgctgtctcctcggtggcttgtggggcctctgtggggtatgctgtgaccaaggatggtcgtgttttcgcctggggcatgggcaccaactaccagctgggcacagggcaggatgaggacgcctggagccctgtggagatgatgggcaaacagctggagaaccgtgtggtcttatctgtgtccagcgggggccagcatacagtcttattagtcaaggacaaagaacagagctgatgaagcctctgagggcctggcttctgtcctgcacaacctccctcacagaacagggaagcagtgacagctgcagatggcagcgggcctctccccagccctgagcactgtgtcagttcctgccttttctcatcagcagaacagaatccttttcctcttttccttcctcctctttggaattttcctgggacctacagaataaagggggggatggacagggggttttcaaaaggaacatggctcactcagagctatatggttagacgtttctccccttttccctaccttccatggtcctggttggccctggctttgcctactagaaaaccaaaacttcccccctggggttttgtgcccactctctgagaagttggggctccatcaagccccattctagtcatgtgcccctttcctgtccctaacagtccacaggcaaacaaatggtacagtcataagagccatctgtcacggacccacgcccagaggaacgtgcagaaaaaagcagagctacatggctgtgggcaactataagccaaatatttggctcagaacaggtgtccatgggacaaaaaagaacgatcctccacttgaccaagaaaaaagtgattctcccagaagcacaaagcatactcttgcccctcaggtgttgcttgtgtacatcgtacccatccattcggcttcacctgcagccaacggcctggaatcgcaaagagacaccactctgggcagagcagagcagggtatggggtggggagagagggtggagggttttataaacaaacttaacagcaatattgaaaggaggtgggggattgagggagggacagagtgttggagggccagagactagtcctgagatggaaacagcaacttgtacagtggctgagaaaataggatatagttttgatttttttaattgtaaaatattttggagggagaacaaaatcttttaacattttgaataaatttagagttttataaaata

SEQ ID NO: 72103 - DNA, 3902 bp, Homo sapiens
tgattctctaactgcgcatgcttctgcgcacgcgcaatagacattccaggacttccgggcacttcgtaaggtttaaaaaggatgcttcgcgttttctctctcctttttggagacagattcgcagtggtcgcttcttctccttggatttgttaaggattccaagtaactcttatttggagagaagacgatctgcacttcgcattttggcattgacatttaattttagggtcctttatatagaagggagagtaggtaaactgatttttttttttaacagggagggtttgacaatctttggcagacttggagcaaaagattgaggtgcatttcatgcctccttttgagagtcttgctctgtcgcccaggctgtagtgcagtggcgcaatcttggctgcaacctcagcctcccaagtagctgggattacaaacataagccaccacgcccagccctcatacctcttttaaaagtcgacctgttttgcagaaagtctgctgtttttgtactaaaggctttggaatttggcatttagctaggaatgcacattctttcacctcattcatactttaagaaccacagaagtgactctgcttggccagaaggcacactgtgttggtggttatattaaaagtccttgagtattttgcttttcatgatcttgctcactgcaacttccgcctcccaggttcaggcgattctcctgcctcagcctcccaagtagctgcgactacaggcgtgtagcaccacacctggctaatttttgtatttttagtagagatgaggtttcaccatattggccaggctgttctcaactcctgacctcgtgatccgcccacctcagcctcctaaagtgctgggattacagctgtgagccaccctgcccggccacttttgtatgatttctaatgtatttgtaatttacctaacaaattgcctaatctgctatgttaatgtatttatgaattaaaataaatacgactgcatgtttgtggttcatttttgtggaggtggctgtggtgacatcagccaagaatctgaatggtactgttgaaggaaactagcatgatagcttcagttctaaaggccctgaaacctagtctcaggtgggtcccccttgggttcactttatattggcagtttattgggaaaatggatattaggtcctgaccaataggaccgtaagtctgggttgagtgcaagatgagttagaccgattctttagcttcctgcagtgtagtggaggaaaaatcgatggtagcaacgggaggttgtatccctagctgatgagttgtatgagcctctactacctggcgcacctccgcctgaagattgccagaattgcttgcctcatgacgtgagtcacaatggaaactttgtcaagccccctgcactggctgccaacataaatgttcagtaccctgaaggatgggactgaagggggatcatctagaagctacatgaatgtgtaagatcttggaggaagacagcagagagagagagagagatcagagatcccagggttaaaagttggagaaatttcacagtacatcatccaaaagaggagtccatgatggaggcagaggtaaacttggagaggacaggaagatgtcacccaagcgcatagctaaaagaaggtcccccccagcagatgccatccccaaaagcaagaaggtgaaggacacgagggccgctgcctcccgccgcgttcctggcgcccgctcctgccaagtctcacacaggtcccacagcacagaacccggcttggtgctgacactaggccagggcgacgtgggccagctggggctgggtgagaatgtgatggagaggaagaagccggccctggtatccattccggaggatgttgtgcaggctgaggctgggggcatgcacaccgtgtgtctaagcaaaagtggccaggtctattccttcggctgcaatgatgagggtgccctgggaagggacacatcagtggagggctcggagatggtccctgggaaagtggagctgcaagagaaggtggtacaggtgtcagcaggagacagtcacacagcagccctcaccgatgatggccgtgtcttcctctggggctccttccgggacaataacggtgtgattggactgttggagcccatgaagaagagcatggtgcctgtgcaggtgcagctggatgtgcctgtggtaaaggtggcctcaggaaacgaccacttggtgatgctgacagctgatggtgacctctacaccttgggctgcggggaacagggccagctaggccgtgtgcctgagttatttgccaaccgtggtggccggcaaggcctcgaacgactcctggtccccaagtgtgtgatgctgaaatccaggggaagccggggccacgtgagattccaggatgccttttgtggtgcctatttcacctttgccatctcccatgagggccacgtgtacggcttcggcctctccaactaccatcagcttggaactccgggcacagaatcttgcttcataccccagaacctaacatccttcaagaattccaccaagtcctgggtgggcttctctggtggccagcaccatacagtctgcatggattcggaaggaaaagcatacagcctgggccgggctgagtatgggcggctgggccttggagagggtgctgaggagaagagcatacccaccctcatctccaggctgcctgctgtctcctcggtggcttgtggggcctctgtggggtatgctgtgaccaaggatggtcgtgttttcgcctggggcatgggcaccaactaccagctgggcacagggcaggatgaggacgcctggagccctgtggagatgatgggcaaacagctggagaaccgtgtggtcttatctgtgtccagcgggggccagcatacagtcttattagtcaaggacaaagaacagagctgatgaagcctctgagggcctggcttctgtcctgcacaacctccctcacagaacagggaagcagtgacagctgcagatggcagcgggcctctccccagccctgagcactgtgtcagttcctgccttttctcatcagcagaacagaatccttttcctcttttccttcctcctctttggaattttcctgggacctacagaataaagggggggatggacagggggttttcaaaaggaacatggctcactcagagctatatggttagacgtttctccccttttccctaccttccatggtcctggttggccctggctttgcctactagaaaaccaaaacttcccccctggggttttgtgcccactctctgagaagttggggctccatcaagccccattctagtcatgtgcccctttcctgtccctaacagtccacaggcaaacaaatggtacagtcataagagccatctgtcacggacccacgcccagaggaacgtgcagaaaaaagcagagctacatggctgtgggcaactataagccaaatatttggctcagaacaggtgtccatgggacaaaaaagaacgatcctccacttgaccaagaaaaaagtgattctcccagaagcacaaagcatactcttgcccctcaggtgttgcttgtgtacatcgtacccatccattcggcttcacctgcagccaacggcctggaatcgcaaagagacaccactctgggcagagcagagcagggtatggggtggggagagagggtggagggttttataaacaaacttaacagcaatattgaaaggaggtgggggattgagggagggacagagtgttggagggccagagactagtcctgagatggaaacagcaacttgtacagtggctgagaaaataggatatagttttgatttttttaattgtaaaatattttggagggagaacaaaatcttttaacattttgaataaatttagagttttataaaata

SEQ ID NO: 72104 - DNA, 3848 bp, Homo sapiens
ccagaagtgtattttccctcatttaagtggacctttcaaacaataatattttaaaattatatctgataggcccactcctaatccacccagtgctaattcccccaaccttcctgtaagtcagttaactcacgtccccccaatattatattaccccatttctcatcagacctactgtgattaaaaaaccgaaataatggagaaagccacatctggcacctgtcaatttttatggaagttgtttatataaattttaaatggcttaaaatcaccagatgcgaatttttcactatgatactttataacttgtactttctttgttctttctgtctttttttgagatggagtcttgctctgtcgcccaggctgtagtgcagtggcgcaatcttggctgcaacctcagcctcccaagtagctgggattacaaacataagccaccacgcccagccctcatacctcttttaaaagtcgacctgttttgcagaaagtctgctgtttttgtactaaaggctttggaatttggcatttagctaggaatgcacattctttcacctcattcatactttaagaaccacagaagtgactctgcttggccagaaggcacactgtgttggtggttatattaaaagtccttgagtattttgcttttcatgatcttgctcactgcaacttccgcctcccaggttcaggcgattctcctgcctcagcctcccaagtagctgcgactacaggcgtgtagcaccacacctggctaatttttgtatttttagtagagatgaggtttcaccatattggccaggctgttctcaactcctgacctcgtgatccgcccacctcagcctcctaaagtgctgggattacagctgtgagccaccctgcccggccacttttgtatgatttctaatgtatttgtaatttacctaacaaattgcctaatctgctatgttaatgtatttatgaattaaaataaatacgactgcatgtttgtggttcatttttgtggaggtggctgtggtgacatcagccaagaatctgaatggtactgttgaaggaaactagcatgatagcttcagttctaaaggccctgaaacctagtctcaggtgggtcccccttgggttcactttatattggcagtttattgggaaaatggatattaggtcctgaccaataggaccgtaagtctgggttgagtgcaagatgagttagaccgattctttagcttcctgcagtgtagtggaggaaaaatcgatggtagcaacgggaggttgtatccctagctgatgagttgtatgagcctctactacctggcgcacctccgcctgaagattgccagaattgcttgcctcatgacgtgagtcacaatggaaactttgtcaagccccctgcactggctgccaacataaatgttcagtaccctgaaggatgggactgaagggggatcatctagaagctacatgaatgtgtaagatcttggaggaagacagcagagagagagagagagatcagagatcccagggttaaaagttggagaaatttcacagtacatcatccaaaagaggagtccatgatggaggcagaggtaaacttggagaggacaggaagatgtcacccaagcgcatagctaaaagaaggtcccccccagcagatgccatccccaaaagcaagaaggtgaaggtctcacacaggtcccacagcacagaacccggcttggtgctgacactaggccagggcgacgtgggccagctggggctgggtgagaatgtgatggagaggaagaagccggccctggtatccattccggaggatgttgtgcaggctgaggctgggggcatgcacaccgtgtgtctaagcaaaagtggccaggtctattccttcggctgcaatgatgagggtgccctgggaagggacacatcagtggagggctcggagatggtccctgggaaagtggagctgcaagagaaggtggtacaggtgtcagcaggagacagtcacacagcagccctcaccgatgatggccgtgtcttcctctggggctccttccgggacaataacggtgtgattggactgttggagcccatgaagaagagcatggtgcctgtgcaggtgcagctggatgtgcctgtggtaaaggtggcctcaggaaacgaccacttggtgatgctgacagctgatggtgacctctacaccttgggctgcggggaacagggccagctaggccgtgtgcctgagttatttgccaaccgtggtggccggcaaggcctcgaacgactcctggtccccaagtgtgtgatgctgaaatccaggggaagccggggccacgtgagattccaggatgccttttgtggtgcctatttcacctttgccatctcccatgagggccacgtgtacggcttcggcctctccaactaccatcagcttggaactccgggcacagaatcttgcttcataccccagaacctaacatccttcaagaattccaccaagtcctgggtgggcttctctggtggccagcaccatacagtctgcatggattcggaaggaaaagcatacagcctgggccgggctgagtatgggcggctgggccttggagagggtgctgaggagaagagcatacccaccctcatctccaggctgcctgctgtctcctcggtggcttgtggggcctctgtggggtatgctgtgaccaaggatggtcgtgttttcgcctggggcatgggcaccaactaccagctgggcacagggcaggatgaggacgcctggagccctgtggagatgatgggcaaacagctggagaaccgtgtggtcttatctgtgtccagcgggggccagcatacagtcttattagtcaaggacaaagaacagagctgatgaagcctctgagggcctggcttctgtcctgcacaacctccctcacagaacagggaagcagtgacagctgcagatggcagcgggcctctccccagccctgagcactgtgtcagttcctgccttttctcatcagcagaacagaatccttttcctcttttccttcctcctctttggaattttcctgggacctacagaataaagggggggatggacagggggttttcaaaaggaacatggctcactcagagctatatggttagacgtttctccccttttccctaccttccatggtcctggttggccctggctttgcctactagaaaaccaaaacttcccccctggggttttgtgcccactctctgagaagttggggctccatcaagccccattctagtcatgtgcccctttcctgtccctaacagtccacaggcaaacaaatggtacagtcataagagccatctgtcacggacccacgcccagaggaacgtgcagaaaaaagcagagctacatggctgtgggcaactataagccaaatatttggctcagaacaggtgtccatgggacaaaaaagaacgatcctccacttgaccaagaaaaaagtgattctcccagaagcacaaagcatactcttgcccctcaggtgttgcttgtgtacatcgtacccatccattcggcttcacctgcagccaacggcctggaatcgcaaagagacaccactctgggcagagcagagcagggtatggggtggggagagagggtggagggttttataaacaaacttaacagcaatattgaaaggaggtgggggattgagggagggacagagtgttggagggccagagactagtcctgagatggaaacagcaacttgtacagtggctgagaaaataggatatagttttgatttttttaattgtaaaatattttggagggagaacaaaatcttttaacattttgaataaatttagagttttataaaata

SEQ ID NO: 72105 - DNA, 3935 bp, Homo sapiens
tgattctctaactgcgcatgcttctgcgcacgcgcaatagacattccaggacttccgggcacttcgtaaggtttaaaaaggatgcttcgcgttttctctctcctttttggagacagattcgcagtggtcgcttcttctccttggatttgttaaggattccaagtaactcttatttggagagaagacgatctgcacttcgcattttggcattgacatttaattttagggtcctttatatagaagggagagtaggtaaactgatttttttttttaacagggagggtttgacaatctttggcagacttggagcaaaagattgaggtgcatttcatgcctccttttgagagtcttgctctgtcgcccaggctgtagtgcagtggcgcaatcttggctgcaacctcagcctcccaagtagctgggattacaaacataagccaccacgcccagccctcatacctcttttaaaagtcgacctgttttgcagaaagtctgctgtttttgtactaaaggctttggaatttggcatttagctaggaatgcacattctttcacctcattcatactttaagaaccacagaagtgactctgcttggccagaaggcacactgtgttggtggttatattaaaagtccttgagtattttgcttttcatgatcttgctcactgcaacttccgcctcccaggttcaggcgattctcctgcctcagcctcccaagtagctgcgactacaggcgtgtagcaccacacctggctaatttttgtatttttagtagagatgaggtttcaccatattggccaggctgttctcaactcctgacctcgtgatccgcccacctcagcctcctaaagtgctgggattacagctgtgagccaccctgcccggccacttttgtatgatttctaatgtatttgtaatttacctaacaaattgcctaatctgctatgttaatgtatttatgaattaaaataaatacgactgcatgtttgtggttcatttttgtggaggtggctgtggtgacatcagccaagaatctgaatggtactgttgaaggaaactagcatgatagcttcagttctaaaggccctgaaacctagtctcaggtgggtcccccttgggttcactttatattggcagtttattgggaaaatggatattaggtcctgaccaataggaccgtaagtctgggttgagtgcaagatgagttagaccgattctttagcttcctgcagtgtagtggaggaaaaatcgatggtagcaacgggaggttgtatccctagctgatgagttgtatgagcctctactacctggcgcacctccgcctgaagattgccagaattgcttgcctcatgacgtgagtcacaatggaaactttgtcaagccccctgcactggctgccaacataaatgttcagtaccctgaaggatgggactgaagggggatcatctagaagctacatgaatgtgtaagatcttggaggaagacagcagagagagagagagagatcagagatcccagggttaaaagttggagaaatttcacagtacatcatccaaaagaggagtccatgatggaggcagaggtaaacttggagaggacaggaagatgtcacccaagcgcatagctaaaagaaggtcccccccagcagatgccatccccaaaagcaagaaggtgaaggtctcacacaggtcccacagcacagaacccggcttggtgctgacactaggccagggcgacgtgggccagctggggctgggtgagaatgtgatggagaggaagaagccggccctggtatccattccggaggatgttgtgcaggctgaggctgggggcatgcacaccgtgtgtctaagcaaaagtggccaggtctattccttcggctgcaatgatgagggtgccctgggaagggacacatcagtggagggctcggagatggtccctgggaaagtggagctgcaagagaaggtggtacaggtgtcagcaggagacagtcacacagcagccctcaccgatgatggccgtgtcttcctctggggctccttccggcactgcctcttccacacttcccagaggcttggatggggcaaggaggtgtggaggcagggattgtcgcatctcagagtttccaaggacaataacggtgtgattggactgttggagcccatgaagaagagcatggtgcctgtgcaggtgcagctggatgtgcctgtggtaaaggtggcctcaggaaacgaccacttggtgatgctgacagctgatggtgacctctacaccttgggctgcggggaacagggccagctaggccgtgtgcctgagttatttgccaaccgtggtggccggcaaggcctcgaacgactcctggtccccaagtgtgtgatgctgaaatccaggggaagccggggccacgtgagattccaggatgccttttgtggtgcctatttcacctttgccatctcccatgagggccacgtgtacggcttcggcctctccaactaccatcagcttggaactccgggcacagaatcttgcttcataccccagaacctaacatccttcaagaattccaccaagtcctgggtgggcttctctggtggccagcaccatacagtctgcatggattcggaaggaaaagcatacagcctgggccgggctgagtatgggcggctgggccttggagagggtgctgaggagaagagcatacccaccctcatctccaggctgcctgctgtctcctcggtggcttgtggggcctctgtggggtatgctgtgaccaaggatggtcgtgttttcgcctggggcatgggcaccaactaccagctgggcacagggcaggatgaggacgcctggagccctgtggagatgatgggcaaacagctggagaaccgtgtggtcttatctgtgtccagcgggggccagcatacagtcttattagtcaaggacaaagaacagagctgatgaagcctctgagggcctggcttctgtcctgcacaacctccctcacagaacagggaagcagtgacagctgcagatggcagcgggcctctccccagccctgagcactgtgtcagttcctgccttttctcatcagcagaacagaatccttttcctcttttccttcctcctctttggaattttcctgggacctacagaataaagggggggatggacagggggttttcaaaaggaacatggctcactcagagctatatggttagacgtttctccccttttccctaccttccatggtcctggttggccctggctttgcctactagaaaaccaaaacttcccccctggggttttgtgcccactctctgagaagttggggctccatcaagccccattctagtcatgtgcccctttcctgtccctaacagtccacaggcaaacaaatggtacagtcataagagccatctgtcacggacccacgcccagaggaacgtgcagaaaaaagcagagctacatggctgtgggcaactataagccaaatatttggctcagaacaggtgtccatgggacaaaaaagaacgatcctccacttgaccaagaaaaaagtgattctcccagaagcacaaagcatactcttgcccctcaggtgttgcttgtgtacatcgtacccatccattcggcttcacctgcagccaacggcctggaatcgcaaagagacaccactctgggcagagcagagcagggtatggggtggggagagagggtggagggttttataaacaaacttaacagcaatattgaaaggaggtgggggattgagggagggacagagtgttggagggccagagactagtcctgagatggaaacagcaacttgtacagtggctgagaaaataggatatagttttgatttttttaattgtaaaatattttggagggagaacaaaatcttttaacattttgaataaatttagagttttataaaata

SEQ ID NO: 72106 - DNA, 3695 bp, Homo sapiens
tgattctctaactgcgcatgcttctgcgcacgcgcaatagacattccaggacttccgggcacttcgtaaggtttaaaaaggatgcttcgcgttttctctctcctttttggagacagattcgcagtggtcgcttcttctccttggatttgttaaggattccaagtaactcttatttggagagaagacgatctgcacttcgcattttggcattgacatttaattttagggtcctttatatagaagggagagtaggtaaactgatttttttttttaacagggagggtttgacaatctttggcagacttggagcaaaagattgaggtgcatttcatgcctccttttgagagtcttgctctgtcgcccaggctgtagtgcagtggcgcaatcttggctgcaacctcagcctcccaagtagctgggattacaaacataagccaccacgcccagccctcatacctcttttaaaagtcgacctgttttgcagaaagtctgctgtttttgtactaaaggctttggaatttggcatttagctaggaatgcacattctttcacctcattcatactttaagaaccacagaagtgactctgcttggccagaaggcacactgtgttggtggttatattaaaagtccttgagtattttgcttttcatgatcttgctcactgcaacttccgcctcccaggttcaggcgattctcctgcctcagcctcccaagtagctgcgactacaggcgtgtagcaccacacctggctaatttttgtatttttagtagagatgaggtttcaccatattggccaggctgttctcaactcctgacctcgtgatccgcccacctcagcctcctaaagtgctgggattacagctgtgagccaccctgcccggccacttttgtatgatttctaatgtatttgtaatttacctaacaaattgcctaatctgctatgttaatgtatttatgaattaaaataaatacgactgcatgtttgtggttcatttttgtggaggtggctgtggtgacatcagccaagaatctgaatggtactgttgaaggaaactagcatgatagcttcagttctaaaggccctgaaacctagtctcaggtgggtcccccttgggttcactttatattggcagtttattgggaaaatggatattaggtcctgaccaataggaccgtaagtctgggttgagtgcaagatgagttagaccgattctttagcttcctgcagtgtagtggaggaaaaatcgatggtagcaacgggaggttgtatccctagctgatgagttgtatgagcctctactacctggcgcacctccgcctgaagattgccagaattgcttgcctcatgacgtgagtcacaatggaaactttgtcaagccccctgcactggctgccaacataaatgttcagtaccctgaaggatgggactgaagggggatcatctagaagctacatgaatgtgtaagatcttggaggaagacagcagagagagagagagagatcagagatcccagggttaaaagttggagaaatttcacagtacatcatccaaaagaggagtccatgatggaggcagaggtaaacttggagaggacaggaagatgtcacccaagcgcatagctaaaagaaggtcccccccagcagatgccatccccaaaagcaagaaggtgaaggtctcacacaggtcccacagcacagaacccggcttggtgctgacactaggccagggcgacgtgggccagctggggctgggtgagaatgtgatggagaggaagaagccggccctggtatccattccggaggatgttgtgcaggctgaggctgggggcatgcacaccgtgtgtctaagcaaaagtggccaggtctattccttcggctgcaatgatgagggtgccctgggaagggacacatcagtggagggctcggagatggtccctgggaaagtggagctgcaagagaaggtggtacaggtgtcagcaggagacagtcacacagcagccctcaccgatgatggccgtgtcttcctctggggctccttccgggacaataacggtgtgattggactgttggagcccatgaagaagagcatggtgcctgtgcaggtgcagctggatgtgcctgtggtaaaggtggcctcaggaaacgaccacttggtgatgctgacagctgatggtgacctctacaccttgggctgcggggaacagggccagctaggccgtgtgcctgagttatttgccaaccgtggtggccggcaaggcctcggaactccgggcacagaatcttgcttcataccccagaacctaacatccttcaagaattccaccaagtcctgggtgggcttctctggtggccagcaccatacagtctgcatggattcggaaggaaaagcatacagcctgggccgggctgagtatgggcggctgggccttggagagggtgctgaggagaagagcatacccaccctcatctccaggctgcctgctgtctcctcggtggcttgtggggcctctgtggggtatgctgtgaccaaggatggtcgtgttttcgcctggggcatgggcaccaactaccagctgggcacagggcaggatgaggacgcctggagccctgtggagatgatgggcaaacagctggagaaccgtgtggtcttatctgtgtccagcgggggccagcatacagtcttattagtcaaggacaaagaacagagctgatgaagcctctgagggcctggcttctgtcctgcacaacctccctcacagaacagggaagcagtgacagctgcagatggcagcgggcctctccccagccctgagcactgtgtcagttcctgccttttctcatcagcagaacagaatccttttcctcttttccttcctcctctttggaattttcctgggacctacagaataaagggggggatggacagggggttttcaaaaggaacatggctcactcagagctatatggttagacgtttctccccttttccctaccttccatggtcctggttggccctggctttgcctactagaaaaccaaaacttcccccctggggttttgtgcccactctctgagaagttggggctccatcaagccccattctagtcatgtgcccctttcctgtccctaacagtccacaggcaaacaaatggtacagtcataagagccatctgtcacggacccacgcccagaggaacgtgcagaaaaaagcagagctacatggctgtgggcaactataagccaaatatttggctcagaacaggtgtccatgggacaaaaaagaacgatcctccacttgaccaagaaaaaagtgattctcccagaagcacaaagcatactcttgcccctcaggtgttgcttgtgtacatcgtacccatccattcggcttcacctgcagccaacggcctggaatcgcaaagagacaccactctgggcagagcagagcagggtatggggtggggagagagggtggagggttttataaacaaacttaacagcaatattgaaaggaggtgggggattgagggagggacagagtgttggagggccagagactagtcctgagatggaaacagcaacttgtacagtggctgagaaaataggatatagttttgatttttttaattgtaaaatattttggagggagaacaaaatcttttaacattttgaataaatttagagttttataaaata

SEQ ID NO: 72107 - DNA, 3798 bp, Homo sapiens
tgattctctaactgcgcatgcttctgcgcacgcgcaatagacattccaggacttccgggcacttcgtaaggtttaaaaaggatgcttcgcgttttctctctcctttttggagacagattcgcagtggtcgcttcttctccttggatttgttaaggattccaagtaactcttatttggagagaagacgatctgcacttcgcattttggcattgacatttaattttagggtcctttatatagaagggagagtaggtaaactgatttttttttttaacagggagggtttgacaatctttggcagacttggagcaaaagattgaggtgcatttcatgcctccttttgagagtcttgctctgtcgcccaggctgtagtgcagtggcgcaatcttggctgcaacctcagcctcccaagtagctgggattacaaacataagccaccacgcccagccctcatacctcttttaaaagtcgacctgttttgcagaaagtctgctgtttttgtactaaaggctttggaatttggcatttagctaggaatgcacattctttcacctcattcatactttaagaaccacagaagtgactctgcttggccagaaggcacactgtgttggtggttatatttcccaggttcaggcgattctcctgcctcagcctcccaagtagctgcgactacaggcgtgtagcaccacacctggctaatttttgtatttttagtagagatgaggtttcaccatattggccaggctgttctcaactcctgacctcgtgatccgcccacctcagcctcctaaagtgctgggattacagctgtgagccaccctgcccggccacttttgtatgatttctaatgtatttgtaatttacctaacaaattgcctaatctgctatgttaatgtatttatgaattaaaataaatacgactgcatgtttgtggttcatttttgtggaggtggctgtggtgacatcagccaagaatctgaatggtactgttgaaggaaactagcatgatagcttcagttctaaaggccctgaaacctagtctcaggtgggtcccccttgggttcactttatattggcagtttattgggaaaatggatattaggtcctgaccaataggaccgtaagtctgggttgagtgcaagatgagttagaccgattctttagcttcctgcagtgtagtggaggaaaaatcgatggtagcaacgggaggttgtatccctagctgatgagttgtatgagcctctactacctggcgcacctccgcctgaagattgccagaattgcttgcctcatgacgtgagtcacaatggaaactttgtcaagccccctgcactggctgccaacataaatgttcagtaccctgaaggatgggactgaagggggatcatctagaagctacatgaatgtgtaagatcttggaggaagacagcagagagagagagagagatcagagatcccagggttaaaagttggagaaatttcacagtacatcatccaaaagaggagtccatgatggaggcagaggtaaacttggagaggacaggaagatgtcacccaagcgcatagctaaaagaaggtcccccccagcagatgccatccccaaaagcaagaaggtgaaggtctcacacaggtcccacagcacagaacccggcttggtgctgacactaggccagggcgacgtgggccagctggggctgggtgagaatgtgatggagaggaagaagccggccctggtatccattccggaggatgttgtgcaggctgaggctgggggcatgcacaccgtgtgtctaagcaaaagtggccaggtctattccttcggctgcaatgatgagggtgccctgggaagggacacatcagtggagggctcggagatggtccctgggaaagtggagctgcaagagaaggtggtacaggtgtcagcaggagacagtcacacagcagccctcaccgatgatggccgtgtcttcctctggggctccttccgggacaataacggtgtgattggactgttggagcccatgaagaagagcatggtgcctgtgcaggtgcagctggatgtgcctgtggtaaaggtggcctcaggaaacgaccacttggtgatgctgacagctgatggtgacctctacaccttgggctgcggggaacagggccagctaggccgtgtgcctgagttatttgccaaccgtggtggccggcaaggcctcgaacgactcctggtccccaagtgtgtgatgctgaaatccaggggaagccggggccacgtgagattccaggatgccttttgtggtgcctatttcacctttgccatctcccatgagggccacgtgtacggcttcggcctctccaactaccatcagcttggaactccgggcacagaatcttgcttcataccccagaacctaacatccttcaagaattccaccaagtcctgggtgggcttctctggtggccagcaccatacagtctgcatggattcggaaggaaaagcatacagcctgggccgggctgagtatgggcggctgggccttggagagggtgctgaggagaagagcatacccaccctcatctccaggctgcctgctgtctcctcggtggcttgtggggcctctgtggggtatgctgtgaccaaggatggtcgtgttttcgcctggggcatgggcaccaactaccagctgggcacagggcaggatgaggacgcctggagccctgtggagatgatgggcaaacagctggagaaccgtgtggtcttatctgtgtccagcgggggccagcatacagtcttattagtcaaggacaaagaacagagctgatgaagcctctgagggcctggcttctgtcctgcacaacctccctcacagaacagggaagcagtgacagctgcagatggcagcgggcctctccccagccctgagcactgtgtcagttcctgccttttctcatcagcagaacagaatccttttcctcttttccttcctcctctttggaattttcctgggacctacagaataaagggggggatggacagggggttttcaaaaggaacatggctcactcagagctatatggttagacgtttctccccttttccctaccttccatggtcctggttggccctggctttgcctactagaaaaccaaaacttcccccctggggttttgtgcccactctctgagaagttggggctccatcaagccccattctagtcatgtgcccctttcctgtccctaacagtccacaggcaaacaaatggtacagtcataagagccatctgtcacggacccacgcccagaggaacgtgcagaaaaaagcagagctacatggctgtgggcaactataagccaaatatttggctcagaacaggtgtccatgggacaaaaaagaacgatcctccacttgaccaagaaaaaagtgattctcccagaagcacaaagcatactcttgcccctcaggtgttgcttgtgtacatcgtacccatccattcggcttcacctgcagccaacggcctggaatcgcaaagagacaccactctgggcagagcagagcagggtatggggtggggagagagggtggagggttttataaacaaacttaacagcaatattgaaaggaggtgggggattgagggagggacagagtgttggagggccagagactagtcctgagatggaaacagcaacttgtacagtggctgagaaaataggatatagttttgatttttttaattgtaaaatattttggagggagaacaaaatcttttaacattttgaataaatttagagttttataaaata

SEQ ID NO: 72108 - DNA, 3898 bp, Homo sapiens
tgattctctaactgcgcatgcttctgcgcacgcgcaatagacattccaggacttccgggcacttcgtaaggtttaaaaaggatgcttcgcgttttctctctcctttttggagacagattcgcagtggtcgcttcttctccttggatttgttaaggattccaagtaactcttatttggagagaagacgatctgcacttcgcattttggcattgacatttaattttagggtcctttatatagaagggagagtaggtaaactgatttttttttttaacagggagggtttgacaatctttggcagacttggagcaaaagattgaggtgcatttcatgcctccttttgagagtcttgctctgtcgcccaggctgtagtgcagtggcgcaatcttggctgcaacctcagcctcccaagtagctgggattacaaacataagccaccacgcccagccctcatacctcttttaaaagtcgacctgttttgcagaaagtctgctgtttttgtactaaaggctttggaatttggcatttagctaggaatgcacattctttcacctcattcatactttaagaaccacagaagtgactctgcttggccagaaggcacactgtgttggtggttatattaaaagtccttgagtattttgcttttcatgatcttgctcactgcaacttccgcctcccaggttcaggcgattctcctgcctcagcctcccaagtagctgcgactacaggcgtgtagcaccacacctggctaatttttgtatttttagtagagatgaggtttcaccatattggccaggctgttctcaactcctgacctcgtgatccgcccacctcagcctcctaaagtgctgggattacagctgtgagccaccctgcccggccacttttgtatgatttctaatgtatttgtaatttacctaacaaattgcctaatctgctatgttaatgtatttatgaattaaaataaatacgactgcatgtttgtggttcatttttgtggaggtggctgtggtgacatcagccaagaatctgaatggtactgttgaaggaaactagcatgatagcttcagttctaaaggccctgaaacctagtctcaggtgggtcccccttgggttcactttatattggcagtttattgggaaaatggatattaggtcctgaccaataggaccgtaagtctgggttgagtgcaagatgagttagaccgattctttagcttcctgcagtgtagtggaggaaaaatcgatggtagcaacgggaggttgtatccctagctgatgagttgtatgagcctctactacctggcgcacctccgcctgaagattgccagaattgcttgcctcatgacgtgagtcacaatggaaactttgtcaagccccctgcactggctgccaacataaatgttcagtaccctgaaggatgggactgaagggggatcatctagaagctacatgaatgtgtaagatcttggaggaagacagcagagagagagagagagatcagagatcccagggttaaaagttggagaaatttcacagtacatcatccaaaagaggagtccatgatggaggcagaggtaaacttggagaggacaggaagatgtcacccaagcgcatagctaaaagaaggtcccccccagcagatgccatccccaaaagcaagaaggtgaaggtctcacacaggtcccacagcacagaacccggcttggtgctgacactaggccagggcgacgtgggccagctggggctgggtgagaatgtgatggagaggaagaagccggccctggtatccattccggaggatgttgtgcaggctgaggctgggggcatgcacaccgtgtgtctaagcaaaagtggccaggtctattccttcggctgcaatgatgagggtgccctgggaagggacacatcagtggagggctcggagatggtccctgggaaagtggagctgcaagagaaggtggtacaggtgtcagcaggagacagtcacacagcagccctcaccgatgatggccgtgtcttcctctggggctccttccgggacaataacggtgtgattggactgttggagcccatgaagaagagcatggtgcctgtgcaggtgcagctggatgtgcctgtggtaaaggtggcctcaggaaacgaccacttggtgatgctgacagctgatggtgacctctacaccttgggctgcggggaacagggccagctaggccgtgtgcctgagttatttgccaaccgtggtggccggcaaggcctcggttgctgtgaagttaaatgagttaatgagaagaatatcaggcagatgaacgactcctggtccccaagtgtgtgatgctgaaatccaggggaagccggggccacgtgagattccaggatgccttttgtggtgcctatttcacctttgccatctcccatgagggccacgtgtacggcttcggcctctccaactaccatcagcttggaactccgggcacagaatcttgcttcataccccagaacctaacatccttcaagaattccaccaagtcctgggtgggcttctctggtggccagcaccatacagtctgcatggattcggaaggaaaagcatacagcctgggccgggctgagtatgggcggctgggccttggagagggtgctgaggagaagagcatacccaccctcatctccaggctgcctgctgtctcctcggtggcttgtggggcctctgtggggtatgctgtgaccaaggatggtcgtgttttcgcctggggcatgggcaccaactaccagctgggcacagggcaggatgaggacgcctggagccctgtggagatgatgggcaaacagctggagaaccgtgtggtcttatctgtgtccagcgggggccagcatacagtcttattagtcaaggacaaagaacagagctgatgaagcctctgagggcctggcttctgtcctgcacaacctccctcacagaacagggaagcagtgacagctgcagatggcagcgggcctctccccagccctgagcactgtgtcagttcctgccttttctcatcagcagaacagaatccttttcctcttttccttcctcctctttggaattttcctgggacctacagaataaagggggggatggacagggggttttcaaaaggaacatggctcactcagagctatatggttagacgtttctccccttttccctaccttccatggtcctggttggccctggctttgcctactagaaaaccaaaacttcccccctggggttttgtgcccactctctgagaagttggggctccatcaagccccattctagtcatgtgcccctttcctgtccctaacagtccacaggcaaacaaatggtacagtcataagagccatctgtcacggacccacgcccagaggaacgtgcagaaaaaagcagagctacatggctgtgggcaactataagccaaatatttggctcagaacaggtgtccatgggacaaaaaagaacgatcctccacttgaccaagaaaaaagtgattctcccagaagcacaaagcatactcttgcccctcaggtgttgcttgtgtacatcgtacccatccattcggcttcacctgcagccaacggcctggaatcgcaaagagacaccactctgggcagagcagagcagggtatggggtggggagagagggtggagggttttataaacaaacttaacagcaatattgaaaggaggtgggggattgagggagggacagagtgttggagggccagagactagtcctgagatggaaacagcaacttgtacagtggctgagaaaataggatatagttttgatttttttaattgtaaaatattttggagggagaacaaaatcttttaacattttgaataaatttagagttttataaaata

SEQ ID NO: 72109 - DNA, 2261 bp, Homo sapiens
tgattctctaactgcgcatgcttctgcgcacgcgcaatagacattccaggacttccgggcacttcgtaaggtttaaaaaggatgcttcgcgttttctctctcctttttggagacagattcgcagtggtcgcttcttctccttggatttgttaaggattccaagtaactcttatttggagagaagacgatctgcacttcgcattttggcattgacatttaattttagggtcctttatatagaagggagagtaggtaaactgatttttttttttaacagggagggtttgacaatctttggcagacttggagcaaaagattgaggtgcatttcatgcctccttttgagagtcttgctctgtcgcccaggctgtagtgcagtggcgcaatcttggctgcaacctcagcctcccaagtagctgggattacaaacataagccaccacgcccagccctcatacctcttttaaaagtcgacctgttttgcagaaagtctgctgtttttgtactaaaggctttggaatttggcatttagctaggaatgcacattctttcacctcattcatactttaagaaccacagaagtgactctgcttggccagaaggcacactgtgttggtggttatattaaaagtccttgagtattttgcttttcatgatcttgctcactgcaacttccgcctcccaggttcaggcgattctcctgcctcagcctcccaagtagctgcgactacaggcgtgtagcaccacacctggctaatttttgtatttttagtagagatgaggtttcaccatattggccaggctgttctcaactcctgacctcgtgatccgcccacctcagcctcctaaagtgctgggattacagctgtgagccaccctgcccggccacttttgtatgatttctaatgtatttgtaatttacctaacaaattgcctaatctgctatgttaatgtatttatgaattaaaataaatacgactgcatgtttgtggttcatttttgtggaggtggctgtggtgacatcagccaagaatctgaatggtactgttgaaggaaactagcatgatagcttcagttctaaaggccctgaaacctagtctcaggtgggtcccccttgggttcactttatattggcagtttattgggaaaatggatattaggtcctgaccaataggaccgtaagtctgggttgagtgcaagatgagttagaccgattctttagcttcctgcagtgtagtggaggaaaaatcgatggtagcaacgggaggttgtatccctagctgatgagttgtatgagcctctactacctggcgcacctccgcctgaagattgccagaattgcttgcctcatgacgtgagtcacaatggaaactttgtcaagccccctgcactggctgccaacataaatgttcagtaccctgaaggatgggactgaagggggatcatctagaaggtaaagttacctactggcataggggaggtgggacagccgttaagccatttggaacttgatggagacaggtttgagggaggtgggtgagattggagtttggtggactgtagagcttgcttgccaaggtgttgaggtcagggttggtttgagaatggaagctagttactagctatgattgtgggggaacacagcttgatttttcttacaagctaagaggagtgaggcagtgtttaagagggcatgttaaatgcagccaggcttggtggctcacacccgtaatcccagcacttaggctaaggcaggcggatcacaacatctagagatcctggccaacgcggtgaaaccctgtctgtactaaaaatacaaaataactgggcatggtggtgtgcacctgtgggaggctgaggcagaattgctggaacccgggagatggaggttgtactgagctgagaccttgccactgcgctccagcctggtgacagagttaagtctcaaaaaaaaaggcatcttcctaaagcaattgtatttgtgcttacctgtgccaggcactgttctaggtaagcactaagtgggctttaatacagcatattccaatggggaatcccaggaaccaaaagactaattgtccaagtccacaactagaagtggcacctctgcagaaacaagcatcaaattccctgctcaggaagaagccagatgagtcagccccattcgtctgtatgcccagtcccatccgtgtcctgctgtaactacatagatctcacctgagtaaagtgatttttttctgaaaaaaaagagagcaagaaaaaa

SEQ ID NO: 72110 - DNA, 3183 bp, Homo sapiens
tgattctctaactgcgcatgcttctgcgcacgcgcaatagacattccaggacttccgggcacttcgtaaggtttaaaaaggatgcttcgcgttttctctctcctttttggagacagattcgcagtggtcgcttcttctccttggatttgttaaggattccaagtaactcttatttggagagaagacgatctgcacttcgcattttggcattgacatttaattttagggtcctttatatagaagggagagtaggtaaactgatttttttttttaacagggagggtttgacaatctttggcagacttggagcaaaagattgaggtgcatttcatgcctccttttgagagtcttgctctgtcgcccaggctgtagtgcagtggcgcaatcttggctgcaacctcagcctcccaagtagctgggattacaaacataagccaccacgcccagccctcatacctcttttaaaagtcgacctgttttgcagaaagtctgctgtttttgtactaaaggctttggaatttggcatttagctaggaatgcacattctttcacctcattcatactttaagaaccacagaagtgactctgcttggccagaaggcacactgtgttggtggttatattaaaagtccttgagtattttgcttttcatgatcttgctcactgcaacttccgcctcccaggttcaggcgattctcctgcctcagcctcccaagtagctgcgactacaggcgtgtagcaccacacctggctaatttttgtatttttagtagagatgaggtttcaccatattggccaggctgttctcaactcctgacctcgtgatccgcccacctcagcctcctaaagtgctgggattacagctgtgagccaccctgcccggccacttttgtatgatttctaatgtatttgtaatttacctaacaaattgcctaatctgctatgttaatgtatttatgaattaaaataaatacgactgcatgtttgtggttcatttttgtggaggtggctgtggtgacatcagccaagaatctgaatggtactgttgaaggaaactagcatgatagcttcagttctaaaggccctgaaacctagtctcaggtgggtcccccttgggttcactttatattggcagtttattgggaaaatggatattaggtcctgaccaataggaccgtaagtctgggttgagtgcaagatgagttagaccgattctttagcttcctgcagtgtagtggaggaaaaatcgatggtagcaacgggaggttgtatccctagctgatgagttgtatgagcctctactacctggcgcacctccgcctgaagattgccagaattgcttgcctcatgacgtgagtcacaatggaaactttgtcaagccccctgcactggctgccaacataaatgttcagtaccctgaaggatgggactgaagggggatcatctagaagctacatgaatgtgtaagatcttggaggaagacagcagagagagagagagagatcagagatcccagggttaaaagttggagaaatttcacagtacatcatccaaaagaggagtccatgatggaggcagaggtaaacttggagaggacaggaagatgtcacccaagcgcatagctaaaagaaggtcccccccagcagatgccatccccaaaagcaagaaggtgaaggtctcacacaggtcccacagcacagaacccggcttggtgctgacactaggccagggcgacgtgggccagctggggctgggtgagaatgtgatggagaggaagaagccggccctggtatccattccggaggatgttgtgcaggctgaggctgggggcatgcacaccgtgtgtctaagcaaaagtggccaggtctattccttcggctgcaatgatgagggtgccctgggaagggacacatcagtggagggctcggagatggtccctgggaaagtggagctgcaagagaaggtggtacaggtgtcagcaggagacagtcacacagcagccctcaccgatgatggccgtgtcttcctctggggctccttccgggacaataacggtgtgattggactgttggagcccatgaagaagagcatggtgcctgtgcaggtgcagctggatgtgcctgtggtaaaggtggcctcaggaaacgaccacttggtgatgctgacagctgatggtgacctctacaccttgggctgcggggaacagggccagctaggccgtgtgcctgagttatttgccaaccgtggtggccggcaaggcctcgaacgactcctggtccccaagtgtgtgatgctgaaatccaggggaagccggggccacgtgagattccaggatgccttttgtggtgcctatttcacctttgccatctcccatgagggccacgtgtacggcttcggcctctccaactaccatcagcttggaactccgggcacagaatcttgcttcataccccagaacctaacatccttcaagaattccaccaagtcctgggtgggcttctctggtggccagcaccatacagtctgcatggattcggaaggaaaagcatacagcctgggccgggctgagtatgggcggctgggccttggagagggtgctgaggagaagagcatacccaccctcatctccaggctgcctgctgtctcctcggtggcttgtggggcctctgtggggtatgctgtgaccaaggatggtcgtgttttcgcctggggcatgggcaccaactaccagctgggcacagggcaggatgaggacgcctggagccctgtggagatgatgggcaaacagctggagaaccgtgtggtcttatctgtgtccagcgggggccagcatacagtcttattagtcaaggacaaagaacagagctgatgaagcctctgagggcctggcttctgtcctgcacaacctccctcacagaacagggaagcagtgacagctgcagatggcagcgggcctctccccagccctgagcactgtgtcagttcctgccttttctcatcagcagaacagaatccttttcctcttttccttcctcctctttggaattttcctgggacctacagaataaagggggggatggacagggggttttcaaaaggaacatggctcactcagagctatatggttagacgtttctccccctccccaactcagatccggcccggtccccgtccccttccctc

SEQ ID NO: 72111 - DNA, 2881 bp, Homo sapiens
tgattctctaactgcgcatgcttctgcgcacgcgcaatagacattccaggacttccgggcacttcgtaaggtttaaaaaggatgcttcgcgttttctctctcctttttggagacagattcgcagtggtcgcttcttctccttggatttgttaaggattccaagtaactcttatttggagagaagacgatctgcacttcgcattttggcattgacatttaattttagggtcctttatatagaagggagagtaggtaaactgatttttttttttaacagggagggtttgacaatctttggcagacttggagcaaaagattgaggtgcatttcatgcctccttttgagagtcttgctctgtcgcccaggctgtagtgcagtggcgcaatcttggctgcaacctcagcctcccaagtagctgggattacaaacataagccaccacgcccagccctcatacctcttttaaaagtcgacctgttttgcagaaagtctgctgtttttgtactaaaggctttggaatttggcatttagctaggaatgcacattctttcacctcattcatactttaagaaccacagaagtgactctgcttggccagaaggcacactgtgttggtggttatattaaaagtccttgagtattttgcttttcatgatcttgctcactgcaacttccgcctcccaggttcaggcgattctcctgcctcagcctcccaagtagctgcgactacaggcgtgtagcaccacacctggctaatttttgtatttttagtagagatgaggtttcaccatattggccaggctgttctcaactcctgacctcgtgatccgcccacctcagcctcctaaagtgctgggattacagctgtgagccaccctgcccggccacttttgtatgatttctaatgtatttgtaatttacctaacaaattgcctaatctgctatgttaatgtatttatgaattaaaataaatacgactgcatgtttgtggttcatttttgtggaggtggctgtggtgacatcagccaagaatctgaatggtactgttgaaggaaactagcatgatagcttcagttctaaaggccctgaaacctagtctcaggtgggtcccccttgggttcactttatattggcagtttattgggaaaatggatattaggtcctgaccaataggaccgtaagtctgggttgagtgcaagatgagttagaccgattctttagcttcctgcagtgtagtggaggaaaaatcgatggtagcaacgggaggttgtatccctagctgatgagttgtatgagcctctactacctggcgcacctccgcctgaagattgccagaattgcttgcctcatgacgtgagtcacaatggaaactttgtcaagccccctgcactggctgccaacataaatgttcagtaccctgaaggatgggactgaagggggatcatctagaaggtaaagttacctactggcataggggaggtgggacagccgttaagccatttggaacttgatggagacaggtttgagggaggtgggtgagattggagtttggtggactgtagagcttgcttgccaaggtgttgaggtcagggttggtttgagaatggaagctagttactagctatgattgtgggggaacacagcttgatttttcttacaagctaagaggagtgaggcagtgtttaagagggcatgttaaatgcagccaggcttggtggctcacacccgtaatcccagcacttaggctaaggcaggcggatcacaacatctagagatcctggccaacgcggtgaaaccctgtctgtactaaaaatacaaaataactgggcatggtggtgtgcacctgtgggaggctgaggcagaattgctggaacccgggagatggaggttgtactgagctgagaccttgccactgcgctccagcctggtgacagagttaagtctcaaaaaaaaaggcatcttcctaaagcaattgtatttgtgcttacctgtgccaggcactgttctaggtaagcactaagtgggctttaatacagcatattccaatggggaatcccaggaaccaaaagactaattgtccaagtccacaactagaagtggcacctctgcagaaacaagcatcaaattccctgctcaggaagaagccagatgagtcagccccattcgtctgtatgcccagtcccatccgtgtcctgctgtaactacatagatctcacctgagtaaagtgatttttttctgaaccagtggttctagtatgttttcaatccatattctcaggtgggtttgggtaactgcagtgctgggcaggaaatgaatgaatttctattgacttgcaaggtagaggtgaagcaaagctgtcagtaggtgttcaggtcccactctgctaaacttcagcttgcaatacccctttcttagactttccaaacaggcacttctggccttgttctttgtgtaggcagacagtattggttgcctatcttaggagtactagactgggtttgaatcctgatcccaccacttgctgttcatgagactttgggtgagttactcagcccctctgcctcaatttcatgttcacaaaataagtgataaactacctcatagagttgtaataaggacaaaggagttggtatttgtgaaaagattcttagggtctctagatggagtgcagcagcatgatcacttattaaataacattcttttgtgacttctcaggaaccaaggatacagtatccaattttttgttttttgtttttttttttttttgagagggagtctcgctctgtcgcccaggctggagtgcagtggcacaatctcagctcactgcaagctcagcctccccagcagctgggactacaggtgcacgccgccacacccggct

SEQ ID NO: 72112 - DNA, 2483 bp, Homo sapiens
tgattctctaactgcgcatgcttctgcgcacgcgcaatagacattccaggacttccgggcacttcgtaaggtttaaaaaggatgcttcgcgttttctctctcctttttggagacagattcgcagtggtcgcttcttctccttggatttgttaaggattccaagtaactcttatttggagagaagacgatctgcacttcgcattttggcattgacatttaattttagggtcctttatatagaagggagagtaggtaaactgatttttttttttaacagggagggtttgacaatctttggcagacttggagcaaaagattgaggtgcatttcatgcctccttttgagagtcttgctctgtcgcccaggctgtagtgcagtggcgcaatcttggctgcaacctcagcctcccaagtagctgggattacaaacataagccaccacgcccagccctcatacctcttttaaaagtcgacctgttttgcagaaagtctgctgtttttgtactaaaggctttggaatttggcatttagctaggaatgcacattctttcacctcattcatactttaagaaccacagaagtgactctgcttggccagaaggcacactgtgttggtggttatattaaaagtccttgagtattttgcttttcatgatcttgctcactgcaacttccgcctcccaggttcaggcgattctcctgcctcagcctcccaagtagctgcgactacaggcgtgtagcaccacacctggctaatttttgtatttttagtagagatgaggtttcaccatattggccaggctgttctcaactcctgacctcgtgatccgcccacctcagcctcctaaagtgctgggattacagctgtgagccaccctgcccggccacttttgtatgatttctaatgtatttgtaatttacctaacaaattgcctaatctgctatgttaatgtatttatgaattaaaataaatacgactgcatgtttgtggttcatttttgtggaggtggctgtggtgacatcagccaagaatctgaatggtactgttgaaggaaactagcatgatagcttcagttctaaaggccctgaaacctagtctcaggtgggtcccccttgggttcactttatattggcagtttattgggaaaatggatattaggtcctgaccaataggaccgtaagtctgggttgagtgcaagatgagttagaccgattctttagcttcctgcagtgtagtggaggaaaaatcgatggtagcaacgggaggttgtatccctagctgatgagttgtatgagcctctactacctggcgcacctccgcctgaagattgccagaattgcttgcctcatgacgtgagtcacaatggaaactttgtcaagccccctgcactggctgccaacataaatgttcagtaccctgaaggatgggactgaagggggatcatctagaagctacatgaatgtgtaagatcttggaggaagacagcagagagagagagagagatcagagatcccagggttaaaagttggagaaatttcacagtacatcatccaaaagaggagtccatgatggaggcagaggtaaacttggagaggacaggaagatgtcacccaagcgcatagctaaaagaaggtcccccccagcagatgccatccccaaaagcaagaaggtgaaggacacgagggccgctgcctcccgccgcgttcctggcgcccgctcctgccaagtctcacacaggtcccacagcacagaacccggcttggtgctgacactaggccagggcgacgtgggccagctggggctgggtgagaatgtgatggagaggaagaagccggccctggtatccattccggaggatgttgtgcaggctgaggctgggggcatgcacaccgtgtgtctaagcaaaagtggccaggtctattccttcggctgcaatgatgagggtgccctgggaagggacacatcagtggagggctcggagatggtccctgggaaagtggagctgcaagagaaggtggtacaggtgtcagcaggagacagtcacacagcagccctcaccgatgatggccgtgtcttcctctggggctccttccgggacaataacggtgtgattggactgttggagcccatgaagaagagcatggtgcctgtgcaggtgcagctggatgtgcctgtggtaaaggtggcctcaggaaacgaccacttggtgatgctgacagctgatggtgacctctacaccttgggctgcggggaacagggccagctaggccgtgtgcctgagttatttgccaaccgtggtggccggcaaggcctcgtcgaacgactcctggtcccaagtgtgtgatgcgaaatcagggaagccgggccactaaccagagcctcggggcactaccttgcaccagaggcaagaggatgcctcaaacacccgtgacgggacatctacccaacaaccaccgcgggcctcgcccccacgtccaccaccg

SEQ ID NO: 72113 - DNA, 1932 bp, Homo sapiens
tgattctctaactgcgcatgcttctgcgcacgcgcaatagacattccaggacttccgggcacttcgtaaggtttaaaaaggatgcttcgcgttttctctctcctttttggagacagattcgcagtggtcgcttcttctccttggatttgttaaggattccaagtaactcttatttggagagaagacgatctgcacttcgcattttggcattgacatttaattttagggtcctttatatagaagggagagtaggtaaactgatttttttttttaacagggagggtttgacaatctttggcagacttggagcaaaagattgaggtgcatttcatgcctccttttgagagtcttgctctgtcgcccaggctgtagtgcagtggcgcaatcttggctgcaacctcagcctcccaagtagctgggattacaaacataagccaccacgcccagccctcatacctcttttaaaagtcgacctgttttgcagaaagtctgctgtttttgtactaaaggctttggaatttggcatttagctaggaatgcacattctttcacctcattcatactttaagaaccacagaagtgactctgcttggccagaaggcacactgtgttggtggttatattaaaagtccttgagtattttgcttttcatgatcttgctcactgcaacttccgcctcccaggttcaggcgattctcctgcctcagcctcccaagtagctgcgactacaggcgtgtagcaccacacctggctaatttttgtatttttagtagagatgaggtttcaccatattggccaggctgttctcaactcctgacctcgtgatccgcccacctcagcctcctaaagtgctgggattacagctgtgagccaccctgcccggccacttttgtatgatttctaatgtatttgtaatttacctaacaaattgcctaatctgctatgttaatgtatttatgaattaaaataaatacgactgcatgtttgtggttcatttttgtggaggtggctgtggtgacatcagccaagaatctgaatggtactgttgaaggaaactagcatgatagcttcagttctaaaggccctgaaacctagtctcaggtgggtcccccttgggttcactttatattggcagtttattgggaaaatggatattaggtcctgaccaataggaccgtaagtctgggttgagtgcaagatgagttagaccgattctttagcttcctgcagtgtagtggaggaaaaatcgatggtagcaacgggaggttgtatccctagctgatgagttgtatgagcctctactacctggcgcacctccgcctgaagattgccagaattgcttgcctcatgacgtgagtcacaatggaaactttgtcaagccccctgcactggctgccaacataaatgttcagtaccctgaaggatgggactgaagggggatcatctagaaggtaaagttacctactggcataggggaggtgggacagccgttaagccatttggaacttgatggagacaggtttgagggaggtgggtgagattggagtttggtggactgtagagcttgcttgccaaggtgttgaggtcagggttggtttgagaatggaagctagttactagctatgattgtgggggaacacagcttgatttttcttacaagctaagaggagtgaggcagtgtttaagagggcatgttaaatgcagccaggcttggtggctcacacccgtaatcccagcacttaggctaaggcaggcggatcacaacatctagagatcctggccaacgcggtgaaaccctgtctgtactaaaaatacaaaataactgggcatggtggtgtgcacacacatgcctgtaatcccagctactccagaggtggaggttgcagtgagcccatatcgcgccattgcactccatcctgggcaatcaagctt

SEQ ID NO: 72114 - DNA, 2312 bp, Homo sapiens
caggcccgtgtcattagcgaactatgcccttgaacccaggcgacggacgctactggacaggaagatgtcacccaagcgcatagctaaaagaaggtcccccccagcagatgccatccccaaaagcaagaaggtgaaggtctcacacaggtcccacagcacagaacccggcttggtgctgacactaggccagggcgacgtgggccagctggggctgggtgagaatgtgatggagaggaagaagccggccctggtatccattccggaggatgttgtgcaggctgaggctgggggcatgcacaccgtgtgtctaagcaaaagtggccaggtctattccttcggctgcaatgatgagggtgccctgggaagggacacatcagtggagggctcggagatggtccctgggaaagtggagctgcaagagaaggtggtacaggtgtcagcaggagacagtcacacagcagccctcaccgatgatggccgtgtcttcctctggggctccttccgggacaataacggtgtgattggactgttggagcccatgaagaagagcatggtgcctgtgcaggtgcagctggatgtgcctgtggtaaaggtggcctcaggaaacgaccacttggtgatgctgacagctgatggtgacctctacaccttgggctgcggggaacagggccagctaggccgtgtgcctgagttatttgccaaccgtggtggccggcaaggcctcgaacgactcctggtccccaagtgtgtgatgctgaaatccaggggaagccggggccacgtgagattccaggatgccttttgtggtgcctatttcacctttgccatctcccatgagggccacgtgtacggcttcggcctctccaactaccatcagcttggaactccgggcacagaatcttgcttcataccccagaacctaacatccttcaagaattccaccaagtcctgggtgggcttctctggtggccagcaccatacagtctgcatggattcggaaggaaaagcatacagcctgggccgggctgagtatgggcggctgggccttggagagggtgctgaggagaagagcatacccaccctcatctccaggctgcctgctgtctcctcggtggcttgtggggcctctgtggggtatgctgtgaccaaggatggtcgtgttttcgcctggggcatgggcaccaactaccagctgggcacagggcaggatgaggacgcctggagccctgtggagatgatgggcaaacagctggagaaccgtgtggtcttatctgtgtccagcgggggccagcatacagtcttattagtcaaggacaaagaacagagctgatgaagcctctgagggcctggcttctgtcctgcacaacctccctcacagaacagggaagcagtgacagctgcagatggcagcgggcctctccccagccctgagcactgtgtcagttcctgccttttctcatcagcagaacagaatccttttcctcttttccttcctcctctttggaattttcctgggacctacagaataaagggggggatggacagggggttttcaaaaggaacatggctcactcagagctatatggttagacgtttctccccttttccctaccttccatggtcctggttggccctggctttgcctactagaaaaccaaaacttcccccctggggttttgtgcccactctctgagaagttggggctccatcaagccccattctagtcatgtgcccctttcctgtccctaacagtccacaggcaaacaaatggtacagtcataagagccatctgtcacggacccacgcccagaggaacgtgcagaaaaaagcagagctacatggctgtgggcaactataagccaaatatttggctcagaacaggtgtccatgggacaaaaaagaacgatcctccacttgaccaagaaaaaagtgattctcccagaagcacaaagcatactcttgcccctcaggtgttgcttgtgtacatcgtacccatccattcggcttcacctgcagccaacggcctggaatcgcaaagagacaccactctgggcagagcagagcagggtatggggtggggagagagggtggagggttttataaacaaacttaacagcaatattgaaaggaggtgggggattgagggagggacagagtgttggagggccagagactagtcctgagatggaaacagcaacttgtacagtggctgagaaaataggatatagttttgatttttttaattgtaaaatattttggagggagaacaaaatcttttaacattttgaataaatttagagttttataaaata

SEQ ID NO: 72115 - DNA, 2523 bp, Homo sapiens
ccagcccgggagcgcgccacatgcagatcctgggatggccgccaggggccgccgggctctttgttttcctttctcacccgggtcggggccagaggcctgcagagcgcatgctctggggcagttcgcggcccggcggggagcgccggagttccttgtggccgacgtgcaccaaggacaggaagatgtcacccaagcgcatagctaaaagaaggtcccccccagcagatgccatccccaaaagcaagaaggtgaaggacacgagggccgctgcctcccgccgcgttcctggcgcccgctcctgccaaggtgcctgcgggccgagccctcctgaccagaaaacccgaccagtctcacacaggtcccacagcacagaacccggcttggtgctgacactaggccagggcgacgtgggccagctggggctgggtgagaatgtgatggagaggaagaagccggccctggtatccattccggaggatgttgtgcaggctgaggctgggggcatgcacaccgtgtgtctaagcaaaagtggccaggtctattccttcggctgcaatgatgagggtgccctgggaagggacacatcagtggagggctcggagatggtccctgggaaagtggagctgcaagagaaggtggtacaggtgtcagcaggagacagtcacacagcagccctcaccgatgatggccgtgtcttcctctggggctccttccgggacaataacggtgtgattggactgttggagcccatgaagaagagcatggtgcctgtgcaggtgcagctggatgtgcctgtggtaaaggtggcctcaggaaacgaccacttggtgatgctgacagctgatggtgacctctacaccttgggctgcggggaacagggccagctaggccgtgtgcctgagttatttgccaaccgtggtggccggcaaggcctcgaacgactcctggtccccaagtgtgtgatgctgaaatccaggggaagccggggccacgtgagattccaggatgccttttgtggtgcctatttcacctttgccatctcccatgagggccacgtgtacggcttcggcctctccaactaccatcagcttggaactccgggcacagaatcttgcttcataccccagaacctaacatccttcaagaattccaccaagtcctgggtgggcttctctggtggccagcaccatacagtctgcatggattcggaaggaaaagcatacagcctgggccgggctgagtatgggcggctgggccttggagagggtgctgaggagaagagcatacccaccctcatctccaggctgcctgctgtctcctcggtggcttgtggggcctctgtggggtatgctgtgaccaaggatggtcgtgttttcgcctggggcatgggcaccaactaccagctgggcacagggcaggatgaggacgcctggagccctgtggagatgatgggcaaacagctggagaaccgtgtggtcttatctgtgtccagcgggggccagcatacagtcttattagtcaaggacaaagaacagagctgatgaagcctctgagggcctggcttctgtcctgcacaacctccctcacagaacagggaagcagtgacagctgcagatggcagcgggcctctccccagccctgagcactgtgtcagttcctgccttttctcatcagcagaacagaatccttttcctcttttccttcctcctctttggaattttcctgggacctacagaataaagggggggatggacagggggttttcaaaaggaacatggctcactcagagctatatggttagacgtttctccccttttccctaccttccatggtcctggttggccctggctttgcctactagaaaaccaaaacttcccccctggggttttgtgcccactctctgagaagttggggctccatcaagccccattctagtcatgtgcccctttcctgtccctaacagtccacaggcaaacaaatggtacagtcataagagccatctgtcacggacccacgcccagaggaacgtgcagaaaaaagcagagctacatggctgtgggcaactataagccaaatatttggctcagaacaggtgtccatgggacaaaaaagaacgatcctccacttgaccaagaaaaaagtgattctcccagaagcacaaagcatactcttgcccctcaggtgttgcttgtgtacatcgtacccatccattcggcttcacctgcagccaacggcctggaatcgcaaagagacaccactctgggcagagcagagcagggtatggggtggggagagagggtggagggttttataaacaaacttaacagcaatattgaaaggaggtgggggattgagggagggacagagtgttggagggccagagactagtcctgagatggaaacagcaacttgtacagtggctgagaaaataggatatagttttgatttttttaattgtaaaatattttggagggagaacaaaatcttttaacattttgaataaatttagagttttataaaata

SEQ ID NO: 72116 - DNA, 2034 bp, Homo sapiens
  misc_feature (24)..(24): n is a, c, g, or t
  misc_feature (31)..(31): n is a, c, g, or t
aactttaggctagtacgaggccgngtggtgnctagcaaaagtggcaggtctattccttcggctgcaatgatgagggtgccctgggaagggacacatcagtggagggctcggagatggtccctgggaaagtggagctgcaagagaaggtggtacaggtgtcagcaggagacagtcacacagcagccctcaccgatgatggccgtgtcttcctctggggctccttccgggacaataacggtgtgattggactgttggagcccatgaagaagagcatggtgcctgtgcaggtgcagctggatgtgcctgtggtaaaggtggcctcaggaaacgaccacttggtgatgctgacagctgatggtgacctctacaccttgggctgcggggaacagggccagctaggccgtgtgcctgagttatttgccaaccgtggtggccggcaaggcctcgaacgactcctggtccccaagtgtgtgatgctgaaatccaggggaagccggggccacgtgagattccaggatgccttttgtggtgcctatttcacctttgccatctcccatgagggccacgtgtacggcttcggcctctccaactaccatcagcttggaactccgggcacagaatcttgcttcataccccagaacctaacatccttcaagaattccaccaagtcctgggtgggcttctctggtggccagcaccatacagtctgcatggattcggaaggaaaagcatacagcctgggccgggctgagtatgggcggctgggccttggagagggtgctgaggagaagagcatacccaccctcatctccaggctgcctgctgtctcctcggtggcttgtggggcctctgtggggtatgctgtgaccaaggatggtcgtgttttcgcctggggcatgggcaccaactaccagctgggcacagggcaggatgaggacgcctggagccctgtggagatgatgggcaaacagctggagaaccgtgtggtcttatctgtgtccagcgggggccagcatacagtcttattagtcaaggacaaagaacagagctgatgaagcctctgagggcctggcttctgtcctgcacaacctccctcacagaacagggaagcagtgacagctgcagatggcagcgggcctctccccagccctgagcactgtgtcagttcctgccttttctcatcagcagaacagaatccttttcctcttttccttcctcctctttggaattttcctgggacctacagaataaagggggggatggacagggggttttcaaaaggaacatggctcactcagagctatatggttagacgtttctccccttttccctaccttccatggtcctggttggccctggctttgcctactagaaaaccaaaacttcccccctggggttttgtgcccactctctgagaagttggggctccatcaagccccattctagtcatgtgcccctttcctgtccctaacagtccacaggcaaacaaatggtacagtcataagagccatctgtcacggacccacgcccagaggaacgtgcagaaaaaagcagagctacatggctgtgggcaactataagccaaatatttggctcagaacaggtgtccatgggacaaaaaagaacgatcctccacttgaccaagaaaaaagtgattctcccagaagcacaaagcatactcttgcccctcaggtgttgcttgtgtacatcgtacccatccattcggcttcacctgcagccaacggcctggaatcgcaaagagacaccactctgggcagagcagagcagggtatggggtggggagagagggtggagggttttataaacaaacttaacagcaatattgaaaggaggtgggggattgagggagggacagagtgttggagggccagagactagtcctgagatggaaacagcaacttgtacagtggctgagaaaataggatatagttttgatttttttaattgtaaaatattttggagggagaacaaaatcttttaacattttgaataaatttagagttttataaaata

SEQ ID NO: 72117 - DNA, 1808 bp, Homo sapiens
tgattctctaactgcgcatgcttctgcgcacgcgcaatagacattccaggacttccgggcacttcgtaaggtttaaaaaggatgcttcgcgttttctctctcctttttggagacagattcgcagtggtcgcttcttctccttggatttgttaaggattccaagtaactcttatttggagagaagacgatctgcacttcgcattttggcattgacatttaattttagggtcctttatatagaagggagagtaggtaaactgatttttttttttaacagggagggtttgacaatctttggcagacttggagcaaaagattgaggtgcatttcatgcctccttttgagagtcttgctctgtcgcccaggctgtagtgcagtggcgcaatcttggctgcaacctcagcctcccaagtagctgggattacaaacataagccaccacgcccagccctcatacctcttttaaaagtcgacctgttttgcagaaagtctgctgtttttgtactaaaggctttggaatttggcatttagctaggaatgcacattctttcacctcattcatactttaagaaccacagaagtgactctgcttggccagaaggcacactgtgttggtggttatattaaaagtccttgagtattttgcttttcatgatcttgctcactgcaacttccgcctcccaggttcaggcgattctcctgcctcagcctcccaagtagctgcgactacaggcgtgtagcaccacacctggctaatttttgtatttttagtagagatgaggtttcaccatattggccaggctgttctcaactcctgacctcgtgatccgcccacctcagcctcctaaagtgctgggattacagctgtgagccaccctgcccggccacttttgtatgatttctaatgtatttgtaatttacctaacaaattgcctaatctgctatgttaatgtatttatgaattaaaataaatacgactggccaagaaaaaaaaaaaaaaaaaaaaaaaaaaacctgttgtgtggggcgcccctcgggccccgcgagaaaagacttttttacccacttccgttgtggggcgcgcgcgcggccccacaaaggtgtaacggggaaacgtgggcccaaagccgttttcccgagaggaaacccggggccaggaacacggcggcggcggggttctttccaccctaatgataaaaaaaagcgcgccgcggggggggcacccaggagcgggttctgagaaccaacctccaaagaggagagtccacggcggagccaatagcagggggagcctcataacacacacggggagtcccaagcaggagacataagaatgctaaaatatagccccccgagcggggtggagaattccaccaagcacagcaacactcaaacacaagcagcaacacaacaagacaacagaccgagacagagaagaaaaaagaacagcacacgacaacgaccaaaggggaaggacagcagccaacgaaacagaagaaaagacgctagagaacagaaagacagcaaaagagcaagatagaagagcacagcagaaaaaaacgagcacaagcaagaagcggagaacagagagcagacaggagagagacaagaggacgaagaagcacgaaaaggaggaagaagaggcaagagcagaagacagagagcgcaagaggagaacgacagaaaaagagagaggaacgaaaaagagaagcagagaaagaagaagaacaacgaacaacgcacagaaaagacgcaaacgaaggaagaagagaagcacggcaagacggaccggtaacaacgagaacactc

SEQ ID NO: 72118 - DNA, 1182 bp, Homo sapiens
  misc_feature (35)..(35): n is a, c, g, or t
  misc_feature (54)..(54): n is a, c, g, or t
  misc_feature (63)..(63): n is a, c, g, or t
tcatcctgccctgtgcccagctggtagttggtgcncatgccccaggcgaaaacncgaccatcnttggtcacagcataccccacagaggccccacaagccaccgaggagacagcagcagcctggagaaccgtgtggtcttatctgtgtccagcgggggccagcatacagtcttattagtcaaggacaaagaacagagctgatgaagcctctgagggcctggcttctgtcctgcacaacctccctcacagaacagggaagcagtgacagctgcagatggcagcgggcctctccccagccctgagcactgtgtcagttcctgccttttctcatcagcagaacagaatccttttcctcttttccttcctcctctttggaattttcctgggacctacagaataaagggggggatggacagggggttttcaaaaggaacatggctcactcagagctatatggttagacgtttctccccttttccctaccttccatggtcctggttggccctggctttgcctactagaaaaccaaaacttcccccctggggttttgtgcccactctctgagaagttggggctccatcaagccccattctagtcatgtgcccctttcctgtccctaacagtccacaggcaaacaaatggtacagtcataagagccatctgtcacggacccacgcccagaggaacgtgcagaaaaaagcagagctacatggctgtgggcaactataagccaaatatttggctcagaacaggtgtccatgggacaaaaaagaacgatcctccacttgaccaagaaaaaagtgattctcccagaagcacaaagcatactcttgcccctcaggtgttgcttgtgtacatcgtacccatccattcggcttcacctgcagccaacggcctggaatcgcaaagagacaccactctgggcagagcagagcagggtatggggtggggagagagggtggagggttttataaacaaacttaacagcaatattgaaaggaggtgggggattgagggagggacagagtgttggagggccagagactagtcctgagatggaaacagcaacttgtacagtggctgagaaaataggatatagttttgatttttttaattgtaaaatattttggagggagaacaaaatcttttaacattttgaataaatttagagttttataaaata

SEQ ID NO: 72119 - DNA, 775 bp, Homo sapiens
tgattctctaactgcgcatgcttctgcgcacgcgcaatagacattccaggacttccgggcacttcgtaaggtttaaaaaggatgcttcgcgttttctctctcctttttggagacagattcgcagtggtcgcttcttctccttggatttgttaaggattccaagtaactcttatttggagagaagacgatctgcacttcgcattttggcattgacatttaattttagggtcctttatatagaagggagagtaggtaaactgatttttttttttaacagggagggtttgacaatctttggcagacttggagcaaaagattgaggtgcatttcatgcctccttttgagagtcttgctctgtcgcccaggctgtagtgcagtggcgcaatcttggctgcaacctcagcctcccaagtagctgggattacaaacataagccaccacgcccagccctcatacctcttttaaaagtcgacctgttttgcagaaagtctgctgtttttgtactaaaggctttggaatttggcatttagctaggaatgcacattctttcacctcattcatactttaagaaccacagaagtgactctgcttggccagaaggcacactgtgttggtggttatattaaaagtccttgagtattttgcttttcatgatcttgctcactgcaacttccgcctcccaggttcaggcgattctcctgcctcagcctcccaagtagctgcgactacaggcgtgtagcaccacacctgggaggcggaagttgcagtgagcaag

SEQ ID NO: 72120 - DNA, 1429 bp, Homo sapiens
tgattctctaactgcgcatgcttctgcgcacgcgcaatagacattccaggacttccgggcacttcgtaaggtttaaaaaggatgcttcgcgttttctctctcctttttggagacagattcgcagtggtcgcttcttctccttggatttgttaaggattccaagtaactcttatttggagagaagacgatctgcacttcgcattttggcattgacatttaattttagggtcctttatatagaagggagagtaggtaaactgatttttttttttaacagggagggtttgacaatctttggcagacttggagcaaaagattgaggtgcatttcatgcctccttttgagagtcttgctctgtcgcccaggctgtagtgcagtggcgcaatcttgctgtgggaggctgaggcagaattgctggaacccgggagatggaggttgtactgagctgagaccttgccactgcgctccagcctggtgacagagttaagtctcaaaaaaaaaggcatcttcctaaagcaattgtatttgtgcttacctgtgccaggcactgttctaggtaagcactaagtgggctttaatacagcatattccaatggggaatcccaggaaccaaaagactaattgtccaagtccacaactagaagtggcacctctgcagaaacaagcatcaaattccctgctcaggaagaagccagatgagtcagccccattcgtctgtatgcccagtcccatccgtgtcctgctgtaactacatagatctcacctgagtaaagtgatttttttctgaaccagtggttctagtatgttttcaatccatattctcaggtgggtttgggtaactgcagtgctgggcaggaaatgaatgaatttctattgacttgcaaggtagaggtgaagcaaagctgtcagtaggtgttcaggtcccactctgctaaacttcagcttgcaatacccctttcttagactttccaaacaggcacttctggccttgttctttgtgtaggcagacagtattggttgcctatcttaggagtactagactgggtttgaatcctgatcccaccacttgctgttcatgagactttgggtgagttactcagcccctctgcctcaatttcatgttcacaaaataagtgataaactacctcatagagttgtaataaggacaaaggagttggtatttgtgaaaagattcttagggtctctagatggagtgcagcagcatgatcacttattaaataacattcttttgtgacttctcaggaaccaaggatacagtatccaattttttgttttttgtttttttttttttttgagagggagtctcgctctgtcgcccaggctggagtgcagtggcacaatctcagctcactgcaagctcagcctccccagcagctgggactacaggtgcacgccgccacacccggct

SEQ ID NO: 72121 - DNA, 1005 bp, Homo sapiens
aattcggcacgaggtttttttttgagacttaactctgtcaccaggctggagcgcagtggcaaggtctcaaaaaaaaaggcatcttcctaaagcaattgtatttgtgcttacctgtgccaggcactgttctaggtaagcactaagtgggctttaatacagcatattccaatggggaatcccaggaaccaaaagactaattgtccaagtccacaactagaagtggcacctctgcagaaacaagcatcaaattccctgctcaggaagaagccagatgagtcagccccattcgtctgtatgcccagtcccatccgtgtcctgctgtaactacatagatctcacctgagtaaagtgatttttttctgaaccagtggttctagtatgttttcaatccatattctcaggtgggtttgggtaactgcagtgctgggcaggaaatgaatgaatttctattgacttgcaaggtagaggtgaagcaaagctgtcagtaggtgttcaggtcccactctgctaaacttcagcttgcaatacccctttcttagactttccaaacaggcacttctggccttgttctttgtgtaggcagacagtattggttgcctatcttaggagtactagactgggtttgaatcctgatcccaccacttgctgttcatgagactttgggtgagttactcagcccctctgcctcaatttcatgttcacaaaataagtgataaactacctcatagagttgtaataaggacaaaggagttggtatttgtgaaaagattcttagggtctctagatggagtgcagcagcatgatcacttattaaataacattcttttgtgacttctcaggaaccaaggatacagtatccaattttttgttttttgtttttttttttttttgagagggagtctcgctctgtcgcccaggctggagtgcagtggcacaatctcagctcactgcaagctcagcctccccagcagctgggactacaggtgcacgccgccacacccggct

SEQ ID NO: 72122 - DNA, 2297 bp, Homo sapiens
gggctaggtagcggaggctgggttgcggacgtgcaccaaggacaggaagatgtcacccaagcgcatagctaaaagaaggtcccccccagcagatgccatccccaaaagcaagaaggtgaaggtctcacacaggtcccacagcacagaacccggcttggtgctgacactaggccagggcgacgtgggccagctggggctgggtgagaatgtgatggagaggaagaagccggccctggtatccattccggaggatgttgtgcaggctgaggctgggggcatgcacaccgtgtgtctaagcaaaagtggccaggtctattccttcggctgcaatgatgagggtgccctgggaagggacacatcagtggagggctcggagatggtccctgggaaagtggagctgcaagagaaggtggtacaggtgtcagcaggagacagtcacacagcagccctcaccgatgatggccgtgtcttcctctggggctccttccgggacaataacggtgtgattggactgttggagcccatgaagaagagcatggtgcctgtgcaggtgcagctggatgtgcctgtggtaaaggtggcctcaggaaacgaccacttggtgatgctgacagctgatggtgacctctacaccttgggctgcggggaacagggccagctaggccgtgtgcctgagttatttgccaaccgtggtggccggcaaggcctcgaacgactcctggtccccaagtgtgtgatgctgaaatccaggggaagccggggccacgtgagattccaggatgccttttgtggtgcctatttcacctttgccatctcccatgagggccacgtgtacggcttcggcctctccaactaccatcagcttggaactccgggcacagaatcttgcttcataccccagaacctaacatccttcaagaattccaccaagtcctgggtgggcttctctggtggccagcaccatacagtctgcatggattcggaaggaaaagcatacagcctgggccgggctgagtatgggcggctgggccttggagagggtgctgaggagaagagcatacccaccctcatctccaggctgcctgctgtctcctcggtggcttgtggggcctctgtggggtatgctgtgaccaaggatggtcgtgttttcgcctggggcatgggcaccaactaccagctgggcacagggcaggatgaggacgcctggagccctgtggagatgatgggcaaacagctggagaaccgtgtggtcttatctgtgtccagcgggggccagcatacagtcttattagtcaaggacaaagaacagagctgatgaagcctctgagggcctggcttctgtcctgcacaacctccctcacagaacagggaagcagtgacagctgcagatggcagcgggcctctccccagccctgagcactgtgtcagttcctgccttttctcatcagcagaacagaatccttttcctcttttccttcctcctctttggaattttcctgggacctacagaataaagggggggatggacagggggttttcaaaaggaacatggctcactcagagctatatggttagacgtttctccccttttccctaccttccatggtcctggttggccctggctttgcctactagaaaaccaaaacttcccccctggggttttgtgcccactctctgagaagttggggctccatcaagccccattctagtcatgtgcccctttcctgtccctaacagtccacaggcaaacaaatggtacagtcataagagccatctgtcacggacccacgcccagaggaacgtgcagaaaaaagcagagctacatggctgtgggcaactataagccaaatatttggctcagaacaggtgtccatgggacaaaaaagaacgatcctccacttgaccaagaaaaaagtgattctcccagaagcacaaagcatactcttgcccctcaggtgttgcttgtgtacatcgtacccatccattcggcttcacctgcagccaacggcctggaatcgcaaagagacaccactctgggcagagcagagcagggtatggggtggggagagagggtggagggttttataaacaaacttaacagcaatattgaaaggaggtgggggattgagggagggacagagtgttggagggccagagactagtcctgagatggaaacagcaacttgtacagtggctgagaaaataggatatagttttgatttttttaattgtaaaatattttggagggagaacaaaatcttttaacattttgaataaatttagagttttataaaata

SEQ ID NO: 72123 - DNA, 1600 bp, Homo sapiens
attcattgtgcatcctttgcggggtcgtctaacccctccaagccagttttgtcatctgtaaagtgagaatgtccatatcctgatgggaggtggcctcactgtgggaggagattgagaagggcagctctcagaacaccttcacccctgatggctccggcctttcccccaggaactccgggcacagaatcttgcttcataccccagaacctaacatccttcaagaattccaccaagtcctgggtgggcttctctggtggccagcaccatacagtctgcatggattcggaaggaaaagcatacagcctgggccgggctgagtatgggcggctgggccttggagagggtgctgaggagaagagcatacccaccctcatctccaggctgcctgctgtctcctcggtggcttgtggggcctctgtggggtatgctgtgaccaaggatggtcgtgttttcgcctggggcatgggcaccaactaccagctgggcacagggcaggatgaggacgcctggagccctgtggagatgatgggcaaacagctggagaaccgtgtggtcttatctgtgtccagcgggggccagcatacagtcttattagtcaaggacaaagaacagagctgatgaagcctctgagggcctggcttctgtcctgcacaacctccctcacagaacagggaagcagtgacagctgcagatggcagcgggcctctccccagccctgagcactgtgtcagttcctgccttttctcatcagcagaacagaatccttttcctcttttccttcctcctctttggaattttcctgggacctacagaataaagggggggatggacagggggttttcaaaaggaacatggctcactcagagctatatggttagacgtttctccccttttccctaccttccatggtcctggttggccctggctttgcctactagaaaaccaaaacttcccccctggggttttgtgcccactctctgagaagttggggctccatcaagccccattctagtcatgtgcccctttcctgtccctaacagtccacaggcaaacaaatggtacagtcataagagccatctgtcacggacccacgcccagaggaacgtgcagaaaaaagcagagctacatggctgtgggcaactataagccaaatatttggctcagaacaggtgtccatgggacaaaaaagaacgatcctccacttgaccaagaaaaaagtgattctcccagaagcacaaagcatactcttgcccctcaggtgttgcttgtgtacatcgtacccatccattcggcttcacctgcagccaacggcctggaatcgcaaagagacaccactctgggcagagcagagcagggtatggggtggggagagagggtggagggttttataaacaaacttaacagcaatattgaaaggaggtgggggattgagggagggacagagtgttggagggccagagactagtcctgagatggaaacagcaacttgtacagtggctgagaaaataggatatagttttgatttttttaattgtaaaatattttggagggagaacaaaatcttttaacattttgaataaatttagagttttataaaata

SEQ ID NO: 72124 - DNA, 484 bp, Homo sapiens
accaaagaagttgtgaagttgaaaagggctgaaagaattacccatgaaaaagtgcctgaagagtcggaagagctgcgcagtaaattcaagcgcagaacagaagagggctattatgaagccattaccgctgtggagctcaagtctcgaaagaaggatgaatcctatgaggaactcctcaggaagacaaaagatgaacttctccactggaccaaagagttaactgaagaggaaaagaaagctcttgccgaagaaggcaaaatcacgattccaacttttaaacctgacaagattgaactaagtcctagtatggaggctccaaaaatcttcgaaagaatccagagccaaacagtgggccaaggatctgatgcacacttccgggtcagagtcgtggggaaaccagaccccgaatgtgaatggtacaaaaatggtgtcaaaattgaacggtctgaccggatctactggtactggcccgaagacaatgttt

SEQ ID NO: 72125 - DNA, 539 bp, Homo sapiens
atcctagcatagggatatagcagaaaataaaactggcaaagtctctatcttaaaataccttggtttgggtggctaaaacaataaatttattcctcataatactactgaaggctgggaagtccaagattacatgctggctattgttgggttcctggtgaagaccctctccttggtttacagacaccttcttgctgtgtccacatggcagagagagagagaaagagatcagctctcttgtttctttttataagggcactgatcccattcgtaagaactctaccttcatgacctaaatagccccacaagtcaccactttctaataccatacattgaggaataggctttaacatacgaattttggggggacacaaacattcagtccgtagcaatagataaagagcaagccacataagttatctggggaaagagtgttaggcagaggtgacaccaattgcaagggccatgaaactgggagtgttccaagatgggttcaggaacagccaagaagccagtgttggctggcacggtagtttttgtga

SEQ ID NO: 72126 - DNA, 319 bp, Homo sapiens
gtctcgatttcctgacctcgtgatcggcccgcctcggcctcccaaagtgctgggattacaggcgtgagccaccgcacctggccttgaaccctttgaagtattgatgcaaaaacaagtggtcagctatggccaaattcgcaattcaaaaagatccaagaaagcaagttgaacatcctgattggagatgggacacacccaaacgtgtgtcttgaggtggctgcaaagtcctccggtctgagccagtgtaagcaggttttaccccagcccatgatttagagagatgttcagtgcagatcctgagctcagcagagagcaacat

SEQ ID NO: 72127 - DNA, 351 bp, Homo sapiens
ttagttcaccaactattgttagtatcagtgtattttatgtgtggcctaaaataattcttcttccagtgtggctcagggaagccaaaagattggccacccctggtctaaagttataagttaactaagctaatttaatatattataacccaaccaaatgaagaatgttttgacagaaatatctggtaagctgcatggacaccagaaaagaggcatccaaagccccataatttttctaggtctgtccagcacttttcctcagtgagagacatcatttctacatgatgaaaatatactggaaaggtgtagatatactcttaagaaagcgaagactaaattcctcaggcttttttg

SEQ ID NO: 72128 - DNA, 496 bp, Homo sapiens
ctggcctggttctgtggcggtggcttttcttcgctaatcatgagctgtactttgagtatgcagtagattccgtcagcatctcagtgggagataggggggaaagaggggttttaacacagtgttctctttgcattgagtgaagaagctgttgatctctgaaggaggaaaggagagactggaaccacatgaaggcttgtgctgtgaaaccctgaaaccctgacggtgccttttgatcactgtgttttaacaaagctgacaatcctcagccacacaaatcttgggaactaaaataagtattcatttaactcttgactaaaggttaaaagatacagttaaaaagaaatctaaaacccagagtggtaattccactttttctttctctttctgttgttggaacctgagctctctaggaaaactaacatttgttaagggcctgccatgtgccagattcctgtctgtaagagaggtataattattattttacactatctcaatc

SEQ ID NO: 72129 - DNA, 352 bp, Homo sapiens
gaaagagtactcagaaacctaagtctgaggctgagaacagcttggaaatggaagtaaagtgggaaagatctgctcccggtggcaaagagagccatttatttttactttgggcataaaacttacatggaaaggataatggttacaggtgaatatttttatcttgtatattatttttaaaggaacatgtgggttttttttctcccattgatgtggttgaatgaattcaaacaaatggatgcttcctttagaaatgcgatatgtgaacttgcggtcgttattttctgtctcctgaagaattggcggttgtatccttgttgaagttgaggagcttgattaatattgtaataaagcg

SEQ ID NO: 72130 - DNA, 697 bp, Homo sapiens
  misc_feature (566)..(566): n is a, c, g, or t
  misc_feature (598)..(598): n is a, c, g, or t
  misc_feature (669)..(669): n is a, c, g, or t
  misc_feature (678)..(678): n is a, c, g, or t
cacgagccaggcacatggagccatttatgtatcagatggttactgcaacagcaggatttgtgcagttttcaccaagtggaaagttcatcacacagtggggagaagagtcttcagggagcagtcctctgccaggccagttcactgttcctcacagcttggctcttgtgcctcttttgggccaattatgtgtggcagaccgggaaaatggtcggatccagtgttttaaaactgacaccaaagaatttgtgagagagattaagcattcatcatttggaagaaatgtatttgcaatttcatatataccaggcttgctctttgcagtgaatgggaagcctcattttggggaccaagaacctgtacaaggatttgtgatgaacttttccaatggggaaattatagacatcttcaagccagtgcgcagcttttgatatgcctcatgatattgttgcatctgaagatgggactgtgtacattggagatgctcataccaacaccgtgtggaagttcaccttgactgagaaattggaacatcgatccagttaaaaagctggcattgagtccagggnaatccaaaggaagccgaggccagtttgtttgnaaacccaaaatgggaggaaccaaaccccaccttccttccaggatttgccggaggatgccaaggaggaaacnggaaactgnttccaaggagccggggttc

SEQ ID NO: 72131 - DNA, 284 bp, Homo sapiens
ttttcatttatttagatttcttcattttttttcagtaatatttcaactactgttttgttgtttttagtgtacaagtcctacactttggttagactatttttagtatgtttgaaataggatttagtttgtatcctacaaatttgctgaattcatttattatttgtttttctatgtgtgtagacagatgtattgctttaaagaaaaattaggaccagattgtttggctttcacatttgtgcctcaccacaattaatcacaatgaaatagttctgtgcgttttccga

SEQ ID NO: 72132 - DNA, 393 bp, Homo sapiens
tatgtgacacacaggctcccctttgccttccaccatgactgtaaattccctatggcctcaccagaagcagatgccagcaccccacttcctatacagcttgcagaaccaagaacaaattaaacttgttttctttataaagacagactcaggcatttatttgtatcagtgcacaaacagcctcatacactgggcatacgtgttatatcctgctttccttcaatttactattagcgtttttatgtcacaaactattcctcaaaacattattttaatgactgtataatagtccatcatttaaatatattcataacttattctgtagttaaccatccacccgtttctggacaattaggggtgtgtgtgggtgtttgttgtaataaaaaactctaaacc

SEQ ID NO: 72133 - DNA, 442 bp, Homo sapiens
atacttttttactaggtcctggggaatcaatctcaaccctcatacctgtgttggagggtgaagagtagaaaaatagagagtagtgtgatacaccttttgcacatctgtgtcacactactctcttacctcccctgccctgaccctgtccttacaagttgcagagaaccttaactgtctacagatcaaagtgcacgtttagactggcattcaggattgtcaacaatctgtatcaccatcttcaagcagtttgtactcttgtctaattgaactacttttgttttccctgtataactcccttaaatttcttttttactaagttttcccttcacctgtaatacttttccctccacctgtaatattacctcttccctactgtttttcttctttttcaatcacaatatatgtaaatcttatctaccattaaaattctattcaccacaaa

SEQ ID NO: 72134 - DNA, 377 bp, Homo sapiens
  misc_feature (19)..(19): n is a, c, g, or t
ttttttgagacggagcttngctctgtcacccaggctggagtgcagtaagcccatctctgctcactgcaagcttacaccattctcctgcctcagcttcccaagtagctgggaccacagatgcccgccaccatgcccggctaattttttgtgtgtgtgtttttagtagagatggggtttcaccatgttagccaggatggtttggccctccagcttcctctgagtcccttcataaacatttgtttatcttgtaaaataatttgttccatttctaattagtacataatgagagaggcagtgtgatggtttgtgcctaagccctttcttgccaagactttcaaagccaaaaacttcaccagttttcctagatgactagacag

SEQ ID NO: 72135 - DNA, 2508 bp, Homo sapiens
agcacatctcccggcggcgggccgcggaagcagtgcagacgcggctcctagcggatgggtgctattgtgaggcggttgtagaagttaataaaggtatccatggagaacactgaaaactcagtggattcaaaatccattaaaaatttggaaccaaagatcatacatggaagcgaatcaatggactctggaatatccctggacaacagttataaaatggattatcctgagatgggtttatgtataataattaataataagaattttcataaaagcactggaatgacatctcggtctggtacagatgtcgatgcagcaaacctcagggaaacattcagaaacttgaaatatgaagtcaggaataaaaatgatcttacacgtgaagaaattgtggaattgatgcgtgatgtttctaaagaagatcacagcaaaaggagcagttttgtttgtgtgcttctgagccatggtgaagaaggaataatttttggaacaaatggacctgttgacctgaaaaaaataacaaactttttcagaggggatcgttgtagaagtctaactggaaaacccaaacttttcattattcaggcctgccgtggtacagaactggactgtggcattgagacagacagtggtgttgatgatgacatggcgtgtcataaaataccagtggaggccgacttcttgtatgcatactccacagcacctggttattattcttggcgaaattcaaaggatggctcctggttcatccagtcgctttgtgccatgctgaaacagtatgccgacaagcttgaatttatgcacattcttacccgggttaaccgaaaggtggcaacagaatttgagtccttttcctttgacgctacttttcatgcaaagaaacagattccatgtattgtttccatgctcacaaaagaactctatttttatcactaaagaaatggttggttggtggttttttttagtttgtatgccaagtgagaagatggtatatttggtactgtatttccctctcattttgacctactctcatgctgcagagggtactttaagacatactccttccatcaaatagaaccactatgaagctacctcaaacttccagtcaggtagttgcaattgaattaaattaggaataaataaaaatggatactggtgcagtcattatgagaggcaatgattgttaatttacagctttcatgattagcaagttacagtgatgctgtgctatgaattttcaagtaattgtgaaaaagttaaacattgaagtaatgaatttttatgatattccccccacttaagactgtgtattctagttttgtcaaactgtagaaatgatgatgtggaagaacttaggcatctgtgggcatggtcaaaggctcaaacctttattttagaattgatatacacggatgacttaactgcatttttagaccatttatctgggattatggttttgtgatgtttgtcctgaacacttttgttgtaaaaaaataataataatgtttaatattgagaaagaaactaatattttatgtgagagaaagtgtgagcaaactaacttgacttttaaggctaaaacttaacattcatagaggggtggagttttaactgtaaggtgctacaatgcccctggatctaccagcataaatatcttctgatttgtccctatgcatatcagttgagcttcatataccagcaatatatctgaagagctattatataaaaaccccaaactgttgattattagccaggtaatgtgaataaattctataggaacatatgaaaatacaacttaaataataaacagtggaatataaggaaagcaataaatgaatgggctgagctgcctgtaacttgagagtagatggtttgagcctgagcagagacatgactcagcctgttccatgaaggcagagccatggaccacgcaggaagggcctacagcccatttctccatacgcactggtatgtgtggatgatgctgccagggcgccatcgccaagtaagaaagtgaagcaaatcagaaacttgtgaagtggaaatgttctaaaggtggtgaggcaataaaaatcatagtactctttgtagcaaaattcttaagtatgttattttctgttgaagtttacaatcaaaggaaaatagtaatgttttatactgtttactgaaagaaaaagacctatgagcacataggactctagacggcatccagccggaggccagagctgagcactcagcccgggaggcaggctccaggcctcagcaggtgcggagccgtcactgcaccaagtctcactggctgtcagtatgacatttcacgggagatttcttgttgctcaaaaaatgagctcgcatttgtcaatgacagtttcttttttcttactagacctgtaacttttgtaaatacacatagcatgtaatggtatcttaaagtgtgtttctatgtgacaattttgtacaaatttgttattttccatttttatttcaaaatatacattcaaacttaaaatt

SEQ ID NO: 72136 - DNA, 753 bp, Homo sapiens
taacggcctaggtagcgaggcctgggtttagataaacttaaataataaacagtggaatataaggaaagcaataaatgaatgggctgagctgcctgtaacttgagagtagatggtttgagcctgagcagagacatgactcagcctgttccatgaaggcagagccatggaccacgcaggaagggcctacagcccatttctccatacgcactggtatgtgtggatgatgctgccagggcgccatcgccaagtaagaaagtgaagcaaatcagaaacttgtgaagtggaaatgttctaaaggtggtgaggcaataaaaatcatagtactctttgtagcaaaattcttaagtatgttattttctgttgaagtttacaatcaaaggaaaatagtaatgttttatactgtttactgaaagaaaaagacctatgagcacataggactctagacggcatccagccggaggccagagctgagcactcagcccgggaggcaggctccaggcctcagcaggtgcggagccgtcactgcaccaagtctcactggctgtcagtatgacatttcacgggagatttcttgttgctcaaaaaatgagctcgcatttgtcaatgacagtttcttttttcttactagacctgtaacttttgtaaatacacatagcatgtaatggtatcttaaagtgtgtttctatgtgacaattttgtacaaatttgttattttccatttttatttcaaaatatacattcaaacttaaaatt

SEQ ID NO: 72137 - DNA, 2627 bp, Homo sapiens
cagcgggttaaggcttttgatttagggagagatagttgcagggtttaaactccaattccttttcggccctgcagagtttcgtgagtgctcgcagctcatacctgtggctgtgtatccgtggccacagctggttggcgtcgccttgaaatcccaggccgtgaggagttagcgagccctgctcacactcggcgctctggttttcgttaataaaggtatccatggagaacactgaaaactcagtggattcaaaatccattaaaaatttggaaccaaagatcatacatggaagcgaatcaatggactctggaatatccctggacaacagttataaaatggattatcctgagatgggtttatgtataataattaataataagaattttcataaaagcactggaatgacatctcggtctggtacagatgtcgatgcagcaaacctcagggaaacattcagaaacttgaaatatgaagtcaggaataaaaatgatcttacacgtgaagaaattgtggaattgatgcgtgatgtttctaaagaagatcacagcaaaaggagcagttttgtttgtgtgcttctgagccatggtgaagaaggaataatttttggaacaaatggacctgttgacctgaaaaaaataacaaactttttcagaggggatcgttgtagaagtctaactggaaaacccaaacttttcattattcaggcctgccgtggtacagaactggactgtggcattgagacagacagtggtgttgatgatgacatggcgtgtcataaaataccagtggaggccgacttcttgtatgcatactccacagcacctggttattattcttggcgaaattcaaaggatggctcctggttcatccagtcgctttgtgccatgctgaaacagtatgccgacaagcttgaatttatgcacattcttacccgggttaaccgaaaggtggcaacagaatttgagtccttttcctttgacgctacttttcatgcaaagaaacagattccatgtattgtttccatgctcacaaaagaactctatttttatcactaaagaaatggttggttggtggttttttttagtttgtatgccaagtgagaagatggtatatttggtactgtatttccctctcattttgacctactctcatgctgcagagggtactttaagacatactccttccatcaaatagaaccactatgaagctacctcaaacttccagtcaggtagttgcaattgaattaaattaggaataaataaaaatggatactggtgcagtcattatgagaggcaatgattgttaatttacagctttcatgattagcaagttacagtgatgctgtgctatgaattttcaagtaattgtgaaaaagttaaacattgaagtaatgaatttttatgatattccccccacttaagactgtgtattctagttttgtcaaactgtagaaatgatgatgtggaagaacttaggcatctgtgggcatggtcaaaggctcaaacctttattttagaattgatatacacggatgacttaactgcatttttagaccatttatctgggattatggttttgtgatgtttgtcctgaacacttttgttgtaaaaaaataataataatgtttaatattgagaaagaaactaatattttatgtgagagaaagtgtgagcaaactaacttgacttttaaggctaaaacttaacattcatagaggggtggagttttaactgtaaggtgctacaatgcccctggatctaccagcataaatatcttctgatttgtccctatgcatatcagttgagcttcatataccagcaatatatctgaagagctattatataaaaaccccaaactgttgattattagccaggtaatgtgaataaattctataggaacatatgaaaatacaacttaaataataaacagtggaatataaggaaagcaataaatgaatgggctgagctgcctgtaacttgagagtagatggtttgagcctgagcagagacatgactcagcctgttccatgaaggcagagccatggaccacgcaggaagggcctacagcccatttctccatacgcactggtatgtgtggatgatgctgccagggcgccatcgccaagtaagaaagtgaagcaaatcagaaacttgtgaagtggaaatgttctaaaggtggtgaggcaataaaaatcatagtactctttgtagcaaaattcttaagtatgttattttctgttgaagtttacaatcaaaggaaaatagtaatgttttatactgtttactgaaagaaaaagacctatgagcacataggactctagacggcatccagccggaggccagagctgagcactcagcccgggaggcaggctccaggcctcagcaggtgcggagccgtcactgcaccaagtctcactggctgtcagtatgacatttcacgggagatttcttgttgctcaaaaaatgagctcgcatttgtcaatgacagtttcttttttcttactagacctgtaacttttgtaaatacacatagcatgtaatggtatcttaaagtgtgtttctatgtgacaattttgtacaaatttgttattttccatttttatttcaaaatatacattcaaacttaaaatt

SEQ ID NO: 72138 - DNA, 2554 bp, Homo sapiens
agcacatctcccggcggcgggccgcggaagcagtgcagacgcggctcctagcggatgggtgctattgtgaggcggttgtagaagagtttcgtgagtgctcgcagctcatacctgtggctgtgtatccgtggccacagctggttggcgtcgccttgaaatcccaggccgtgaggagttagcgagccctgctcacactcggcgctctggttttcggtgggtgtgccctgcacctgcctcttcccccattctcattaataaaggtatccatggagaacactgaaaactcagtggattcaaaatccattaaaaatttggaaccaaagatcatacatggaagcgaatcaatggactctggaatatccctggacaacagttataaaatggattatcctgagatgggtttatgtataataattaataataagaattttcataaaagcactggaatgacatctcggtctggtacagatgtcgatgcagcaaacctcagggaaacattcagaaacttgaaatatgaagtcaggaataaaaatgatcttacacgtgaagaaattgtggaattgatgcgtgatgtttctaaagaagatcacagcaaaaggagcagttttgtttgtgtgcttctgagccatggtgaagaaggaataatttttggaacaaatggacctgttgacctgaaaaaaataacaaactttttcagaggggatcgttgtagaagtctaactggaaaacccaaacttttcattattcaggttattattcttggcgaaattcaaaggatggctcctggttcatccagtcgctttgtgccatgctgaaacagtatgccgacaagcttgaatttatgcacattcttacccgggttaaccgaaaggtggcaacagaatttgagtccttttcctttgacgctacttttcatgcaaagaaacagattccatgtattgtttccatgctcacaaaagaactctatttttatcactaaagaaatggttggttggtggttttttttagtttgtatgccaagtgagaagatggtatatttggtactgtatttccctctcattttgacctactctcatgctgcagagggtactttaagacatactccttccatcaaatagaaccactatgaagctacctcaaacttccagtcaggtagttgcaattgaattaaattaggaataaataaaaatggatactggtgcagtcattatgagaggcaatgattgttaatttacagctttcatgattagcaagttacagtgatgctgtgctatgaattttcaagtaattgtgaaaaagttaaacattgaagtaatgaatttttatgatattccccccacttaagactgtgtattctagttttgtcaaactgtagaaatgatgatgtggaagaacttaggcatctgtgggcatggtcaaaggctcaaacctttattttagaattgatatacacggatgacttaactgcatttttagaccatttatctgggattatggttttgtgatgtttgtcctgaacacttttgttgtaaaaaaataataataatgtttaatattgagaaagaaactaatattttatgtgagagaaagtgtgagcaaactaacttgacttttaaggctaaaacttaacattcatagaggggtggagttttaactgtaaggtgctacaatgcccctggatctaccagcataaatatcttctgatttgtccctatgcatatcagttgagcttcatataccagcaatatatctgaagagctattatataaaaaccccaaactgttgattattagccaggtaatgtgaataaattctataggaacatatgaaaatacaacttaaataataaacagtggaatataaggaaagcaataaatgaatgggctgagctgcctgtaacttgagagtagatggtttgagcctgagcagagacatgactcagcctgttccatgaaggcagagccatggaccacgcaggaagggcctacagcccatttctccatacgcactggtatgtgtggatgatgctgccagggcgccatcgccaagtaagaaagtgaagcaaatcagaaacttgtgaagtggaaatgttctaaaggtggtgaggcaataaaaatcatagtactctttgtagcaaaattcttaagtatgttattttctgttgaagtttacaatcaaaggaaaatagtaatgttttatactgtttactgaaagaaaaagacctatgagcacataggactctagacggcatccagccggaggccagagctgagcactcagcccgggaggcaggctccaggcctcagcaggtgcggagccgtcactgcaccaagtctcactggctgtcagtatgacatttcacgggagatttcttgttgctcaaaaaatgagctcgcatttgtcaatgacagtttcttttttcttactagacctgtaacttttgtaaatacacatagcatgtaatggtatcttaaagtgtgtttctatgtgacaattttgtacaaatttgttattttccatttttatttcaaaatatacattcaaacttaaaatt

SEQ ID NO: 72139 - DNA, 1620 bp, Homo sapiens
tgtgtattctagttttgtcaaactgtagaaatgatgatgtggaagagaaatggttggttggtggttttttttagtttgtatgccaagtgagaagatggtatatttggtactgtatttccctctcattttgacctactctcatgctgcagagggtactttaagacatactccttccatcaaatagaaccactatgaagctacctcaaacttccagtcaggtagttgcaattgaattaaattaggaataaataaaaatggatactggtgcagtcattatgagaggcaatgattgttaatttacagctttcatgattagcaagttacagtgatgctgtgctatgaattttcaagtaattgtgaaaaagttaaacattgaagtaatgaatttttatgatattccccccacttaagactgtgtattctagttttgtcaaactgtagaaatgatgatgtggaagaacttaggcatctgtgggcatggtcaaaggctcaaacctttattttagaattgatatacacggatgacttaactgcatttttagaccatttatctgggattatggttttgtgatgtttgtcctgaacacttttgttgtaaaaaaataataataatgtttaatattgagaaagaaactaatattttatgtgagagaaagtgtgagcaaactaacttgacttttaaggctaaaacttaacattcatagaggggtggagttttaactgtaaggtgctacaatgcccctggatctaccagcataaatatcttctgatttgtccctatgcatatcagttgagcttcatataccagcaatatatctgaagagctattatataaaaaccccaaactgttgattattagccaggtaatgtgaataaattctataggaacatatgaaaatacaacttaaataataaacagtggaatataaggaaagcaataaatgaatgggctgagctgcctgtaacttgagagtagatggtttgagcctgagcagagacatgactcagcctgttccatgaaggcagagccatggaccacgcaggaagggcctacagcccatttctccatacgcactggtatgtgtggatgatgctgccagggcgccatcgccaagtaagaaagtgaagcaaatcagaaacttgtgaagtggaaatgttctaaaggtggtgaggcaataaaaatcatagtactctttgtagcaaaattcttaagtatgttattttctgttgaagtttacaatcaaaggaaaatagtaatgttttatactgtttactgaaagaaaaagacctatgagcacataggactctagacggcatccagccggaggccagagctgagcactcagcccgggaggcaggctccaggcctcagcaggtgcggagccgtcactgcaccaagtctcactggctgtcagtatgacatttcacgggagatttcttgttgctcaaaaaatgagctcgcatttgtcaatgacagtttcttttttcttactagacctgtaacttttgtaaatacacatagcatgtaatggtatcttaaagtgtgtttctatgtgacaattttgtacaaatttgttattttccatttttatttcaaaatatacattcaaacttaaaatt

SEQ ID NO: 72140 - DNA, 2675 bp, Homo sapiens
agcacatctcccggcggcgggccgcggaagcagtgcagacgcggctcctagcggatgggtgctattgtgaggcggttgtagaagagtttcgtgagtgctcgcagctcatacctgtggctgtgtatccgtggccacagctggttggcgtcgccttgaaatcccaggccgtgaggagttagcgagccctgctcacactcggcgctctggttttcggtgggtgtgccctgcacctgcctcttcccccattctcattaataaaggtatccatggagaacactgaaaactcagtggattcaaaatccattaaaaatttggaaccaaagatcatacatggaagcgaatcaatggactctggaatatccctggacaacagttataaaatggattatcctgagatgggtttatgtataataattaataataagaattttcataaaagcactggaatgacatctcggtctggtacagatgtcgatgcagcaaacctcagggaaacattcagaaacttgaaatatgaagtcaggaataaaaatgatcttacacgtgaagaaattgtggaattgatgcgtgatgtttctaaagaagatcacagcaaaaggagcagttttgtttgtgtgcttctgagccatggtgaagaaggaataatttttggaacaaatggacctgttgacctgaaaaaaataacaaactttttcagaggggatcgttgtagaagtctaactggaaaacccaaacttttcattattcaggcctgccgtggtacagaactggactgtggcattgagacagacagtggtgttgatgatgacatggcgtgtcataaaataccagtggaggccgacttcttgtatgcatactccacagcacctggttattattcttggcgaaattcaaaggatggctcctggttcatccagtcgctttgtgccatgctgaaacagtatgccgacaagcttgaatttatgcacattcttacccgggttaaccgaaaggtggcaacagaatttgagtccttttcctttgacgctacttttcatgcaaagaaacagattccatgtattgtttccatgctcacaaaagaactctatttttatcactaaagaaatggttggttggtggttttttttagtttgtatgccaagtgagaagatggtatatttggtactgtatttccctctcattttgacctactctcatgctgcagagggtactttaagacatactccttccatcaaatagaaccactatgaagctacctcaaacttccagtcaggtagttgcaattgaattaaattaggaataaataaaaatggatactggtgcagtcattatgagaggcaatgattgttaatttacagctttcatgattagcaagttacagtgatgctgtgctatgaattttcaagtaattgtgaaaaagttaaacattgaagtaatgaatttttatgatattccccccacttaagactgtgtattctagttttgtcaaactgtagaaatgatgatgtggaagaacttaggcatctgtgggcatggtcaaaggctcaaacctttattttagaattgatatacacggatgacttaactgcatttttagaccatttatctgggattatggttttgtgatgtttgtcctgaacacttttgttgtaaaaaaataataataatgtttaatattgagaaagaaactaatattttatgtgagagaaagtgtgagcaaactaacttgacttttaaggctaaaacttaacattcatagaggggtggagttttaactgtaaggtgctacaatgcccctggatctaccagcataaatatcttctgatttgtccctatgcatatcagttgagcttcatataccagcaatatatctgaagagctattatataaaaaccccaaactgttgattattagccaggtaatgtgaataaattctataggaacatatgaaaatacaacttaaataataaacagtggaatataaggaaagcaataaatgaatgggctgagctgcctgtaacttgagagtagatggtttgagcctgagcagagacatgactcagcctgttccatgaaggcagagccatggaccacgcaggaagggcctacagcccatttctccatacgcactggtatgtgtggatgatgctgccagggcgccatcgccaagtaagaaagtgaagcaaatcagaaacttgtgaagtggaaatgttctaaaggtggtgaggcaataaaaatcatagtactctttgtagcaaaattcttaagtatgttattttctgttgaagtttacaatcaaaggaaaatagtaatgttttatactgtttactgaaagaaaaagacctatgagcacataggactctagacggcatccagccggaggccagagctgagcactcagcccgggaggcaggctccaggcctcagcaggtgcggagccgtcactgcaccaagtctcactggctgtcagtatgacatttcacgggagatttcttgttgctcaaaaaatgagctcgcatttgtcaatgacagtttcttttttcttactagacctgtaacttttgtaaatacacatagcatgtaatggtatcttaaagtgtgtttctatgtgacaattttgtacaaatttgttattttccatttttatttcaaaatatacattcaaacttaaaatt

SEQ ID NO: 72141 - DNA, 2472 bp, Homo sapiens
ctgcaggaattcggcacgaggggtgctattgtgaggcggttgtagaagttaataaaggtatccatggagaacactgaaaactcagtggattcaaaatccattaaaaatttggaaccaaagatcatacatggaagcgaatcaatggactctggaatatccctggacaacagttataaaatggattatcctgagatgggtttatgtataataattaataataagaattttcataaaagcactggaatgacatctcggtctggtacagatgtcgatgcagcaaacctcagggaaacattcagaaacttgaaatatgaagtcaggaataaaaatgatcttacacgtgaagaaattgtggaattgatgcgtgatgtttctaaagaagatcacagcaaaaggagcagttttgtttgtgtgcttctgagccatggtgaagaaggaataatttttggaacaaatggacctgttgacctgaaaaaaataacaaactttttcagaggggatcgttgtagaagtctaactggaaaacccaaacttttcattattcaggcctgccgtggtacagaactggactgtggcattgagacagacagtggtgttgatgatgacatggcgtgtcataaaataccagtggaggccgacttcttgtatgcatactccacagcacctggttattattcttggcgaaattcaaaggatggctcctggttcatccagtcgctttgtgccatgctgaaacagtatgccgacaagcttgaatttatgcacattcttacccgggttaaccgaaaggtggcaacagaatttgagtccttttcctttgacgctacttttcatgcaaagaaacagattccatgtattgtttccatgctcacaaaagaactctatttttatcactaaagaaatggttggttggtggttttttttagtttgtatgccaagtgagaagatggtatatttggtactgtatttccctctcattttgacctactctcatgctgcagagggtactttaagacatactccttccatcaaatagaaccactatgaagctacctcaaacttccagtcaggtagttgcaattgaattaaattaggaataaataaaaatggatactggtgcagtcattatgagaggcaatgattgttaatttacagctttcatgattagcaagttacagtgatgctgtgctatgaattttcaagtaattgtgaaaaagttaaacattgaagtaatgaatttttatgatattccccccacttaagactgtgtattctagttttgtcaaactgtagaaatgatgatgtggaagaacttaggcatctgtgggcatggtcaaaggctcaaacctttattttagaattgatatacacggatgacttaactgcatttttagaccatttatctgggattatggttttgtgatgtttgtcctgaacacttttgttgtaaaaaaataataataatgtttaatattgagaaagaaactaatattttatgtgagagaaagtgtgagcaaactaacttgacttttaaggctaaaacttaacattcatagaggggtggagttttaactgtaaggtgctacaatgcccctggatctaccagcataaatatcttctgatttgtccctatgcatatcagttgagcttcatataccagcaatatatctgaagagctattatataaaaaccccaaactgttgattattagccaggtaatgtgaataaattctataggaacatatgaaaatacaacttaaataataaacagtggaatataaggaaagcaataaatgaatgggctgagctgcctgtaacttgagagtagatggtttgagcctgagcagagacatgactcagcctgttccatgaaggcagagccatggaccacgcaggaagggcctacagcccatttctccatacgcactggtatgtgtggatgatgctgccagggcgccatcgccaagtaagaaagtgaagcaaatcagaaacttgtgaagtggaaatgttctaaaggtggtgaggcaataaaaatcatagtactctttgtagcaaaattcttaagtatgttattttctgttgaagtttacaatcaaaggaaaatagtaatgttttatactgtttactgaaagaaaaagacctatgagcacataggactctagacggcatccagccggaggccagagctgagcactcagcccgggaggcaggctccaggcctcagcaggtgcggagccgtcactgcaccaagtctcactggctgtcagtatgacatttcacgggagatttcttgttgctcaaaaaatgagctcgcatttgtcaatgacagtttcttttttcttactagacctgtaacttttgtaaatacacatagcatgtaatggtatcttaaagtgtgtttctatgtgacaattttgtacaaatttgttattttccatttttatttcaaaatatacattcaaacttaaaatt

SEQ ID NO: 72142 - DNA, 2637 bp, Homo sapiens
agcacatctcccggcggcgggccgcggaagcagtgcagacgcggctcctagcggatgggtgctattgtgaggcggttgtagaagagtttcgtgagtgctcgcagctcatacctgtggctgtgtatccgtggccacagctggttggcgtcgccttgaaatcccaggccgtgaggagttagcgagccctgctcacactcggcgctctggttttcgttaataaaggtatccatggagaacactgaaaactcagtggattcaaaatccattaaaaatttggaaccaaagatcatacatggaagcgaatcaatggactctggaatatccctggacaacagttataaaatggattatcctgagatgggtttatgtataataattaataataagaattttcataaaagcactggaatgacatctcggtctggtacagatgtcgatgcagcaaacctcagggaaacattcagaaacttgaaatatgaagtcaggaataaaaatgatcttacacgtgaagaaattgtggaattgatgcgtgatgtttctaaagaagatcacagcaaaaggagcagttttgtttgtgtgcttctgagccatggtgaagaaggaataatttttggaacaaatggacctgttgacctgaaaaaaataacaaactttttcagaggggatcgttgtagaagtctaactggaaaacccaaacttttcattattcaggcctgccgtggtacagaactggactgtggcattgagacagacagtggtgttgatgatgacatggcgtgtcataaaataccagtggaggccgacttcttgtatgcatactccacagcacctggttattattcttggcgaaattcaaaggatggctcctggttcatccagtcgctttgtgccatgctgaaacagtatgccgacaagcttgaatttatgcacattcttacccgggttaaccgaaaggtggcaacagaatttgagtccttttcctttgacgctacttttcatgcaaagaaacagattccatgtattgtttccatgctcacaaaagaactctatttttatcactaaagaaatggttggttggtggttttttttagtttgtatgccaagtgagaagatggtatatttggtactgtatttccctctcattttgacctactctcatgctgcagagggtactttaagacatactccttccatcaaatagaaccactatgaagctacctcaaacttccagtcaggtagttgcaattgaattaaattaggaataaataaaaatggatactggtgcagtcattatgagaggcaatgattgttaatttacagctttcatgattagcaagttacagtgatgctgtgctatgaattttcaagtaattgtgaaaaagttaaacattgaagtaatgaatttttatgatattccccccacttaagactgtgtattctagttttgtcaaactgtagaaatgatgatgtggaagaacttaggcatctgtgggcatggtcaaaggctcaaacctttattttagaattgatatacacggatgacttaactgcatttttagaccatttatctgggattatggttttgtgatgtttgtcctgaacacttttgttgtaaaaaaataataataatgtttaatattgagaaagaaactaatattttatgtgagagaaagtgtgagcaaactaacttgacttttaaggctaaaacttaacattcatagaggggtggagttttaactgtaaggtgctacaatgcccctggatctaccagcataaatatcttctgatttgtccctatgcatatcagttgagcttcatataccagcaatatatctgaagagctattatataaaaaccccaaactgttgattattagccaggtaatgtgaataaattctataggaacatatgaaaatacaacttaaataataaacagtggaatataaggaaagcaataaatgaatgggctgagctgcctgtaacttgagagtagatggtttgagcctgagcagagacatgactcagcctgttccatgaaggcagagccatggaccacgcaggaagggcctacagcccatttctccatacgcactggtatgtgtggatgatgctgccagggcgccatcgccaagtaagaaagtgaagcaaatcagaaacttgtgaagtggaaatgttctaaaggtggtgaggcaataaaaatcatagtactctttgtagcaaaattcttaagtatgttattttctgttgaagtttacaatcaaaggaaaatagtaatgttttatactgtttactgaaagaaaaagacctatgagcacataggactctagacggcatccagccggaggccagagctgagcactcagcccgggaggcaggctccaggcctcagcaggtgcggagccgtcactgcaccaagtctcactggctgtcagtatgacatttcacgggagatttcttgttgctcaaaaaatgagctcgcatttgtcaatgacagtttcttttttcttactagacctgtaacttttgtaaatacacatagcatgtaatggtatcttaaagtgtgtttctatgtgacaattttgtacaaatttgttattttccatttttatttcaaaatatacattcaaacttaaaatt

SEQ ID NO: 72143 - DNA, 670 bp, Homo sapiens
ggaatacaatttctagaagcagtcccaaattcattggtcattcccctcaacctctaggctatgacaggtcatcccgctcttcctatgtggatgaggactgtgactccctggccctctgtgatcctctgcagaggacaaattgtgaagttgacagcctgcctgaaagctgcttcgacagcggcttgtctaccttgagagatcccaatgagtatgactcagaagtggaatacaagcaccagaggggatttcagaggtcacacggggtgcaggagagctttggaggtgatgcttcagacacagatgttcctgacataagggatgaagagacatttggtttagaagatgtggcttccgtcttagactggaagccccaagggtctgttagtgaaggcagcattgttagttcatcaagaaagcccatctcagcactctcgccccagacagacctggtagatgacaacgctaaatcttttagctcacagaaggcttacaagattgtacttgctggggacgctgcagtggggaagtctagtttcctcatgagactttgcaagaatgaatttcgagaaaatataagcgccaccctgggagttgatttccaaatgaaaaccctcattgtggatggagaacgaacagttctgcagctctgggatacagctggtcaggagag

SEQ ID NO: 72144 - DNA, 844 bp, Homo sapiens
cgatcgagctcgtaccgattacgctcctaacgtcacaccaatgctgttggtctaaggatgacactcagaaattttgtaggtgatgtttattgacatttactaggtgaaccacatagtggcatccagggttcccaccccagaccagcaaaatataaatatagttagccaaggaatttgcattttaagtacttcatatgaacaagaaaatagaagaatattaccacaagtaggcacacgtgaaaccacatgttagtattttgtctgttctatactgctgaaaatagaggaacctacttagtgctctgatgtcctattgtattggccccattttgattagttttgaaactgtgtcttcagctgaagcataaatttttgggctccttgagaagaaatgctaaatattcaaaaaatgttaagggtaaaatttaatttaaaacatgtagtcatttagttacaaaaaaaatatgtgtatatgcttttaatcagcacctaaaacaactcaaagtctgtattagagatctaagaacctacccaaaaaatactcactcaaaagtcttctgttcaagcacagtggctcactcctatgatcccagcactttgggaggccaaggtgaacggatcacttgaggccaggagtttgagaccagcctggccaacatggtgaaaccccgtctccactaaaaatacaaaaattagccaggggtggtggcggcgcctgtagtcccagctactcgggaggctgaggccggagaatcacttgaatgctaaaggtgaaggttgcagtgagctgagatcgcgccagtgcactccactttgggtagcagagcaagactctgtctcaaaa

SEQ ID NO: 72145 - DNA, 546 bp, Homo sapiens
tgtgatcacacaactgcactctagcctgtgcaaaagagtgagactctgtctccaaaaaggaaaaaaaaaaaaaaaaacagaaaagcatgttataagcacatgatgttagcttaggcaaatttaactccagcacagaacacataattaaagctgtaatatggtgatagaaagaagaatcactggtagaatttattaaaacagtttcctgggccccatcctcagaatttcttattatgtctgggtgtggctcatttctaataagcttgcaggtcacaccaatgctgttggtctaaggatgacactcagaaattttgtaggtgatgtttattgacatttactaggtgaaccacatagtggcatccagggttcccaccccagaccagcaaaatataaatatagttagccaaggaatttgcattttaagtacttcatatgaacaagaaaatagaagaataatcctagcattttgggaggccagaataggagtatcacttgagcccaggagttcaagacgactctgtgcaacataacaagaccccgtctcta

SEQ ID NO: 72146 - DNA, 1294 bp, Homo sapiens
tgtgatcacacaactgcactctagcctgtgcaaaagagtgagactctgtctccaaaaaggaaaaaaaaaaaaaaaaacagaaaagcatgttataagcacatgatgttagcttaggcaaatttaactccagcacagaacacgtaattttaagtccttaggaaggacttcaagatattaagatacagaacagtttatactcctcaaaattgtcacatttgccagaagacaacccctggccttcaagatggcatgaaaatgctagttctgatatatatcactaacctggaatttgtccataatgttgcatagcacataaccagttcctagctagggtgtcaaacaccaaagaaagataattaaagctgtaatatggtgatagaaagaagaatcactggtagaatttattaaaacagtttcctgggccccatcctcagaatttcttattatgtctgggtgtggctcatttctaataagcttgcaggtcacaccaatgctgttggtctaaggatgacactcagaaattttgtaggtgatgtttattgacatttactaggtgaaccacatagtggcatccagggttcccaccccagaccagcaaaatataaatatagttagccaaggaatttgcattttaagtacttcatatgaacaagaaaatagaagaatattaccacaagtaggcacacgtgaaaccacatgttagtattttgtctgttctatactgctgaaaatagaggaacctacttagtgctctgatgtcctattgtattggccccattttgattagttttgaaactgtgtcttcagctgaagcataaatttttgggctccttgagaagaaatgctaaatattcaaaaaatgttaagggtaaaatttaatttaaaacatgtagtcatttagttacaaaaaaaatatgtgtatatgcttttaatcagcacctaaaacaactcaaagtctgtattagagatctaagaacctacccaaaaaatactcactcaaaagtcttctgttcaagcacagtggctcactcctatgatcccagcactttgggaggccaaggtgaacggatcacttgaggccaggagtttgagaccagcctggccaacatggtgaaaccccgtctccactaaaaatacaaaaattagccaggggtggtggcggcgcctgtagtcccagctactcgggaggctgaggccggagaatcacttgaatgctaaaggtgaaggttgcagtgagctgagatcgcgccagtgcactccactttgggtagcagagcaagactctgtctcaaaa

SEQ ID NO: 72147 - DNA, 442 bp, Homo sapiens
  misc_feature (11)..(12): n is a, c, g, or t
aattcggcacnnagggggacctgccacccccagaaactgaagaaatccctcttcatgctgaaagagctcaccaacaaattcaggcagcctgtgaaacgtttgatgtccgaagccaacagcacattcagatccccaagctctacacctccaatgtgacctggggcttgcaccacttcaggctcgtgcaggactcacagcctttggacctcagctaagggacctgcttctctgtagcacatggggcttgtttgtgttggggtctgagccctgagctcatggtcaaggagaaccccaggtccttctgaacagagacagctggcctcggggcctccctctcactgcatgcaagagcctgttagggcacaagactcaaggcgctgagggaggctgtttcaggagggagccgcagaaggatggtggagagagaaggggacagcatccg

SEQ ID NO: 72148 - DNA, 644 bp, Homo sapiens
tttattttgaggtccctatgggctaccccttatctggatgaaggatttttggcccttggccaacgaaatgctgaggtgaattggcccgaggccggagcagatgggtgccctatgcagatgaaggtgtggccggtgcttggccatggccactcctgggctctttccctttctgagacgtggtggaaggaggagggcggtagggacagcggcctttgatcctttgttactccggatggggagatggggtttttcctttttgtctagttttagaaagtttgccttaattggccttagattcgctgcccccagacccaggacccaggtatttcttttttattcttttttattggagatggggtctcactctgttgcccaggcgggagagcggtgacaggatcacagctcactgcatcatcaacatcctatgctcaagcgatcctgtcacctcagcctgcagagtagctgggaccacagccgcgcgccaccacaccgcgctaatttttgtgtacttggtagagacgggcttttgccttgttgctcaggctggtctccaactccagggctcaagcgatccagctgtatcgccctcccaaaatgctggaattacaggcatgagccaccatgcccgccttgtttcttaatta

SEQ ID NO: 72149 - DNA, 469 bp, Homo sapiens
aatggaatagtgcctcacctcgcaatactaacattgaatgtaaatgtcctaaatgctccacttaaaagatacagaattgcagaatgggtaagaatccaccagccaactatctgctgccttcaagagactcccctaacacataaggactcacataaacttaagttaaaggggtggaaaagacattccatgcaaatggacaccaaaagggagcaggagtagctattcttttatcagacaaaacaaactttaagacaacagctatttaaaaagacaaagagggacattatgtaatgataaaacctcttgtccaacaggaaaatattacaatcctaaatatacatgcacctaacactggaggttccaaatttataaaacaattactactatacctaagaaatcagattgacagcaacacaatagtagtaggggacttcaatactccactgacagcactagataggtcaccaag

SEQ ID NO: 72150 - DNA, 1501 bp, Homo sapiens
ctgcagtgtagtggtgatcatagctcactgcagccttgaacccctgagctcaagtgatcctcctgcaatgggcttccaaggtgctgggattacaggtgtgagccactacgcccagcctcattgagagttgtaaacagccactttttctttatttatactttagaaaaaccttggacatagcagtaagtggattttgactattgctgtaccttaagcatctgccagtcaaaagaaggcatctcatctaatgattttgagatgtcttagggacttccgttcctaaaggatgagataactcgggtagggtaacagtagcttggataggctgataagctaatgagttttccttttttcctttctcttttttactttttatttgaaagtagtgttaagaatattgtgtcttgaattcaggaaagaataaaagtaacactagtaaggtagaaaaggattaaacactgagaaagtaaaaaaaccaggtgaacaggtttttgaaaccaaccttggtgatggaaatttactggctttacaagaaaaagaaatattgcaacgactaataacatcaatccttccattgttgaatcagagaccttaggatgtacactgcatggataagcttgaaataagataattttcattccaaaaggattgttgctattacactgatgataaaatggctattagtcttaatagagtagggtgagccagaatatccctgtatagaataggtatctgcttgagtatgcttttgtaaactgccttatagtacactatgaacaaaaggacataactttggaactatatagagtttgaatcccagctccatcccttcaggcaccctggccaagtatcaacttctctaagacttggtttcctcacctgacttgccttgaggtgaagtttaaatataaaattttctagcctagtgcctgattatcaataggcattcctatcaatgctgtttcctgtagagatttaagtaataatattataagggttttagaaggattccttggttaatatctatcatatatttatatagagagtttcataatctcacagtaaaatgttttaaaacatttggagtcctcattactaatagagaaagaaggaaagtttctatttacaggtaacatgattgttatgcttgtcaggcaagaatatgagaagtaataagagtacagcaagttttctggatctatgatcaggcaaaggccgggagcggtggctcatgcctgtaatccctgcactttgggaggccgaggtgggcagatcacttgaggttgggaattcgagaccagcctgaccaacatggagaaaccccgtctctactaaaactacaaaattagccaggcgtggtggtgcatgcctgtaatcccagctactcgggaggctgaggcaggagaatagcttgaatccaggaggtggaggttgcggtgagccaagatcgcgccattgcactccagcctgggcgacaagagtgaaactccgtctcaaaaaa

SEQ ID NO: 72151 - DNA, 1095 bp, Homo sapiens
gctggattttagcaataaaagattttctgttcgtgtattactaacagttaagctactgtatcctcatcaaaactatcttctaaatagaaagtaatatgtagttcaagtgtttaatgttctgtcaaaaattatatttaacatatgaatgcacatgtgtgctttgaaaaaaaatttaaaatgaaggagactttacctaataagattattctgtgtaagcaatgtggaaagaagaaaaactaatataaagtattggcagtttggaattggacatctgactccggataattggagtactgatagctgttatagttaaaagttatagttaaaagcatacttgtcccctgtaaatacttactctttaagaaattttcatcttctcattttattcatttattctgcaaatactgggtgcccaatatatgtcagacacagttctagatgctagggagacagtagtgaacaagtccttccctaacctaaggtagatactgttccagcttttctagaaactagtcgaattaaagttgagctacatacaaacttagcatctctgggaaagagaaaatatttgacaaaggtgaattggggccttttttaacgctcatctcttcctgtaacatctctgtttagggaaggtgggaaccctggaaaaagttacataaaatgtatttattgttaaatgtgtttagtctcataagaaaagcagtctttcacttggtaatcctaatactgtccttgaactaggttagtctattttaagcatggcaggctacttttggtcttgagttattttagcttaaattaactcaagctaatttaagtttacagctgcacataaagtattatgtaatgacttgctttagggccttatcattcaaacaccagttaacttttccagaccagtagaggatcgtttgtccttattaagtgaaaacgctagtgacctacaggtgtctttgatgccttttgaatacatcattcgctacattcaagctaattatgcggaagtctttagaataggatttatagctgaaatgaaatgatcaataataggaacatactactgtttcattccaaagcctttggtaagtggga

SEQ ID NO: 72152 - DNA, 851 bp, Homo sapiens
ctccccaggggccacagcagactaggggcttctggattataaaacggagaagtgggcgctcctcgccaaaaaaggctaccaggagcgggacctggaaccccagatttccatcacaaccaaactcaaaggggtttccgtgactcagatcaaggagcttggaaaccggctgtgggatgtggccgacttcgtgaagccacctcagggagagaacgtgttcttcttggtgaccaacttccttgtgacgccagcccaagatcagggcagatgcccagagatacagggtcttgctatgttgcccaggctggagtgaagaggctattcacaggtatgatcaagctcactgcagccttgagcctcctaggctcaagccatcctcccaactcagccttctgagtaactgagactacaggcgtgtaccaccattcccagctaataaagtctatttttaaaaaatcaaaaaaaaaaaaaaaaaaaaaaaaaaaaaaaaaaaaaaaaaaaaaacaaaaacaaaaacaaaaaacagggggggcacaaaaaagagacccgagaggggcacaaaaataagagcaacaacatatgtggagacaggggcccaaagagagggcgaaaatacgagcaaagaaacgggccagaaaaaacagacccgcagagggaaacacggcccccgcggaactatggaagagagccccacaccacgcgaggagggcacaaacaagcggcgaaacagcaacacgagagagagacaacccccaggggccacacaaacacaacggggcacacaagcggcgcaagcagcgagacaaagcgacgcagtagaaagaggagaaagagaacggacggaaaactcacgg

SEQ ID NO: 72153 - DNA, 481 bp, Homo sapiens
ctaataaataaataatttatttatatatttatttattaataaatatgagcccaagcaacccaatgttgtttgtagtagaagtcatggctggcctgcgctgagcatcccacagctagtggtggtagctaatcctgccagagtcaggcctctgcctgtctgatgccaaattgcatgctgtgtcttttaacctggattgcaggccacaaatgttttgtaaacattttacgggagaaaaaaccgagatagttctaaattccatacatccattagcttagtttttcctgtggattgggaaaacccggctctgatttcatttcagggtgggacagcccttggtgcactgtctggcgggattttgcattttatcctgatgcttccaggagcaatgaagggaaggcagggggctggaggcgccccgcaggcgggtacgttccctgctggccttagccccagcccgcctcccccaacccctgcgggagaa

SEQ ID NO: 72154 - DNA, 1002 bp, Homo sapiens
ctaataaataaataatttatttatatatttatttattaataaatatgagcccaagcaacccaatgttgtttgtagtagaagtcatggctggcctgcgctgagcatcccacagctagtggtggtagctaatcctgccagagtcaggcctctgcctgtctgatgccaaattgcatgctgtgtcttttaacctggattgcaggccacaaatgttttgtaaacattttacgggagaaaaaaccgagatagttctaaattccatacatccattagcttagtttttcctgtggattgggaaaacccggctctgatttcatttcagggtgggacagcccttggtgcactgtctggcgggattttgcattttatcctgatgcttccaggagcaatgaagggaaggcagggggctggaggcgccccgcaggcggatacagggtcttgctatgttgcccaggctggagtgaagaggctattcacaggtatgatcaagctcactgcagccttgagcctcctaggctcaagccatcctcccaactcagccttctgagtaactgagactacaggcgtgtaccaccattcccagctaataaagtctatttttaaaaaatcaaaaaaaaaaaaaaaaaaaaaaaaaaaaaaaaaaaaaaaaaaaaaacaaaaacaaaaacaaaaaacagggggggcacaaaaaagagacccgagaggggcacaaaaataagagcaacaacatatgtggagacaggggcccaaagagagggcgaaaatacgagcaaagaaacgggccagaaaaaacagacccgcagagggaaacacggcccccgcggaactatggaagagagccccacaccacgcgaggagggcacaaacaagcggcgaaacagcaacacgagagagagacaacccccaggggccacacaaacacaacggggcacacaagcggcgcaagcagcgagacaaagcgacgcagtagaaagaggagaaagagaacggacggaaaactcacgg

SEQ ID NO: 72155 - DNA, 265 bp, Homo sapiens
ggcgaaggttgcagtgagccgagatcacaccactgcactccagcctgggtgacagagtgagactttgtctcaaaaaaaagaaaaaaaaaattaaaaacagtaggcaactgtagcacaatggtaaggacttgtgtgtctaagcctagaaaaggagcagtaagacacagcattatactctgatggggccactgccgattatgtggtttgctgttgtcagaaacgtcaagatgtggcgtgtggctgtattacagatgcacaactgtgg

SEQ ID NO: 72156 - DNA, 415 bp, Homo sapiens
gccactgcactccagtgtgggcaacagaacaagactctgtctctacaaaaaaaaaaaaaaatacgtgtaacgaacaatttgccactgtaaccatttttaagcgtacaattcagtggcattgattacgttcacgatattgtgcaaccatcgccccattaccaaaactttttcatcatcccaaacggaaactcggatgatttctttttctttttttgtgatttcttaaatgagcctgcaatgtaacaaagtttcacagtattgtaggtacacatggaaaaatgcaatgaatattggctcatgcctgtaatcccagcctcccaaagtgctgggattataggtgtgagccaccgcgcccggccctccatgatgattttattttctaaatattttgtctggagatacatagcacgcagat

SEQ ID NO: 72157 - DNA, 1168 bp, Homo sapiens
gaggcagtgatcagggaatctcaatgagggtgagactgcgacaaagacttgaaaaaggtggagaagcaagccttgtgggtatttagggtagcagtagtccaggcaaggggaacaactagtgcaaaggctctaggaggcaatgtgtttgaagtgttttaagaacagtaaggaggctagtatggttagaacagaatgagcaaagggggcaaagtggtagaaggtgagatcaaagaggtaatgaggccattgtggaggcccatatggactattggaagggctttggcttttactctaaatgaggcaaaaaccattttaagcagagaggagtgatatgacttgatttcttgttaaaaggattattctagttgctgttacagaaaaagattacaggggtgcaaagaaacagggagacaaaagaatataagattttcactgtaacttatatctagtatgcttgcttatacttgaaaatgcatatccagataattgtagtaaattcaaatattatgtttatttaatagtactaacattgatatgctggttaattatgattaggagcactaataaagcacaaatcagggattcccaaaaagaatgttgaaagggcagtcagcttttcctgtgccagaaatcaaagtcatagcagatttggggcaaatatgtcaaagtcaaacttacgcacatcactactgagaagacaaagatgaatgtgtgacagtttcctgcccccaagaatctttaagcattgtgaaggaagattaatatagccaaataactagagtgatcagttctaccagagaggaccagttttggaagccagaggaaaaaaaaaaaaaaacagaaacaaaatgatgtttgaattaaatctttaaaagtttctcttataaatttaccaagccacatattgggaatggtaccccaggcagaaggagtagagtaagcaagccagaaaggaaatactatggtgcttttgagtaactgcagtgtggctgaagaatgtggaaaatgatgaggataaagaggtggacagggaactaggtaagggagggcttccttttaaataattagaccttgtcctgtgtacatttaatgggattttaatcaggccataatgccaaatttctttacttcggaaggatctttatggtgatggtttcagaaaaaaaaa

SEQ ID NO: 72158 - DNA, 1371 bp, Homo sapiens
  misc_feature (116)..(116): n is a, c, g, or t
  misc_feature (761)..(761): n is a, c, g, or t
  misc_feature (771)..(771): n is a, c, g, or t
  misc_feature (794)..(795): n is a, c, g, or t
  misc_feature (840)..(840): n is a, c, g, or t
  misc_feature (921)..(921): n is a, c, g, or t
  misc_feature (929)..(929): n is a, c, g, or t
  misc_feature (937)..(937): n is a, c, g, or t
  misc_feature (941)..(941): n is a, c, g, or t
  misc_feature (987)..(987): n is a, c, g, or t
  misc_feature (1036)..(1036): n is a, c, g, or t
  misc_feature (1156)..(1156): n is a, c, g, or t
actctgtgtaactaggataagctggctttggaagaggcaagccgttctttcactagaagggagaggttattgcatcacccatcagcaagagaggaattcaggagaggtagagagcngtgtggggtttgggtggcagccagctactttccaaaacttcccaggggctgcaatacagccgccaacccaaatgtcattgggataggccagcgtgccagatgccatcacagaaaataacttcccttgcctggcatctgggttcttgccttgtaatccagaagaccacatgctggatcagctggtcccagcggggaccatgagctcttccgtcctctctccctccctgtctgctgagcatttgaatgagtcatcagagtgcagaatggattttggccatgcccttaattgagtgttctgtacatacaataataattaataataatttgaactgatccttctatagttttgtctctggaccaggcactgctctaaaggctgcacagattgtaactcatttacatatgtaacacatatctacatatctcattagcctgaagcacaatagaatgagaaaagtgaaaagcaaagtgcttagactctagatttggaccaactggcttcctatgtcaactctgcctctttcagtataggtgactttagaaagtaaattctgctttctcaagccaagcgtccatgcacagacaagggaataaacaaaacgtggtgtatactggaatattattcagccttagaaatgaaggagnttctggccgnctgtgtggtggctctagcctgcnntcccaacactttgggagggtgaggcggacagatcacttgaggtcnggggtttgagaccagcatggccaacgtggtgaaaactcaactactcaaaatagaaaaattagctggacatggtggcacacncctgtgangccagctnctcnggaggctgaagcatgagaattgcttgaaccctggagatggaggttncagtgagcccacgtcgcgtccctgcacgcaagcctaggcaagaaagcangaccctgtctcaaaaaaagaaaagagatgctgatacatgctacaacatagatgaaccttgaggacattattctaagtgaaatgagcttgtcacaaaagaacaaatattgcatgattccanttatatgaggtgcccatagttgtcaaattcacaaagacaaaaagtggcatggtcgttaccaagggctgggagaaaagaggaatggtgagttagtgtttaattggtacagagtttcagttttgcaagatgaaaagagttctggagatgaatgttgggaatggctgtgcaacactgtgaatgtacttaacactactcaactgcagacttaaaatggt

SEQ ID NO: 72159 - DNA, 1415 bp, Homo sapiens
tttgggaactcatttctaaattattttttatttttttatttttactgaaccagcaacccagtaaggaatgatctggaagaaacgcttggccaggtgttgtggcgcgcgcctgtagtcccagctactttggaggctgaggcaagaggatcgctgttcgaggctactgtaagctatgattgtgccactgcactccagcatggggaatagagtgagacctagtctcaaaaaaaaaacaacaaaaaaaaaaacaggagagaaaaagaaaagctgttttatcttcccttaccttcccagaatctataccttgaaaaaaggaactgttaaaaaaaaaaaagccagtgtgtttaggttttgacagcagtgcatgcaagcttctctcttaattcagctcctcttaattcactctgcacctgcatctgatttgcaaaagatgaagcgtaaaatttcaaaatagcaagtgtttgttacagtgttaacatgtggctcagtgctctatgcaatagaccatgttgccttgcaaattttccttagccaagtgtaattgttactgtagcaaatctactttaatgctacttgaaatgaacagttcgtagttattagactggaacctcaagtagctgcaaccgctagaaactcctccggtggttcccccctccctggtctctccagagggaagaaggtcaccttctacacttaactaccatgctcattcatctggacgaaatgcccagtccactgtcttcttcacgcgttattctccaggacagggctcctccgccgcgcacgttatttcctgtagagcgggcacgaaattaagcaccttgaagaccagcggtagacacagattatctccggttccaagcacgtctcccgctaggaacttttttcacttgtcactcttctgctgctttttgaggaaaacaggtgatatttggtttcctgccagagtcttcgtcactctcgtaactatgatgtctgggtaaaaatagctcacatttttgcttaaaaaataacggccgcgcaaatttatggttagatttgtctcaagtctgaagaccgcgcatcctaactagtgaggcggaagacacctaaggagccaggagctgtcgccgaggcgaggctgcggagacgttcccttggtgggccgcgggaccacccaccccgccagaaactcggttcgctcaccctaagaattttggggcaactggacttctccaccgcccgcttccggacccgctccggcgccgcttccggacccactcctcggcgagcgcaggaactcgctctcccagcaggccccgcgcggtgcgcctctcggcgcgttccgggtcctatgacagctcggctcgcatgcgccacctacggccccacccgcggccccaccccctggctcccggctccttccccgactcccg

SEQ ID NO: 72160 - DNA, 856 bp, Homo sapiens
gctagtagaggccgcggttaaatcggacgaggtattattagactggaacctcaagtagctgcaaccgctagaaactcctccggtggttcccccctccctggtctctccagagggaagaaggtcaccttctacacttaactaccatgctcattcatctggacgaaatgcccagtccactgtcttcttcacgcgttattctccaggacagggctcctccgccgcgcacgttatttcctgtagagcgggcacgaaattaagcaccttgaagaccagcggtagacacagattatctccggttccaagcacgtctcccgctaggaacttttttcacttgtcactcttctgctgctttttgaggaaaacaggtgatatttggtttcctgccagagtcttcgtcactctcgtaactatgatgtctgggtaaaaatagctcacatttttgcttaaaaaataacggccgcgcaaatttatggttagatttgtctcaagtctgaagaccgcgcatcctaactagtgaggcggaagacacctaaggagccaggagctgtcgccgaggcgaggctgcggagacgttcccttggtgggccgcgggaccacccaccccgccagaaactcggttcgctcaccctaagaattttggggcaactggacttctccaccgcccgcttccggacccgctccggcgccgcttccggacccactcctcggcgagcgcaggaactcgctctcccagcaggccccgcgcggtgcgcctctcggcgcgttccgggtcctatgacagctcggctcgcatgcgccacctacggccccacccgcggccccaccccctggctcccggctccttccccgactcccg

SEQ ID NO: 72161 - DNA, 1044 bp, Homo sapiens
  misc_feature (32)..(32): n is a, c, g, or t
  misc_feature (129)..(129): n is a, c, g, or t
  misc_feature (433)..(433): n is a, c, g, or t
  misc_feature (450)..(450): n is a, c, g, or t
  misc_feature (464)..(464): n is a, c, g, or t
  misc_feature (567)..(567): n is a, c, g, or t
  misc_feature (605)..(606): n is a, c, g, or t
  misc_feature (773)..(774): n is a, c, g, or t
  misc_feature (927)..(927): n is a, c, g, or t
tcgagtaatagtagtaatagtagaataggttnccgtacagctggctctgtgtgaattaaaccctttttctattgcaattcccctgtcttggtaaatcggctctgtctaggcggacaaggagaatccatngggcggttataagagctgccccccaatttcaaatatttatatctaagctttctttattttcctgcctatttcccaacaagggatgaggagcttagggagttaaaaagtagtaaaatatggggaaaagggcataattcccattataccaagaggcattgctggtgaagcaatacctttccaggtacgattttcagtaacacagacgtgcagtaagaggcagtgttggctgttagtgtcttttatgagccagtcttttcctggcttgctatccgtggtgagactgacacccaaatgttctctcagngtctctttcagggtggnacaacagcttcagngtctttacgtatgtctcctcccaacatgaagctaattgctgtgctctcgggcatgtttagctcttggtagagtggctttcctaacaaatagggagcagtgagnccagcctgaagtttttatttagtcactccttagaatcnntgatattttgaatactgaagtatttccagtggctagtaatttactaagacaaaagatgcccctgtttgcatatggaaaacagaaggggagagagccaggaggtgtgggtgagagccccgaaggcaagaggatcccaggggctggcccagcacggagctggtagacanngcgctcacaccagggagggctgcaccctcctttctcccgtctgtgttttctttcccttgcaagtgttattcgacaaaagcaattatgctaatttccttcctgtgggctcaattccttttttgacacgatgacttggaggagtcattatgattnctccaaacaggaaagacactcgcccagctgtccgcccgcagagagctggctacggtgcagaaagctgaggaggcgtctggagtttttgggtgttaatgattctgcctgcccacaggt

SEQ ID NO: 72162 - DNA, 276 bp, Homo sapiens
taatctttgcaataactcacaaggtaggttttaccagttgcagtttcctgaggaggaaaccaaagctgggaattattttatcctcaaagtggcaataagttgttggccacaaccgggatattccgcttttctcctcacatttagaaatgtcatgtggctgtgagtcaccttgtgaggatcttgtcacatccttagactgtactgccaacactgaaaatgcactgtggctgacccgtttaagcaaagccaggctgcaattttcctgtggattcccat

SEQ ID NO: 72163 - DNA, 344 bp, Homo sapiens
ttctgccatagggactcgatctgtcctccccactccaggacagctttaaaggttgatggttgctcttgatggtatggcagggagaatgtcccacaccacctgtcccttggcaccccggggcacgtcggggacgggaggggcaggggctgctgcccactgccagccgaatggcatgatgaatggagctgtccctcttccccacggagcctttgatctccccctcgtggggagggggccaggggcatcaaagacatttttgtggcattagaaaatctgataaacgccatctcacctgcagctggctctcccaccccttctacccgggccaggttgggggaggaact

SEQ ID NO: 72164 - DNA, 693 bp, Homo sapiens
aagaggggagaatggtcagggaattcttctgtcgcccttaacctgctgcagaccaaggccctgtcagggctgcatccttctatgactgagttcctccagggctgccactctcacagggcttagggttgtaacactgtctcttcctttcgtctgttcaaaaggaggaggaggggtgactctctgctctttcttgtaccctgtgtgtcactatcccttattgattctccttactttgcccactctctcataaatggtcctttaggcaatggaattgttttctgccagaactctgattgtttgaccttttaatcaattgcagagtaaatgcatgtgatagcaaacatttaagcatacctttagaaagacccagtacggtagatgtacctgaatgtgtgtttcaagttaggcaatctgtgcatggccaacctggagattcgtttttttatctatacatctgagcccccacccagcctgttccatggaatatgtgccgtacaggagattgaggccttgagttttgagttaaatgatggttgccaggtggagttctttcgatggagggtgttaagtgaaagtgctgtagaaactgcataatgtttgcaagcagttgtgttctcccagccagcctgccactactggactctctcttctgtattaaccccctaataaaacaccgcatttcatctgctggct

SEQ ID NO: 72165 - DNA, 189 bp, Homo sapiens
  misc_feature (166)..(167): n is a, c, g, or t
tcctaaaatataccaagctcattcttgcagcagggcctttgcattggctatttgatccatctagaaaatgctttgtgtgtgtgtgtgtgtggtgtgtgtgtgtgtgtgtgtgtgtgtgtgtgtgtgtgtgtttcccatgactgctttctaatcattcaggctttanntcacatgttactcttcacaaag

SEQ ID NO: 72166 - DNA, 309 bp, Homo sapiens
ctgtgcttttggagagtggatgtgctaaaattagtaagagtctcagtgcatagatttgacaagagttttagccaaaactagaagatagttgagaaagataattaaattgtcatgtcattcagaaagtagagtggtgtttgccagggcctggaaggagggggtaatagggagttcctgtttaaatggcacagagtttcagttggggaagatgaaaacattctggagatggatggcggtgatggttgcacaacagtgtgaatgtacttaatgccacagaatggtacacttaaaaatggttaaaatagtagg

SEQ ID NO: 72167 - DNA, 404 bp, Homo sapiens
gaactagctagggccacttgcctaaagttaaccacctctttttaatcaaaactgagcaaaacattcattccatttcatggtgtttcaacgtgtacctttttagaaagatgaagtaaggaaaactaaccctaaatcaactattaaagcccattgaagtgtgcttgtttgcatatttttgctttatatggataacacgctcctgagagctgcagaacatgaacttctaggctgaatgagatacagggttgcagctgatgctttctggtatagcccattcagaactcacatggcatctaaagtgttactgatgggtctgtcattgatcagcactacttggatatttgcgtgaacaaagaggttcagaagtattgaatctggaaactcgtaggagttcaaggccaatt

SEQ ID NO: 72168 - DNA, 1004 bp, Homo sapiens
gaacaacagttgtgtccatatgcaataacagtgtttcaaattctttggggatttgcccacagtgtctgcagtcatattgtgacaccagttgtgatgccagtctctgtaaatcagacttattcccagtgagacattatatatttttgcagccaatacgatctattttatagcgatttatagcattgtctctgaaaaggatactttgatttgtgtcttgtttttgtcagttttcaacactttgattgtggcccaggttaattaatattttgtgtctaggtttcctcatctctaaaataaagatgtttatttctatagcttcatgttgacaattaaattatataatttatgttactcaactagcaagtaaattgatgtacagtgtatttataaatgatagatactatctttatgttaatttttattattgtcatcattatcatcaattttcaggtccgtgttctgactaaaaggaagccacactctgtcgaaaacaagctttgtaagaaaattttgaagtatttacttatatctaaccattcattccaccttttctcccaaataacactctaatatcttgagacatcttgtctagggccagatttcataaatgcttgtgaggcaggagaataagttccagaggcagttcacactgcctaaagccaattcacactgacttcctataactaaatctaaaggaaaatctcaactttcctcgcccaagtaacaaaagaatcagaggttatactccctttgcaacctgccccttttctgcctggcagatgaaaaatgaaaagtacctatgactggtcccctcccacgaccagccagactggtcacggatcactacttcatttacatagggcgtaaaccgagtaaccaatgggaaacctctagagggtatttaaaccccagaaaattctgtaaccggtggtctccagcaggttgctcaatcttgctgccactctgtgggatgtacttttgtttcaataaatctgtgctcttcc

SEQ ID NO: 72169 - DNA, 489 bp, Homo sapiens
catctcaaaaaaagaaaaagaaaaagataaatcagaagaggaaagaagttctagatgatagagaagaagccttgtgggtgaaaggaatgcaagccgcctgggctgggtagagcggggcgtgccgccagcacccttccccaggggctgcacccggggccggagctcctgctgcacagccagaagcaagctatgcaccttcgcaacgccgagacacgtcgtctgtcatgagttcacttccagatcgtccttgccagtgtctgccatgtgctgtgtgtctgtgagaccctggcagtctgtcaggttaggggccatggacgtggaccaagtcctttcctgataccctggatccctacagatcccttgttatagctaaaaatacacattcttttctcagacaagtattcattttgtaaattacataccttggtagtcaaccttttaaaatctaatttttcaactttctttcttctgtaatgattggaaattctg

SEQ ID NO: 72170 - DNA, 997 bp, Homo sapiens
attatttatgaggatggcctgtgcaaaaagacacccagagatttcatgctgttgattcacagaaagcctgttcctcttcactccgtagagtcctcagagtctggatcatcccttacagaagatccttgataatatttctgatatacctccaaggttccgtttgtcaaatgtgtgcgacccttctgataagtcaccagaggtgatgagggagagagagaaagaaagcaaattacaactgtaaagagtctctgaacagtgaaagatcaaaacagacagtctctggctttactggatgagtcaccattgcagcccgaccgcaaaaacaagcgtggcttctgtacttagcagcagtcttcctgtctggaaaggaaacattgctcagattggagatactggccattttatagacttcaaagcaacttaggccactgaactgtcaggcgggaaaacaggatgtcttccatttggaagcccctttgcttctaagaagttccagagaccatcccaggcccacagagttataaggattcatctgggcactgaagacatttgggacctcagtgaagtttctccgaggccagatggtcacattgattttctggaatcattttgaataaaaatgagcgaggtggtgaacacaatgcaaggctctccacgtactgtctggtattgttcaaccagctccacgactccctgagggcagagatgagcagatgttaatggataaagccaggtgggatgatgttataacatttctcctacagccccaaatctcccaactcctgcatgtgtgacctgagtaagactcggtgcaagaagacatcagtgttcccatctgtgaaatgaaggaattgacccccgaggatcttccatttctgacagtgctttggatttcattggttttgtcacaggtaccccccaaaagcctccatctttggataagtgattaaaactgctgagtaattttcaattaataaaagttcagtgctggctctca

SEQ ID NO: 72171 - DNA, 1026 bp, Homo sapiens
attatttatgaggatggcctgtgcaaaaagacacccagagatttcatgctgttgattcacagaaagcctgttcctcttcactccgtagagtcctcagagtctggatcatcccttacagaagatccttgataatatttctgatatacctccaaggttccgtttgtcaaatgtgtgcgacccttctgataagtcaccagaggtgatgagggagagagagaaagaaagcaaattacaactgtaaagagtctctgaacagtgaaagatcaaaacagacagtctctggctttactggatgagtcaccattgcagcccgaccgcaaaaacaagcgtggcttctgtacttagcagcagtcttcctgtctggaaaggaaacattgctcagattggagatactggccattttatagacttcaaagcaacttaggccactgaactgtcaggcgggaaaacaggatgtcttccatttggaagcccctttgcttctaagaagttccagagaccatcccaggcccacagagttataaggattcatctgggcactgaagacatttgggacctcagtgaagtttctccgaggccagatggtcacattgattttctggaatcattttgaataaaaatgagcgaggtggtgaacacaatgcaaggctctccacgtactgtctggtattgttcaaccagctccacgactccctgagggcagagatgagcagatgttaatggataaagccaggtgggatgatgttataacatttctcctacagccccaaatctcccaactcctgcatgtgtgacctgagtaagactcggtgcaagaagacatcagtgttcccatctgtgaaatgaaggaattgacccccgaggatcttccatttctgacagtgctttggatttcattggttttgtcacaggtaccccccaaaagcctccatctttggataagtgattaaaactgctgagtaattttcataaaataaagctgtgtcgcccggaggttttttttttttggtggaatgatatatataa

SEQ ID NO: 72172 - DNA, 899 bp, Homo sapiens
attatttatgaggatggcctgtgcaaaaagacacccagagatttcatgctgttgattcacagaaagcctgttcctcttcactccgtagagtcctcagagtctggatcatcccttacagaagatccttgataatatttctgatatacctccaaggttccgtttgtcaaatgtgtgcgacccttctgataagtcaccagaggtgatgagggagagagagaaagaaagcaaattacaactgtaaagagtctctgaacagtgaaagatcaaaacagacagtctctggctttactggatgagtcaccattgcagcccgaccgcaaaaacaagcgtggcttctgtacttagcagcagtcttcctgtctggaaaggaaacattgctcagattggagatactggccattttatagacttcaaagcaacttaggccactgaactgtcaggcgggaaaacaggatgtcttccatttggaagcccctttgcttctaagaagttccagagaccatcccaggcccacagagttataaggattcatctgggcactgaagacatttgggacctcagtgaagtttctccgaggccagatggtcacattgattttctggaatcattttgaataaaaatgagcgaggtggtgaacacaatgcaaggctctccacgtactgtctgccccaaatctcccaactcctgcatgtgtgacctgagtaagactcggtgcaagaagacatcagtgttcccatctgtgaaatgaaggaattgacccccgaggatcttccatttctgacagtgctttggatttcattggttttgtcacaggtaccccccaaaagcctccatctttggataagtgattaaaactgctgagtaattttcaattaataaaagttcagtgctggctctca

SEQ ID NO: 72173 - DNA, 447 bp, Homo sapiens
tattctctctttttttttttggcttctgtacttatttcagaaagtagattgtggttagtaacgtacaactttcctggaattaaaaaagaagaaaatatgaggattcagactatatctaaggtcttattttatttagcactaaaagccctctatgcttatctacacgaacaaccctgataacctacacaggtacttcccaaacctgcctatgcttcagaatcaccttcaaacacttgataaatatgcaggtttgtgttcaaaatacagtccacttgttttgaaaaaaagagcccttgaggactttgacatgcagccagctgagtgctgagcaaagctctggctttggggagtgtggccttgacaactgcacaggggactgcacaagggcattgtttatgtcactactgaagccattttgcacttggattgtgaagtccccacactgac

SEQ ID NO: 72174 - DNA, 836 bp, Homo sapiens
agccttatatacggagtcacctctccccagagaggtcacagccaacattcagaggcctcccagggccccctctccctggataaaccacttcagctgccccccatttttctcgagggagaaaaaggggaatcctctgtccagaatgagcaggaaggagagccaagcctacagtcacccagcttagagctccagtcccctgcgtggccacgccatgcaggagtggctcaggagcccctgaaagtgtccagcagctacctcagtgacacccagagcagcgagagtcatgtttccagcgtgcagcacccgaggccagaggagggcagccatgccagcctgagcagcgggtacgcaggggacaaggagggcagcgacatcagcttggtgggcagccaccggagagtgcggctgaacagaaggctcaacacccaggcggccagtaaccaaaccagccagctgggctccatagaccctcccagctctctaaagagccggctgactggccccgcccacagcaccaagcagactggagggaaagagtgaggccagcctgcccggcagcggcagcggcagcagcatcctgtccagcgccagcttcatcagcttgggcagcagtgccctcacctaccaggtgagcagcgggctgctgacttccacagccagccttccctccacccaggccagcagccgtcagagcgtccggctggatggcagtgcccaaaacaggcagagcagccacaccagcgtgcaggaggacaagacgggcggcaacgtgaaaaccagtgagcaggtcaccacgggggagcagcctgcccaggtgtgcatgcctttgtgagaat

SEQ ID NO: 72175 - DNA, 429 bp, Homo sapiens
cctacaatgtaacaaagtttcacagtattgtaggtacacatggaaaaatgcaatgaatattggctcatgcctgtagtctcagcctcccaaagtgctgggattataggtgtgagccaccgcgcccggccctccatgatgattttattttctaaatattttgtctggagatacatagcacgcagattacaggcatgagccccagtacccagccagtgggctggattctgaaatgcagaattcaaggacatcagtggaaaatctgtagaaaatggaataaattctgtagcttcgttaatagtgttacagcaatgctttttcttagttttgatgcagatgccctggggatgtgacatgtttactctgcatctgcactgcctttgcaataaataaaatgtggtctatcatgcaatggaatactattcagtcata

SEQ ID NO: 72176 - DNA, 228 bp, Homo sapiens
ttaatggatatttctgatattcttaactaaatttgaagctgtgagggaagacaaactcagggtccacagggtgggaaaagtccacaagatcaccctcaagtgccgtcattctctaggaccccgagagccctagcggttgttacgcttgcagttatgatttattacagtgcaaggctacagattaaaatcaaccaaggcaagagatgtatggggcctcttgggggccaa

SEQ ID NO: 72177 - DNA, 465 bp, Homo sapiens
ggctcacggctggagcccccatcctgccgttcggaccagtgcgggcctcggaggagtgtcccgcagcggacccccgcccaggaacccctgcaggcagcgagacgggcgcccgggccagctctctgcccctcgccccccgcggggaccctgcccgccccgctgaccggccccacgttgccaaatagctcaaatgcttgtcatatttgcggtcgcgcggctccgcgggctgtgcacgcgctgcactcgccgccgcctttgtcaccagccgcttcgtcattcgcctgagcacttctagagtgtgtagggggcgttactagtggcagtggtggtcctcgggccggagtgtctccttctgtctcccctcctctttcagcccgtccttacgagaaaatcaggggcgcgccggcccggcagggagctgggggcggcgctgccaccaggcgcccactgcgccccgccgcccct

SEQ ID NO: 72178 - DNA, 391 bp, Homo sapiens
tagaactatcaaacccatcaagctgcccccggagggtgagcctttcaaaaaatcttaaacaggtgcaggaccaggtgcactcaggattgtgagcaaatttctaggtgcagaacagtccagactctcagcccaaagttcaggccaggccagagcccacttgcctgcaggatgcacaagggagggtagggacaggtttagatgccaagtactcatcagagtttcaatttaaggacactcggaagccatgggaggctgtgaaccaaggatcacaatctgatttgctgtggtgggtaggacagcacaggagtggaggcacagagtagagtgaagattcctcaaagatcagacagtcacaagacatccatgagcgttctcatagctgtggcaatgt

SEQ ID NO: 72179 - DNA, 429 bp, Homo sapiens
  misc_feature (25)..(25): n is a, c, g, or t
ggtggcgggcactgaggcaggagantggcgtgaacctgggaggtggagcttgcagtgaccccagattgcgccactgcactgcagcctggagactccgtctcaaaaaaaaaaaaaaatttcaatagttaaaaatggatgctgagtttaaaaaaaaaaaaaaaaggttgagttgagagaataaggagaatcgcttgaacccagtgagccgagatcccaccactgcactccagcctgggcaacagaacaagactttctcaaaaaagaaagaaagaaaaaatgatagaatatgttcatgactagagggtaggcaaaggtttttaagaacctgaaaacaataaccataggggaaaagaattgccaattagagttaagttataactctcacgcattgttgatgagggtataaagcggtgtaaatgctttgggaga

SEQ ID NO: 72180 - DNA, 561 bp, Homo sapiens
ttatgtaatatgcataacgataataatcataatggttatgatgttctttctgtaaaaattcaaatatgccaaaaatatggcctattgatatctttaaagagacattctttaaaatataaaagattgagctgggcacggtggctcacacctgtaatcccagcactttgggaggctgaggtgggcagatcacgaggtcaggagttcgagaccaccctggccaatatggtgaaatcccacctttactaaaactacaaaaattagccgggcacggtggtacacgcctgtaatctcagctgcttgggaggctgaggcaggagaatcgcttgaacccagtgagccgagatcccaccactgcactccagcctgggcaacagaacaagactttctcaaaaaagaaagaaagaaaaaatgatagaatatgttcatgactagagggtaggcaaaggtttttaagaacctgaaaacaataaccataggggaaaagaattgccaattagagttaagttataactctcacgcattgttgatgagggtataaagcggtgtaaatgctttgggaga

SEQ ID NO: 72181 - DNA, 547 bp, Homo sapiens
gtgataggaaccacaagccccaagcagcctctggaagctggaaaaagcaaagaaacagattctttccagagtgtccagaaaggaatgcagttcagctaacatcttgattttagatcagtgagatttttgtgttggacttctacagaactatataagaataaattgtgttgcttaagcacactataatacatgtggcaagaagctgccagctaagccttgaagaatagtgaacaaactcttactggaggatgggaaggcagtaaataaattattgaattattgaaataaatggaggattgagttatgcattgacagaatgcttagcaataattttgcttgtcttaatgtggaacagaaaatgaaacttaatagcttgtagatgtcttaaggagatttccaggtgaatgttgaaagtactgatgaacttattatggctgcatctcataatgtacaggaagacatttactgagtgaactaaagaaggaactgttcaatttgaaagcagaatttagaggaaatttttcaacctagtacttgtcattttttt

SEQ ID NO: 72182 - DNA, 460 bp, Homo sapiens
acacatagaaggtacccaaaaactacaatccattcaacattattcacccaatgcatgtcagtgcccagcactgtcccaggagccagagacagggcgggattgaatgtcatcagggacaccatccacattgagttcctggaggcgccattaacagaatacagtgtgcagccagcagacctggcggtgtattggcaaatgcaatagatgaagtgcctgtcctcctggaggttataggctagcatgaaacagagagaaccaggaaaaccacgagatattgttgggcaggtcattgaaggaatacctaagatcatttcagatagtgagaagtgctctgtaaaaaacaacacagaggctgggcgcggtggctcatgcctttaatcccagcagtccacctgcctcggcctcccaaggtgctgagattacaggcttgagccaccacacccagcccatcagtacaatt

SEQ ID NO: 72183 - DNA, 1410 bp, Homo sapiens
ttatcctgggtgagatgacttcatctggtgaagggactgagcttttccagaagcctgtggaaatgtgggaagaatgtgatgctagggagattatcaattgctggctctgaagatggagaggatctgggagcacccccagctggcagccagaaagagggcagaggcttcagccctgcagctgcaagaacctgaactctgccagtggtgtgagcttccaggaggatccccagcttcggatgagactgcagcccagccaacacctcgatttctgccccgtgatgccctgagcagagaatccagcaaggtcatcccagacttctgacctgtagacctgtgagctaagaactgtgtgttgtttcaagtcactaagttggtgataatttgttactttgcaataggaaaccagcagtacactatctgctagacatacattgccttggtttctccccttccaagtcggccttgactaaccatcacccatgacagctctcatattcccatgcacaatcaattattattcctttgcattactacagtgaaagccattttggatctcttttaatgtttcttacaaattttttctttgatattttgttttttcttcattttcataataccttgtttcctgggactataaactctcgtacctgacctgattacctatctcatcaattaatcatcagttttcttagtgacaataaaattattgatagtctttattatgacccctgagacattacaaaagcttaaaggttacatttttaatgtgtgagattagctttgtgagctctactgtactttgattattcgagaactggtcatctcagtatgatatatatagaaaactttcctaaactgaatcagagtaagatgttaggtggactatatgcgattataatttcttgcaggagaatgtcctagaagccttagacaagctcagggtaacactatgtgggattttgaggaagacaacgacataagaaaagacaaatgtttctgaaaacatttttatttttttttctgcaagagaggtgaggacttggtgtcccatttacagtcagtgaagttggttgcaggagagagggtttagcttaagtacatccagcagccactgatggatgtcacattgctgctctggtctccttagcaccacgttcttcccagctctgtggcttgtgtccaagcagtccaggagataatccctgaaatttggaacttgtgcttattttggagctatgcagacagcaaaaaccttgagtcctcccatgtagtaatacatggaatctgagtttgggtgataagattggcgaaggagttcaatggtggggaaatggaaaggctaccaaataatcactctcctacccaaatgaatgggattactaataagtcgtaagtgcttgccccaacaga

SEQ ID NO: 72184 - DNA, 712 bp, Homo sapiens
agtctcagatgactatcatttgtattgatgatctctaaaatggcaccatctcatgactccagggttctcatcattcatgtgcaaagtacactaccagataatgtatcccataggtatggaacagaaaggctcatggaaaattaaaacaaatataaaacacatagaaaccaggggaaagaaacaggataagataatacacttaggatgaggcacaagcaacttggaagaactacatcacctgaatcctaagtccacagcatggatctctcgctctcgctctctctctcccctctctttccttccctcctcttctctctctctctctttccttctctttctccctttttcttttcctctctcttcctctatttctccttctgtgaggattttgcccttgtaatttgttccttaaaatattgagccccactaacgcagataaatggtgagagatagttgggacaaaaaaagacttaaaggtcaagctgaggaacatgaacctatatcctatatgtacctccctgtaagcacccaggattggagatgaaccttagatacaaaatacattattttagtgagttttggaatgtgaggaaaatctacttagaaaggataatttttaaaaatatacttaattatcttttaccataagcaagaaaataataaaatatgtgatgacataatatgaagaaaatgttatttgaaaaaaaaggaa

SEQ ID NO: 72185 - DNA, 1426 bp, Homo sapiens
atacttttgaaggatgtgcaacgttcaatgataagtgtgacaaaaactgacaaccaggaagcttgtgtactcagtgagagtagcatgtttgtctccaagaaacgtttcattttgaagacacgtggtaccactctcttactgaaagcgctggttcccctgttgaagcttgctaggcattacagtgggtttgactcaattcaaagcttcttttattcttgtgagaatttcatgaagccttccccctaagggtacctacactagaatttccaggaagaaatagagtttcttaatgcaattttcccaaatggagcagcatattgtatgggaagtatgaattctgactgttggtacttacgtactctggatttcccagaaaggtaatcagtcagccagatcaaaccctggaaaatttgatgagtgggcttgacccagcagttatggaccagttctacatgaaagatggcgttactgcaaaggatgtcatttgtgagagtggaattcacaacctgataccaggttctgtcattaatgccacaatgttcaatccttatgggtattcgatgaatggaatgaaatcagatggaacttattggactattcacatcactccagaaccagaatctttttatgttagctttgaaacaaacttaagccacctcctatgatgacctgatcaggaaagctatggaaggcttcaagccaggaaaatttgtgatcactttgttaatcagagttctaaatgtcgcgccgtgttttcttcacctcagaagattgaaggttttaagcgtcttgattgccagagtgctatgttcaatgattacaattttgtttttaccagttttgctaagaagcagcaataacagcagagttgattaagaaaaatgaagaaaaaaatgcaaaaagagaacacacgtaagaaggtggtggatgctttctagatgtcgatgctggggtcagtgctttccataaccaccacagtgtagttgcataaagccctatatgtaatgatagtgtaatcattttgaattgtatgcattattatatcaaggaaatagatatcttgcacgaatgttcgcttctgtgtttaggtattctctgccactcttgctgtgaaattgaagtgcatgtagaaaaaaccttttactatatgaaactttataacacttgtgaaagcaattcaatttggtttatgcacagtgtaatatttctccaagtatcatccaaaattccccacagacaaagctttcatcctcattaggtgttggactcagcctaaccgtctaggactgttctattaaattgctgccagaattttacatccagttacctccactttctagaacatattctttactaatattattgaaaccaatttctacctcatacagaggttttttaaaacagcaattaaagtttttcttccatg

SEQ ID NO: 72186 - DNA, 326 bp, Homo sapiens
attagcatgagaaaaaaagaatgtgagtcaggattcagtactgaaaagttcaaattatggaattttttaagagaaagaaacatttactactttctgtaacttgaactaacctctggtttaaagtggaattccttcagctacatgacataatggaaagtagattgtcaagaaatagtgggaactggattctggctgtggttcttctcattaccagctggataagcttggacaaaccccttgaactttctgaatctcaagttcatcatctattaaatggcaaaaataataactgctaatatttatggagtatttactaccattttaca

SEQ ID NO: 72187 - DNA, 547 bp, Homo sapiens
tgaccacagatgttgcctgaatctcactttctggaacagtagcatatgaccatatataaagcccccaaccaacactttccctaatggactattccctgctcattcctgacagaggtgtccgcactgtttctggggttcctttcattatacagactctcaaaaccaaacaggttatttggtaaatggaagagatctattacagtgtggagtcattaaaacagtccttcccagtatccagctcccttccgctttgcctgcttgactttctagagagcccacctcctctttcgagtcagtagagagtcactgagttcaatttgctgcaaactaattaattcctaagaactttgacactagaagctaagaccccaaaacagctcctcctcctttcatcctgagagaaaatatttcagatataatacatacattttcaatttccatatttaaaattcgcttcaatccatttttccccatatttataaggtcacatttgttctttatgttaatggcacagatttcagagccaggagactcaaagtacttctca

SEQ ID NO: 72188 - DNA, 525 bp, Homo sapiens
accttgtgattcacccacctcggcctcccaaagtgctgagattacaggagtgagccactacaccaggtcatttcttagtatttttactcttttgatctatagtaagtaaaattgtttttatctttgaatttttaaatttttaacacagttcaaatcagtgtgtctgatttcatctccttctctaacaaaccagggtgccagaactgcttcagtttctctgccttctctttgtctatgatgactaatgtatgaaggtatctgctgcatcaaactttaaacttcacattatccttatttctcttgaccttgacagatctggcatcttttcacctggctgtaagcagaaagtccttgatctccttaactttttgaggcatggcagcatgtgaggcagggagaggacacagacccacacagcaagtggtgagaagccaacagtggaattgttttcttaattccatttgttgattgtttattgctagtgtatagaaatacaactgatttttgtatattgatcttgtattc

SEQ ID NO: 72189 - DNA, 363 bp, Homo sapiens
ggatttttattaaaatttctgtttgtatattaatttcagggaaaacaatattcttctatatgagcctttcctttcagtaatctgcatttattcaagtgtcctcatatatgttttccaaaaattttatcattttcattatataggtcatgtatcttataggaggcagaattctaaagtccctctaagttttccacccctagtcagtaaaacactaatctaggcactgctaagaatgtacagatgtaattaaatttatagatcttaaagtagggaaattattgtagatatctggttggcccagtctaaccaattgagccctcataaaaagagaaatttcttcagctggagtcagtcagatgtggc

SEQ ID NO: 72190 - DNA, 3888 bp, Homo sapiens
ccgagtgacaaggaggtgggagagggtagcagcatgggctacgcggttggctgccctcagtccccctgctgctgaagctgccctgcccatgcccacccaggccgtggggccaggggcctgccagggctaggagtgggcctgccgttcatgggtctctagggatttccgagatgcctgggaagagaggcttgggctggtggtgggcccggctgcccctttgcctgctcctcagcctttacggcccctggatgccttcctccctgggaaagcccaaaggccaccctcacatgaattccatccgcatagatggggacatcacactgggaggcctgttcccggtgcatggccggggctcagagggcaagccctgtggagaacttaagaaggaaaagggcatccaccggctggaggccatgctgttcgccctggatcgcatcaacaacgacccggacctgctgcctaacatcacgctgggcgcccgcattctggacacctgctccagggacacccatgccctcgagcagtcgctgacctttgtgcaggcgctcatcgagaaggatggcacagaggtccgctgtggcagtggcggcccacccatcatcaccaagcctgaacgtgtggtgggtgtcatcggtgcttcagggagctcggtctccatcatggtggccaacatccttcgcctcttcaagataccccagatcagctacgcctccacagcgccagacctgagtgacaacagccgctacgacttcttctcccgcgtggtgccctcggacacgtaccaggcccaggccatggtggacatcgtccgtgccctcaagtggaactatgtgtccacagtggcctcggagggcagctatggtgagagcggtgtggaggccttcatccagaagtcccgtgaggacgggggcgtgtgcatcgcccagtcggtgaagataccacgggagcccaaggcaggcgagttcgacaagatcatccgccgcctcctggagacttcgaacgccagggcagtcatcatctttgccaacgaggatgacatcaggcgtgtgctggaggcagcacgaagggccaaccagacaggccatttcttctggatgggctctgacagctggggctccaagattgcacctgtgctgcacctggaggaggtggctgagggtgctgtcacgatcctccccaagaggatgtccgtacgaggcttcgaccgctacttctccagccgcacgctggacaacaaccggcgcaacatctggtttgccgagttctgggaggacaacttccactgcaagctgagccgccacgccctcaagaagggcagccacgtcaagaagtgcaccaaccgtgagcgaattgggcaggattcagcttatgagcaggaggggaaggtgcagtttgtgatcgatgccgtgtacgccatgggccacgcgctgcacgccatgcaccgtgacctgtgtcccggccgcgtggggctctgcccgcgcatggaccctgtagatggcacccagctgcttaagtacatccgaaacgtcaacttctcaggcatcgcagggaaccctgtgaccttcaatgagaatggagatgcgcctgggcgctatgacatctaccaataccagctgcgcaacgattctgccgagtacaaggtcattggctcctggactgaccacctgcaccttagaatagagcggatgcactggccggggagcgggcagcagctgccccgctccatctgcagcctgccctgccaaccgggtgagcggaagaagacagtgaagggcatgccttgctgctggcactgcgagccttgcacagggtaccagtaccaggtggaccgctacacctgtaagacgtgtccctatgacatgcggcccacagagaaccgcacgggctgccggcccatccccatcatcaagcttgagtggggctcgccctgggccgtgctgcccctcttcctggccgtggtgggcatcgctgccacgttgttcgtggtgatcacctttgtgcgctacaacgacacgcccatcgtcaaggcctcgggccgtgaactgagctacgtgctgctggcaggcatcttcctgtgctatgccaccaccttcctcatgatcgctgagcccgaccttggcacctgctcgctgcgccgaatcttcctgggactagggatgagcatcagctatgcagccctgctcaccaagaccaaccgcatctaccgcatcttcgagcagggcaagcgctcggtcagtgccccacgcttcatcagccccgcctcacagctggccatcaccttcagcctcatctcgctgcagctgctgggcatctgtgtgtggtttgtggtggacccctcccactcggtggtggacttccaggaccagcggacactcgacccccgcttcgccaggggtgtgctcaagtgtgacatctcggacctgtcgctcatctgcctgctgggctacagcatgctgctcatggtcacgtgcaccgtgtatgccatcaagacacgcggcgtgcccgagaccttcaatgaggccaagcccattggcttcaccatgtacaccacttgcatcgtctggctggccttcatccccatcttctttggcacctcgcagtcggccgacaagctgtacatccagacgacgacgctgacggtctcggtgagtctgagcgcctcggtgtccctgggaatgctctacatgcccaaagtctacatcatcctcttccacccggagcagaacgtgcccaagcgcaagcgcagcctcaaagccgtcgttacggcggccaccatgtccaacaagttcacgcagaagggcaacttccggcccaacggagaggccaagtctgagctctgcgagaaccttgaggccccagcgctggccaccaaacagacttacgtcacttacaccaaccatgcaatctagcgagtccatggagctgagcagcaggaggaggagccgtgaccctgtggaaggtgcgtcgggccagggccacacccaagggcccagctgtcttgcctgcccgtgggcacccacggacgtggcttggtgctgaggatagcagagcccccagccatcactgctggcagcctgggcaaaccgggtgagcaacaggaggacgaggggccggggcggtgccaggctaccacaagaacctgcgtcttggaccattgcccctcccggccccaaaccacaggggctcaggtcgtgtgggccccagtgctagatctctccctcccttcgtctctgtctgtgctgttggcgacccctctgtctgtctccagccctgtctttctgttctcttatctctttgtttcaccttttccctctctggcgtccccggctgcttgtactcttggccttttctgtgtctcctttctggctcttgcctccgcctctctctctcatcctctttgtcctcagctcctcctgctttcttgggtcccaccagtgtcacttttctgccgttttctttcctgttctcctctgcttcattctcgtccagccattgctcccctctccctgccacccttccccagttcaccaaaccttacatgttgcaaaagagaaaaaaggaaaaaaaatcaaaacacaaaaaagccaaaacgaaaacaaatctcgagtgtgttgccaagtgctgcgtcctcctggtggcctctgtgtgtgtccctgtggcccgcagcctgcccgcctgccccgcccatctgccgtgtgtcttgcccgcctgccccgcccgtctgccgtctgtcttgcccgcctgcccgcctgcccctcctgccgaccacacggagttcagtgcctgggtgtttggtgatggttattgacgacaatgtgtagcgcatgattgtttttataccaagaacatttctaataaaaataaacacatggttttgcaaaaaaaatc

SEQ ID NO: 72191 - DNA, 500 bp, Homo sapiens
ggtcttgaactcctgacctcaagtgatccacccacctcagtctcccaaagtgctgggattacaggtgtgagccaccatgcccagttagtttcttcatctctacaatggaggtgattacaccttagcattgttgtgagaaatcaatgagtgaatatacatcaagagttccgtacaatgcctgacacatagcaagtactggtggaagttacttacttaatgttattgttgttattcaatatgttatctaatatcatgattacccaggctgtggcccgcagcctgcccgcctgccccgcccatctgccgtgtgtcttgcccgcctgccccgcccgtctgccgtctgtcttgcccgcctgcccgcctgcccctcctgccgaccacacggagttcagtgcctgggtgtttggtgatggttattgacgacaatgtgtagcgcatgattgtttttataccaagaacatttctaataaaaataaacacatggttttgcaaaaaaaatc

SEQ ID NO: 72192 - DNA, 441 bp, Homo sapiens
catcacccactcccactcagggtgtggggagcagctctctgaaggacctggaattttggcacagagggcggtgaatgaagagggagctgtgggcagaaggcagcatgtgcagaggggtgagggcggcggttgtgtgatggtggatgcgtgtgagaatgggcaaggaatgtgggggtggatgagccaggaaggcatgcgtctcaggggaccggggctgggcagaggtggttgtggggcctgagtcagacgtggggcgggtgtggatctggaggggagaggtgtggtcttgcccgcctgcccgcctgcccctcctgccgaccacacggagttcagtgcctgggtgtttggtgatggttattgacgacaatgtgtagcgcatgattgtttttataccaagaacatttctaataaaaataaacacatggttttgcaaaaaaaatc

SEQ ID NO: 72193 - DNA, 3831 bp, Homo sapiens
ccgagtgacaaggaggtgggagagggtagcagcatgggctacgcggttggctgccctcagtccccctgctgctgaagctgccctgcccatgcccacccaggccgtggggccaggggcctgccagggctaggagtgggcctgccgttcatgggtctctagggatttccgagatgcctgggaagagaggcttgggctggtggtgggcccggctgcccctttgcctgctcctcagcctttacggcccctggatgccttcctccctgggaaagcccaaaggccaccctcacatgaattccatccgcatagatggggacatcacactgggaggcctgttcccggtgcatggccggggctcagagggcaagccctgtggagaacttaagaaggaaaagggcatccaccggctggaggccatgctgttcgccctggatcgcatcaacaacgacccggacctgctgcctaacatcacgctgggcgcccgcattctggacacctgctccagggacacccatgccctcgagcagtcgctgacctttgtgcaggcgctcatcgagaaggatggcacagaggtccgctgtggcagtggcggcccacccatcatcaccaagcctgaacgtgtggtgggtgtcatcggtgcttcagggagctcggtctccatcatggtggccaacatccttcgcctcttcaagataccccagatcagctacgcctccacagcgccagacctgagtgacaacagccgctacgacttcttctcccgcgtggtgccctcggacacgtaccaggcccaggccatggtggacatcgtccgtgccctcaagtggaactatgtgtccacagtggcctcggagggcagctatggtgagagcggtgtggaggccttcatccagaagtcccgtgaggacgggggcgtgtgcatcgcccagtcggtgaagataccacgggagcccaaggcaggcgagttcgacaagatcatccgccgcctcctggagacttcgaacgccagggcagtcatcatctttgccaacgaggatgacatcaggcgtgtgctggaggcagcacgaagggccaaccagacaggccatttcttctggatgggctctgacagctggggctccaagattgcacctgtgctgcacctggaggaggtggctgagggtgctgtcacgatcctccccaagaggatgtccgtacgaggcttcgaccgctacttctccagccgcacgctggacaacaaccggcgcaacatctggtttgccgagttctgggaggacaacttccactgcaagctgagccgccacgccctcaagaagggcagccacgtcaagaagtgcaccaaccgtgagcgaattgggcaggattcagcttatgagcaggaggggaaggtgcagtttgtgatcgatgccgtgtacgccatgggccacgcgctgcacgccatgcaccgtgacctgtgtcccggccgcgtggggctctgcccgcgcatggaccctgtagatggcacccagctgcttaagtacatccgaaacgtcaacttctcaggcatcgcagggaaccctgtgaccttcaatgagaatggagatgcgcctgggcgctatgacatctaccaataccagctgcgcaacgattctgccgagtacaaggtcattggctcctggactgaccacctgcaccttagaatagagcggatgcactggccggggagcgggcagcagctgccccgctccatctgcagcctgccctgccaaccgggtgagcggaagaagacagtgaagggcatgccttgctgctggcactgcgagccttgcacagggtaccagtaccaggtggaccgctacacctgtaagacgtgtccctatgacatgcggcccacagagaaccgcacgggctgccggcccatccccatcatcaagcttgagtggggctcgccctgggccgtgctgcccctcttcctggccgtggtgggcatcgctgccacgttgttcgtggtgatcacctttgtgcgctacaacgacacgcccatcgtcaaggcctcgggccgtgaactgagctacgtgctgctggcaggcatcttcctgtgctatgccaccaccttcctcatgatcgctgagcccgaccttggcacctgctcgctgcgccgaatcttcctgggactagggatgagcatcagctatgcagccctgctcaccaagaccaaccgcatctaccgcatcttcgagcagggcaagcgctcggtcagtgccccacgcttcatcagccccgcctcacagctggccatcaccttcagcctcatctcgctgcagctgctgggcatctgtgtgtggtttgtggtggacccctcccactcggtggtggacttccaggaccagcggacactcgacccccgcttcgccaggggtgtgctcaagtgtgacatctcggacctgtcgctcatctgcctgctgggctacagcatgctgctcatggtcacgtgcaccgtgtatgccatcaagacacgcggcgtgcccgagaccttcaatgaggccaagcccattggcttcaccatgtacaccacttgcatcgtctggctggccttcatccccatcttctttggcacctcgcagtcggccgacaagctgtacatccagacgacgacgctgacggtctcggtgagtctgagcgcctcggtgtccctgggaatgctctacatgcccaaagtctacatcatcctcttccacccggagcagaacgtgcccaagcgcaagcgcagcctcaaagccgtcgttacggcggccaccatgtccaacaagttcacgcagaagggcaacttccggcccaacggagaggccaagtctgagctctgcgagaaccttgaggccccagcgctggccaccaaacagacttacgtcacttacaccaaccatgcaatctagcgagtccatggagctgagcagcaggaggaggagccgtgaccctgtggaaggtgcgtcgggccagggccacacccaagggcccagctgtcttgcctgcccgtgggcacccacggacgtggcttggtgctgaggatagcagagcccccagccatcactgctggcagcctgggcaaaccgggtgagcaacaggaggacgaggggccggggcggtgccaggctaccacaagaacctgcgtcttggaccattgcccctcccggccccaaaccacaggggctcaggtcgtgtgggccccagtgctagatctctccctcccttcgtctctgtctgtgctgttggcgacccctctgtctgtctccagccctgtctttctgttctcttatctctttgtttcaccttttccctctctggcgtccccggctgcttgtactcttggccttttctgtgtctcctttctggctcttgcctccgcctctctctctcatcctctttgtcctcagctcctcctgctttcttgggtcccaccagtgtcacttttctgccgttttctttcctgttctcctctgcttcattctcgtccagccattgctcccctctccctgccacccttccccagttcaccaaaccttacatgttgcaaaagagaaaaaaggaaaaaaaatcaaaacacaaaaaagccaaaacgaaaacaaatctcgagtgtgttgccaagtgctgcgtcctcctggtggcctctgtgtgtgtccgccccgcccgtctgccgtctgtcttgcccgcctgcccgcctgcccctcctgccgaccacacggagttcagtgcctgggtgtttggtgatggttattgacgacaatgtgtagcgcatgattgtttttataccaagaacatttctaataaaaataaacacatggttttgcaaaaaaaatc

SEQ ID NO: 72194 - DNA, 2970 bp, Homo sapiens
tgggacagttgtggaccctgggcttctgggggtgagggacgtgggcccaaagcaagtgtggccaggagtgggggcagtttcgtggacagacgcggctgggctgggctggtgtatgttcctacaggcgtgtgctggaggcagcacgaagggccaaccagacaggccatttcttctggatgggctctgacagctggggctccaagattgcacctgtgctgcacctggaggaggtggctgagggtgctgtcacgatcctccccaagaggatgtccgtacgaggcttcgaccgctacttctccagccgcacgctggacaacaaccggcgcaacatctggtttgccgagttctgggaggacaacttccactgcaagctgagccgccacgccctcaagaagggcagccacgtcaagaagtgcaccaaccgtgagcgaattgggcaggattcagcttatgagcaggaggggaaggtgcagtttgtgatcgatgccgtgtacgccatgggccacgcgctgcacgccatgcaccgtgacctgtgtcccggccgcgtggggctctgcccgcgcatggaccctgtagatggcacccagctgcttaagtacatccgaaacgtcaacttctcaggcatcgcagggaaccctgtgaccttcaatgagaatggagatgcgcctgggcgctatgacatctaccaataccagctgcgcaacgattctgccgagtacaaggtcattggctcctggactgaccacctgcaccttagaatagagcggatgcactggccggggagcgggcagcagctgccccgctccatctgcagcctgccctgccaaccgggtgagcggaagaagacagtgaagggcatgccttgctgctggcactgcgagccttgcacagggtaccagtaccaggtggaccgctacacctgtaagacgtgtccctatgacatgcggcccacagagaaccgcacgggctgccggcccatccccatcatcaagcttgagtggggctcgccctgggccgtgctgcccctcttcctggccgtggtgggcatcgctgccacgttgttcgtggtgatcacctttgtgcgctacaacgacacgcccatcgtcaaggcctcgggccgtgaactgagctacgtgctgctggcaggcatcttcctgtgctatgccaccaccttcctcatgatcgctgagcccgaccttggcacctgctcgctgcgccgaatcttcctgggactagggatgagcatcagctatgcagccctgctcaccaagaccaaccgcatctaccgcatcttcgagcagggcaagcgctcggtcagtgccccacgcttcatcagccccgcctcacagctggccatcaccttcagcctcatctcgctgcagctgctgggcatctgtgtgtggtttgtggtggacccctcccactcggtggtggacttccaggaccagcggacactcgacccccgcttcgccaggggtgtgctcaagtgtgacatctcggacctgtcgctcatctgcctgctgggctacagcatgctgctcatggtcacgtgcaccgtgtatgccatcaagacacgcggcgtgcccgagaccttcaatgaggccaagcccattggcttcaccatgtacaccacttgcatcgtctggctggccttcatccccatcttctttggcacctcgcagtcggccgacaagctgtacatccagacgacgacgctgacggtctcggtgagtctgagcgcctcggtgtccctgggaatgctctacatgcccaaagtctacatcatcctcttccacccggagcagaacgtgcccaagcgcaagcgcagcctcaaagccgtcgttacggcggccaccatgtccaacaagttcacgcagaagggcaacttccggcccaacggagaggccaagtctgagctctgcgagaaccttgaggccccagcgctggccaccaaacagacttacgtcacttacaccaaccatgcaatctagcgagtccatggagctgagcagcaggaggaggagccgtgaccctgtggaaggtgcgtcgggccagggccacacccaagggcccagctgtcttgcctgcccgtgggcacccacggacgtggcttggtgctgaggatagcagagcccccagccatcactgctggcagcctgggcaaaccgggtgagcaacaggaggacgaggggccggggcggtgccaggctaccacaagaacctgcgtcttggaccattgcccctcccggccccaaaccacaggggctcaggtcgtgtgggccccagtgctagatctctccctcccttcgtctctgtctgtgctgttggcgacccctctgtctgtctccagccctgtctttctgttctcttatctctttgtttcaccttttccctctctggcgtccccggctgcttgtactcttggccttttctgtgtctcctttctggctcttgcctccgcctctctctctcatcctctttgtcctcagctcctcctgctttcttgggtcccaccagtgtcacttttctgccgttttctttcctgttctcctctgcttcattctcgtccagccattgctcccctctccctgccacccttccccagttcaccaaaccttacatgttgcaaaagagaaaaaaggaaaaaaaatcaaaacacaaaaaagccaaaacgaaaacaaatctcgagtgtgttgccaagtgctgcgtcctcctggtggcctctgtgtgtgtccctgtggcccgcagcctgcccgcctgccccgcccatctgccgtgtgtcttgcccgcctgccccgcccgtctgccgtctgtcttgcccgcctgcccgcctgcccctcctgccgaccacacggagttcagtgcctgggtgtttggtgatggttattgacgacaatgtgtagcgcatgattgtttttataccaagaacatttctaataaaaataaacacatggttttgcaaaaaaaatc

SEQ ID NO: 72195 - DNA, 3747 bp, Homo sapiens
ccgagtgacaaggaggtgggagagggtagcagcatgggctacgcggttggctgccctcagtccccctgctgctgaagctgccctgcccatgcccacccaggccgtggggccaggggcctgccagggctaggagtgggcctgccgttcatgggtctctagggatttccgagatgcctgggaagagaggcttgggctggtggtgggcccggctgcccctttgcctgctcctcagcctttacggcccctggatgccttcctccctgggaaagcccaaaggccaccctcacatgaattccatccgcatagatggggacatcacactgggaggcctgttcccggtgcatggccggggctcagagggcaagccctgtggagaacttaagaaggaaaagggcatccaccggctggaggccatgctgttcgccctggatcgcatcaacaacgacccggacctgctgcctaacatcacgctgggcgcccgcattctggacacctgctccagggacacccatgccctcgagcagtcgctgacctttgtgcaggcgctcatcgagaaggatggcacagaggtccgctgtggcagtggcggcccacccatcatcaccaagcctgaacgtgtggtgggtgtcatcggtgcttcagggagctcggtctccatcatggtggccaacatccttcgcctcttcaagataccccagatcagctacgcctccacagcgccagacctgagtgacaacagccgctacgacttcttctcccgcgtggtgccctcggacacgtaccaggcccaggccatggtggacatcgtccgtgccctcaagtggaactatgtgtccacagtggcctcggagggcagctatggtgagagcggtgtggaggccttcatccagaagtcccgtgaggacgggggcgtgtgcatcgcccagtcggtgaagataccacgggagcccaaggcaggcgagttcgacaagatcatccgccgcctcctggagacttcgaacgccagggcagtcatcatctttgccaacgaggatgacatcaggcgtgtgctggaggcagcacgaagggccaaccagacaggccatttcttctggatgggctctgacagctggggctccaagattgcacctgtgctgcacctggaggaggtggctgagggtgctgtcacgatcctccccaagaggatgtccgtacgagaccgtgagcgaattgggcaggattcagcttatgagcaggaggggaaggtgcagtttgtgatcgatgccgtgtacgccatgggccacgcgctgcacgccatgcaccgtgacctgtgtcccggccgcgtggggctctgcccgcgcatggaccctgtagatggcacccagctgcttaagtacatccgaaacgtcaacttctcaggcatcgcagggaaccctgtgaccttcaatgagaatggagatgcgcctgggcgctatgacatctaccaataccagctgcgcaacgattctgccgagtacaaggtcattggctcctggactgaccacctgcaccttagaatagagcggatgcactggccggggagcgggcagcagctgccccgctccatctgcagcctgccctgccaaccgggtgagcggaagaagacagtgaagggcatgccttgctgctggcactgcgagccttgcacagggtaccagtaccaggtggaccgctacacctgtaagacgtgtccctatgacatgcggcccacagagaaccgcacgggctgccggcccatccccatcatcaagcttgagtggggctcgccctgggccgtgctgcccctcttcctggccgtggtgggcatcgctgccacgttgttcgtggtgatcacctttgtgcgctacaacgacacgcccatcgtcaaggcctcgggccgtgaactgagctacgtgctgctggcaggcatcttcctgtgctatgccaccaccttcctcatgatcgctgagcccgaccttggcacctgctcgctgcgccgaatcttcctgggactagggatgagcatcagctatgcagccctgctcaccaagaccaaccgcatctaccgcatcttcgagcagggcaagcgctcggtcagtgccccacgcttcatcagccccgcctcacagctggccatcaccttcagcctcatctcgctgcagctgctgggcatctgtgtgtggtttgtggtggacccctcccactcggtggtggacttccaggaccagcggacactcgacccccgcttcgccaggggtgtgctcaagtgtgacatctcggacctgtcgctcatctgcctgctgggctacagcatgctgctcatggtcacgtgcaccgtgtatgccatcaagacacgcggcgtgcccgagaccttcaatgaggccaagcccattggcttcaccatgtacaccacttgcatcgtctggctggccttcatccccatcttctttggcacctcgcagtcggccgacaagctgtacatccagacgacgacgctgacggtctcggtgagtctgagcgcctcggtgtccctgggaatgctctacatgcccaaagtctacatcatcctcttccacccggagcagaacgtgcccaagcgcaagcgcagcctcaaagccgtcgttacggcggccaccatgtccaacaagttcacgcagaagggcaacttccggcccaacggagaggccaagtctgagctctgcgagaaccttgaggccccagcgctggccaccaaacagacttacgtcacttacaccaaccatgcaatctagcgagtccatggagctgagcagcaggaggaggagccgtgaccctgtggaaggtgcgtcgggccagggccacacccaagggcccagctgtcttgcctgcccgtgggcacccacggacgtggcttggtgctgaggatagcagagcccccagccatcactgctggcagcctgggcaaaccgggtgagcaacaggaggacgaggggccggggcggtgccaggctaccacaagaacctgcgtcttggaccattgcccctcccggccccaaaccacaggggctcaggtcgtgtgggccccagtgctagatctctccctcccttcgtctctgtctgtgctgttggcgacccctctgtctgtctccagccctgtctttctgttctcttatctctttgtttcaccttttccctctctggcgtccccggctgcttgtactcttggccttttctgtgtctcctttctggctcttgcctccgcctctctctctcatcctctttgtcctcagctcctcctgctttcttgggtcccaccagtgtcacttttctgccgttttctttcctgttctcctctgcttcattctcgtccagccattgctcccctctccctgccacccttccccagttcaccaaaccttacatgttgcaaaagagaaaaaaggaaaaaaaatcaaaacacaaaaaagccaaaacgaaaacaaatctcgagtgtgttgccaagtgctgcgtcctcctggtggcctctgtgtgtgtccctgtggcccgcagcctgcccgcctgccccgcccatctgccgtgtgtcttgcccgcctgccccgcccgtctgccgtctgtcttgcccgcctgcccgcctgcccctcctgccgaccacacggagttcagtgcctgggtgtttggtgatggttattgacgacaatgtgtagcgcatgattgtttttataccaagaacatttctaataaaaataaacacatggttttgcaaaaaaaatc

SEQ ID NO: 72196 - DNA, 3141 bp, Homo sapiens
  misc_feature (672)..(672): n is a, c, g, or t
  misc_feature (785)..(785): n is a, c, g, or t
  misc_feature (1273)..(1273): n is a, c, g, or t
  misc_feature (2464)..(2464): n is a, c, g, or t
ctagcatcagtaggtttaccatagaaggattcagtggagatagcgagggtggtgagtgttgctggattgagcccgtccctgcagcctgggcacgggagcactgcagtgccatgaaggagagggctgggggataatagcacagccggttcctatttccttttccacctggttaagactcccggggaggccctgcccagcagtccttatgagatgctgccttcctcttttttgaaaggcatagatgataaggaggtggacatgttttgagaagagaacctagagctcattacttgtatttgaggcatgtattgcttcactcccactttgggagagttttttctggggaagttaaaggctattcaggatcagagagtttcctgcatggtcccaggggctgggaggagccacctgctcagctggtggttagctgatagcacccagcctacccaccaagataggaggcagctcagatgtcactgggattcgcagtaccacaggctgtccctgggcccaagcagttagctagctgcaccccgggagggggtgttgagagcactgaagctcctgtgggagagtgcctttgacatccccccactccccactgcccagaactaggaggtagtgaaaggtgtcagtggcaagaaggctgggccagagcatggagggaggccnacctgggctccacacccacctcctccaccaccggctggctgtgcgaccctgggcaggtggcgggggttaagcctcagtgtccttctttgaaaaggggcatcatcctatcctcngtttgaggattagacgtgatagtgcgcaggaagcactctggtgcctggtacattgtaagtgctcaataaatgcagcttcccaaaatgatttcaatggcacatggtcctgcatccaggtgggatctgctacttgagtctccccctcaaaggggcctgctgaaatacgcagctcagtgggaaaccaaaacatacacccctttcctccagtgctccccaggaagcgccaagtcctgagcccagccagcaacttcgaagaagtgccctccaacaagtggcagtgggcacttgagcaagtgacttaacgcagccctctccccagcccctgcatccatctgggcctcattatctgggaggtggcttcttgtttcagagttacaggccctgaacaattttgtgttgggatgtgccataggcagtgccaggaaggttctttcatgagtaatttaacttgttactaagtttgctatcagccggggggctctttcccngggttcccttctttccctgggtccccttccccgcaaagcaaagtccaactcaagttagaaacatcccacagcctggagtcaggctgccctctcttcagttggtgtgtgatgtagaagcaggaagggcttcccactgataaccctaaaaataactgcccagaaatgctgtcagatggggccaagaggtgcacaggagcctgtgcccagctgccgacctggaacgtgggactttctagagggcttggaggagccctgccccttccaggcctcttcccaacagtgcttctcacgcctgctgctccattcccttttcctccttcctcccgcgcccccccctttcctggggtcacttcctgatgccattcttcaacttcgcccctgtcccccccaaaagcaatcaaatccacaacctaataaggcaaaagaatgaggagaatgtccgcctcccagcctctcccctaacagggtgcaggcctgaagcaaatttggaaaatgttacaacggagtgacaaccgatgggggctgggggtggggcggtgcagccttgttcaggagctgcccattgttggcctgaggcaggaccctaagggaaggccacccggtttgcgctttcctgatcaggctgttgacacccttctagcacaagaaaatgtatggaaagtaactgcctgagtcagctgcatctccagttgtgggatccacgtgccaggagaacacgaagtacacacaggtccgcagtgggagcccgctcggagacacctccccgccatcacggctgggactgtgcatatccaaacacttcttgcctctgagatgagcagttttcttccccttgactgtgccagggttcaattagcctgggcattaattaaaacttgtcaacacttagagtggggcccccagaaatctgtcacccctcctagatcattatcccaggctaatcaaccctctctaaggcagtttccattcttgacttagtgggagggaggaacaagcccctcggtgctggggagctctgggggaggtagggactgactgggcccaacccactttgttttggaaggtcaagcttagtaattaacctgaatgcttgggggagggggtgaaggagaaagaactgagtctagggatgtgccaggtctttcaaattgctaattatcagcgagcatgaggtcatccgtaaatatatcnaattctttagcttgtaattaaggtgctcattaaaagtgcagggaagtcttgttttcctaaaaggggaaaaaaacaacaacacaaaaagtctttgttttgacctgacacgatggctcagaacagggggaggactcaaggcacaggactagtttcctgccttaaagagcctttacaggaaattgactgcaaacagtattggtgaccctgccaaggaggcaaacctagggtgatgtcattgttcgaagctgtcaccgccaagcctctggccttggggcgaggagagttggtgggattaaaaaatgagtgtgtgtatgtgtgtgtgtgtttagcagtctctaaagaggcgagtcaagggaaaatcctagcgggagaaaaatcacaaggggtggggggtgtctcagaaatattcttagctgggttcaactttcctcgtttttctaagtttaaaaaatcctctcttactatttttgctcatcaaaatgctgctgctttttcagagacagccttttttgagccattccctatttagtgttttgggtaattggctgttacagtatggaatttgtggcccaaaggcagcgtggtaagttagacactaggtgcacggtgccccattgttatgaagtgtggaaactgagacgctggactagtctgatgtatctgtttcttccaccaaa

SEQ ID NO: 72197 - DNA, 919 bp, Homo sapiens
atttgtcttccatttgaagataccagggaaaagtcttgtcaagtagcaggccaccggtgtctagtgtagaggagacgatttctgtcgatagagagcaaagccagccaggcaaacgaacccgtaagccgcctgagggacagacaggcataaaacctaatgaatgggtaggtagactttgggcaaggctaattgcagcaagctgtgttcagttccccggcctctgttaagtagtcatttttatacaatctgtcggagggaagaggaaatagacccacacggtaaatgaacttgtggtgtttagctaggaagtggagtttgctctaagtagctctggtagcagactccagggagcacatggcaggcggactcatctgagtatctgtgctgaggagttgtgttaaactgttgaaacacttagaaattgctatagaaaaagagtactcccaaagttgccagctaatatggtaccgaatttcctgaaagacctttcttttgccatgtggtttttctataaagctgagtcaattaggcttctttatctccctgtccttggcaataaaacgacaaaagccgagggttgaacaggtagacactgttatctcactgaatcttcaccgctgccctatgaggtggctattgttactctccccattctatagatgaggacactgagccacagattggttgagtaacttgctcaggctcacacaactagcaggtgataacagctgaggtgaaagaacattttttctgggaagatacagggtgtttaaaggtacctgtttagtgcacagcaagttgcagtacttttaaattggagactggaatatgtaagtagatgtttgaatctctctctgtctttcagtgttacaggtgaatcaacaaaattagaatatctttctatttagtgactgaagaa

SEQ ID NO: 72198 - DNA, 384 bp, Homo sapiens
atagtgtcacttgagatataaattgttaaattttgatgaagtccaatttatctgtttattttttcttttgtcatacctaagaaactattgcctatatttggccaggtgcagtggctcacacctgtaatctcagcactttgcgagaccgagacaggcagattatctgaggttaggagtttgaggccagcctggccaatatggtgaaactccatctctacaaaaatacaaaaattagccaggtgtggtggggcacccctgtagtcccagctgggggggtggtggggtggccctgaggtgggaggatcgcttgaacttgggaggcggaggtttcagtgagctgagattgtaccactgcgctccagcctggtcgtgagactccgtctc

SEQ ID NO: 72199 - DNA, 373 bp, Homo sapiens
atatggaaaattctaaacatgatttgaactactcaagaagactattaaagagagttcctaaattgtacagaccgaaaccgaaagaagctgagagataatccttccagatcctttgtcaacattgactctagtgccccccaaccctccatctaaaggactgacattcatcaacctcttcatgagcaggggtattacataaaattgggagaatgaactctaacatttcatagtaaatttatctcactgaaatggaaagcagcagtgtatgtaaagggtttttaaaaaataaaacaacatcctataatcttccaattaatatcttcattccagaccttccagaattttaaaacacacccgctccattttgttttta

SEQ ID NO: 72200 - DNA, 585 bp, Homo sapiens
ctgtgcctggccaaatgctttcgtttctttaaaaatcaaagggaaaggaatgactataatccagtctgcattgtatatgtccttataccagtacatttgtgggatataatttttagttctttttatggagaagaagttcccaaggcagatgtgtctggggctcgtgaaaattcatcctgaagtcctccatgtccgggatgtatttcactgctaggaatccctcctgggcagaggtaggatctaaaggtgtgaccgctgaggaagtaggtcggctctctttttgtttgttttttgtttttgttttcagatggagtctgtctctgtcgcctgggctggagtgtagtcgtgtgatctcagctcactgcaacctccacctcctgggttcaagtgattctgctgcctcagcctccacagtagctgggatcacaggcacgcgccaccacacccagctaatttttgtgtttttagtagagatggggtttcaccatgttgtccaggctggtctcaaagtcctgacctcaagcgatccacccacctcagcctcccaaagtgctgggattacaggggtgagccaccgtgcccagc

SEQ ID NO: 72201 - DNA, 368 bp, Homo sapiens
tagacccaactctcttattttgacaatttgacatgaccttatgacacaggtttggagaggcaaaattttctacttgtggtattgaagtctggaatacattatctttattatttctctttgacacatgtgcagtgtattatagagaaaagctagttggaaccagaaaatttgagcttgagtttcatttagccatttattcgctgtcctgtgaaacagtgcttgtcctctctcacccttagtttgttttacttagaaatagaggctaattatagcttgtattaaataagcaatccccaactttgcaatgtatatcagaaaactcagctgaaaactataacttgagtggtcatgtagttataatgggttta

SEQ ID NO: 72202 - DNA, 4561 bp, Homo sapiens
gctctccagaggcgggccctgagccggcacctcccctttcggacagctcaagggactcagccaactggctcacgcctccccttcagcttctcttcacgcactccaagatctaaaccgagaatcgaaactaagctggggtccatggagcctgcacccgcccgatctccgaggccccagcaggaccccgcccggccccaggagcccaccatgcctccccccgagaccccctctgaaggccgccagcccagccccagccccagccctacagagcgagcccccgcttcggaggaggagttccagtttctgcgctgccagcaatgccaggcggaagccaagtgcccgaagctgctgccttgtctgcacacgctgtgctcaggatgcctggaggcgtcgggcatgcagtgccccatctgccaggcgccctggcccctaggtgcagacacacccgccctggataacgtctttttcgagagtctgcagcggcgcctgtcggtgtaccggcagattgtggatgcgcaggctgtgtgcacccgctgcaaagagtcggccgacttctggtgctttgagtgcgagcagctcctctgcgccaagtgcttcgaggcacaccagtggttcctcaagcacgaggcccggcccctagcagagctgcgcaaccagtcggtgcgtgagttcctggacggcacccgcaagaccaacaacatcttctgctccaaccccaaccaccgcacccctacgctgaccagcatctactgccgaggatgttccaagccgctgtgctgctcgtgcgcgctccttgacagcagccacagtgagctcaagtgcgacatcagcgcagagatccagcagcgacaggaggagctggacgccatgacgcaggcgctgcaggagcaggatagtgcctttggcgcggttcacgcgcagatgcacgcggccgtcggccagctgggccgcgcgcgtgccgagaccgaggagctgatccgcgagcgcgtgcgccaggtggtagctcacgtgcgggctcaggagcgcgagctgctggaggctgtggacgcgcggtaccagcgcgactacgaggagatggccagtcggctgggccgcctggatgctgtgctgcagcgcatccgcacgggcagcgcgctggtgcagaggatgaagtgctacgcctcggaccaggaggtgctggacatgcacggtttcctgcgccaggcgctctgccgcctgcgccaggaggagccccagagcctgcaagctgccgtgcgcaccgatggcttcgacgagttcaaggtgcgcctgcaggacctcagctcttgcatcacccaggggaaagatgcagctgtatccaagaaagccagcccagaggctgccagcactcccagggaccctattgacgttgacctgcccgaggaggcagagagagtgaaggcccaggttcaggccctggggctggctgaagcccagcctatggctgtggtacagtcagtgcccggggcacaccccgtgccagtgtacgccttctccatcaaaggcccttcctatggagaggatgtctccaatacaacgacagcccagaagaggaagtgcagccagacccagtgccccaggaaggtcatcaagatggagtctgaggaggggaaggaggcaaggttggctcggagctccccggagcagcccaggcccagcacctccaaggcagtctcaccaccccacctggatggaccgcctagccccaggagccccgtcataggaagtgaggtcttcctgcccaacagcaaccacgtggccagtggcgccggggaggcagaggaacgcgttgtggtgatcagcagctcggaagactcagatgccgaaaactcgtcctcccgagagctggatgacagcagcagtgagtccagtgacctccagctggaaggccccagcaccctcagggtcctggacgagaaccttgctgacccccaagcagaagacagacctctggttttctttgacctcaagattgacaatgaaacccagaagattagccagctggctgcggtgaaccgggaaagcaagttccgcgtggtcatccagcctgaagccctcttcagcatctactccaaggccgtgtccctggaggtggggctgcagcacttcctcagctttctgagctccatgcgccgccctatcttggcctgctacaagctgtgggggcctggcctcccaaacttcttccgggccctggaggacattaacaggctgtgggaattccaggaggccatctcgggcttcctggctgccctgcctctcatccgggagcgtgtgcccggggccagcagcttcaaactcaagaacctggcccagacctacctggcgagaaacatgagcgagcgcagcgccatggctgccgtgctggccatgcgtgacctgtgccgcctcctcgaggtctccccgggcccccagctggcccagcatgtctaccccttcagtagcctgcagtgctttgcctccctgcagcccctggtgcaggcagctgtgctgccccgggctgaggcccgcctcctggccctacacaacgtgagcttcatggagctgctgagtgcacaccgccgtgaccggcaggggggcctgaagaagtacagccgctatctaagcctgcagaccaccacgttgccccctgcccagcctgctttcaacctgcaggctctgggcacctactttgaaggcctgttggagggtccggcgctggcacgggcagaaggagtctccaccccacttgctggccgtggcttggcagagagggcctcccagcagagctgagaggagggggtgaccagcttggagtctctggtgggcagagagggatggggtccctgagccaggccccacccatcacagcattcccaggtcctggtacccagccctcagttgtcatttggttcagaatcagttccctttctctgggaccaaatttcccttctctaaacatcctacagagaaggttccaaagctgagcacccatcaccctaggtgtgcaccagactcctattagcccctccttccaggagctagaaccagggaggtcctgagtgaggaaggcatgacctctgggctctctaggtggccctggtcttgccccatccatcccacctgccactaccttgggtgtccttacagctctgccctgaccccagcccctgcccctggacacctgctgacagctcccacacagaacagtctgaggtgatgctggctacagccctggcagcccatggcaactcaaagtgccttccaaaccaaactgcccctcatgaggttagggtcccccaccctccacctgcccagaggccaactctgttcccttctcctttcatcccagaggggcctcatcagcaaagacagaaactgatgttccatgcatgtccctgcttccaaagcctgaccttccaaagcttgcttccttcctcctggctgcacagacacctctgcttggccacagctttgctctttggtcctcaggccaccagacccctcacagcatggcccttggctcttcctgcactgccctcaccctcagccgtcccaaggagtgcccagcactactcagcatgtagtccaggacctgcggcatcagcatcccctgggagcttcttagaaatgcagacctgtgggctctaccacaggcctctggaatcagaatcttcagggtggggcccagcagtctgtgttttaacaggttctcccggtgatgctggtgcatgctcaagtttgagaaccgctgctctcatagactgctcctccaaggggaagcagtgtggaacagcagagaaagtcccgtccctatctctgactgtgcagtgagtgtggcctaggaacaggtcccttcctaagctctagtgtccccatctgtaaaatgggctgattggcctccacggtcagagcggccatctggctgtgccatcctgcatttttaggaatggaaagcaggcctctgaggcagtggacaggaagacttctcatccttgaattctagctcccattccaaactgttagtccccaaccttgtggtcacatcagaggtcaacagcagaacagaggcaggtcagggttgtccgctctgattagcagaacgacagccccttcctcctcctccctccttcccatccctactcattagctccctgctcctgggatgcttcccaagcagcccaggcctctagcctccatggctgatgacctcagctttcacactggtgaagtctgtgtacccatactgcagccccatcccatggggcccctgaagacccactgaggaattccgtagggtcttgttcccacgaccggagtgctggctctcacagtgaattttgatgcatttaaaataagattctgatgccagactgttaaaataggcgctggttctgaagcaccgatggaaacagattgatgcagatggaaggaggaagggagactgggcccactgatttccagccccaccatgtgtgctgttttcagatgtgattgaggggtgttctgccctgcctccactgtcacagcctttaataaagatgtgaatcttgaaaaaaaaaaa

SEQ ID NO: 72203 - DNA, 3582 bp, Homo sapiens
gctctccagaggcgggccctgagccggcacctcccctttcggacagctcaagggactcagccaactggctcacgcctccccttcagcttctcttcacgcactccaagatctaaaccgagaatcgaaactaagctggggtccatggagcctgcacccgcccgatctccgaggccccagcaggaccccgcccggccccaggagcccaccatgcctccccccgagaccccctctgaaggccgccagcccagccccagccccagccctacagagcgagcccccgcttcggaggaggagttccagtttctgcgctgccagcaatgccaggcggaagccaagtgcccgaagctgctgccttgtctgcacacgctgtgctcaggatgcctggaggcgtcgggcatgcagtgccccatctgccaggcgccctggcccctaggtgcagacacacccgccctggataacgtctttttcgagagtctgcagcggcgcctgtcggtgtaccggcagattgtggatgcgcaggctgtgtgcacccgctgcaaagagtcggccgacttctggtgctttgagtgcgagcagctcctctgcgccaagtgcttcgaggcacaccagtggttcctcaagcacgaggcccggcccctagcagagctgcgcaaccagtcggtgcgtgagttcctggacggcacccgcaagaccaacaacatcttctgctccaaccccaaccaccgcacccctacgctgaccagcatctactgccgaggatgttccaagccgctgtgctgctcgtgcgcgctccttgacagcagccacagtgagctcaagtgcgacatcagcgcagagatccagcagcgacaggaggagctggacgccatgacgcaggcgctgcaggagcaggatagtgcctttggcgcggttcacgcgcagatgcacgcggccgtcggccagctgggccgcgcgcgtgccgagaccgaggagctgatccgcgagcgcgtgcgccaggtggtagctcacgtgcgggctcaggagcgcgagctgctggaggctgtggacgcgcggtaccagcgcgactacgaggagatggccagtcggctgggccgcctggatgctgtgctgcagcgcatccgcacgggcagcgcgctggtgcagaggatgaagtgctacgcctcggaccaggaggtgctggacatgcacggtttcctgcgccaggcgctctgccgcctgcgccaggaggagccccagagcctgcaagctgccgtgcgcaccgatggcttcgacgagttcaaggtgcgcctgcaggacctcagctcttgcatcacccaggggaaagatgcagctgtatccaagaaagccagcccagaggctgccagcactcccagggaccctattgacgttgacctgcccgaggaggcagagagagtgaaggcccaggttcaggccctggggctggctgaagcccagcctatggctgtggtacagtcagtgcccggggcacaccccgtgccagtgtacgccttctccatcaaaggcccttcctatggagaggatgtctccaatacaacgacagcccagaagaggaagtgcagccagacccagtgccccaggaaggtcatcaagatggagtctgaggaggggaaggaggcaaggttggctcggagctccccggagcagcccaggcccagcacctccaaggcagtctcaccaccccacctggatggaccgcctagccccaggagccccgtcataggaagtgaggtcttcctgcccaacagcaaccacgtggccagtggcgccggggaggcagaggaacgcgttgtggtgatcagcagctcggaagactcagatgccgaaaactcgtgcatggagcccatggagaccgccgagccacagtcctcgccagcccactcctcgccagcccactcctcgccagcccactcctcgccagtccagtctctgctgagagcacaaggagcctccagcctgccctgtggcacataccaccccccagcttggcctccccaccagcccgctgagcaggctgccacccccgatgctgagcctcacagcgagcctcctgatcaccaggagcgccctgccgtccaccgtgggatccgctacctgttgtacagagcacagagagccatccgccttcgccatgccctccgcttgcaccctcaattgcatcgggcccctattcggacttggtctccccatgtggtccaagccagcactcctgccatcacagggcccctcaaccatcctgccaatgcccaggaacatcctgcccagctgcaaaggggcatcagcccaccccaccggatacgaggggctgtgcgatcccgcagccgctccctccggggctcctcccatttatcccagtggctcaacaacttttttgccctccccttctcctccatggcttcccagcttgacatgtcttccgtggtgggggcaggggaaggcagagcccagactcttggagcagttgttccccctggggactctgtcagaggctccatggaggcctctcaagtccaagtgcctctggaagcctctccaattacattcccaccaccctgtgccccagaaaggccccccatcagcccagtcccaggcgcccgtcaagcaggcctctgagagtgctacccttctcttgtaaccttgcagccaacacccctgcccggcccctgagctgcctcctccagcccatgctcttacaggccctgcacagagtagcactcattaattcttggttaaggaatgaatcaacgaatgaatggctatgcatggacctctgggcagggagacctgggtcttctctggctgagaggggaaggctaaggcatggctgagattcaagccaccattccaggcctctttgcccaagaaagaaacttctgtcacccttgcactctcctgtattctgagtccctggccaatagcacagccttccatgccccgacccccaccccaagcctctccactaggcctctgccaggatctaagcccatgagcacagggactggctatcccaagacctggcagatgtggctgctcaataaacacttgttgaaccatcacccttgcgaacccttattccacgaccatcgcgttctccgatggatccagctcctccctgcaggctgttctctcttccctatgctggaactcagttctcctctggggataccatgtcccctcttcctcccacactcatgggcatcagaggtgggaggtagggtcaaggccccctgcttcctggactgttccagccccttcctggccgtctggtaagatcctctgtccctctcagggtgggccccatgctccccagctcatcccagacacccacctgcccaccctcattgagggcagacgtgagcattcacctcccagatttcttctccctgctcaggtcctgccttcctcctgagtgacttctatttccacccacctgcccgccactccttaacctctcaggggttgtcaccccattcccccagacagctgcctgccccgtggccgtgccctgcaccttgccatcaccgagcactgttggtccctcagccggtcctctcagactctgac

SEQ ID NO: 72204 - DNA, 4207 bp, Homo sapiens
gctctccagaggcgggccctgagccggcacctcccctttcggacagctcaagggactcagccaactggctcacgcctccccttcagcttctcttcacgcactccaagatctaaaccgagaatcgaaactaagctggggtccatggagcctgcacccgcccgatctccgaggccccagcaggaccccgcccggccccaggagcccaccatgcctccccccgagaccccctctgaaggccgccagcccagccccagccccagccctacagagcgagcccccgcttcggaggaggagttccagtttctgcgctgccagcaatgccaggcggaagccaagtgcccgaagctgctgccttgtctgcacacgctgtgctcaggatgcctggaggcgtcgggcatgcagtgccccatctgccaggcgccctggcccctaggtgcagacacacccgccctggataacgtctttttcgagagtctgcagcggcgcctgtcggtgtaccggcagattgtggatgcgcaggctgtgtgcacccgctgcaaagagtcggccgacttctggtgctttgagtgcgagcagctcctctgcgccaagtgcttcgaggcacaccagtggttcctcaagcacgaggcccggcccctagcagagctgcgcaaccagtcggtgcgtgagttcctggacggcacccgcaagaccaacaacatcttctgctccaaccccaaccaccgcacccctacgctgaccagcatctactgccgaggatgttccaagccgctgtgctgctcgtgcgcgctccttgacagcagccacagtgagctcaagtgcgacatcagcgcagagatccagcagcgacaggaggagctggacgccatgacgcaggcgctgcaggagcaggatagtgcctttggcgcggttcacgcgcagatgcacgcggccgtcggccagctgggccgcgcgcgtgccgagaccgaggagctgatccgcgagcgcgtgcgccaggtggtagctcacgtgcgggctcaggagcgcgagctgctggaggctgtggacgcgcggtaccagcgcgactacgaggagatggccagtcggctgggccgcctggatgctgtgctgcagcgcatccgcacgggcagcgcgctggtgcagaggatgaagtgctacgcctcggaccaggaggtgctggacatgcacggtttcctgcgccaggcgctctgccgcctgcgccaggaggagccccagagcctgcaagctgccgtgcgcaccgatggcttcgacgagttcaaggtgcgcctgcaggacctcagctcttgcatcacccaggggaaagatgcagctgtatccaagaaagccagcccagaggctgccagcactcccagggaccctattgacgttgacctgcccgaggaggcagagagagtgaaggcccaggttcaggccctggggctggctgaagcccagcctatggctgtggtacagtcagtgcccggggcacaccccgtgccagtgtacgccttctccatcaaaggcccttcctatggagaggatgtctccaatacaacgacagcccagaagaggaagtgcagccagacccagtgccccaggaaggtcatcaagatggagtctgaggaggggaaggaggcaaggttggctcggagctccccggagcagcccaggcccagcacctccaaggcagtctcaccaccccacctggatggaccgcctagccccaggagccccgtcataggaagtgaggtcttcctgcccaacagcaaccacgtggccagtggcgccggggaggcagaggaacgcgttgtggtgatcagcagctcggaagactcagatgccgaaaactcggtgagtggcccagaagttcagcccaggactcctgcctccccccatttcaggtcccagggggcacagccacagcaggtgactctcagacttgccttgcgcctggggaattttccagtgaggcattgagtcccaagctgtgctgaggacagtctccaaatgacagctgcatgcctggaccaccccagccctcccactacaccagggccaggagctcttctgaaatgctgatagcatgtgtccagagccctgtctcttttctggaatgtccaagacctttgtctggagcttccttatgcattttctgtcctctaagtcctcagtgaggagggctggacaagaatccattccttggtttattacagccagtgggggccagtgaaggggtgtcaggccacagggcagctatataggggccaaacaagtgaggtttgactccatccatgtagaaagatatataaatccattccacagtgaaacaggtggcctcgtgggtagtgacccttctgtccctagaggtttattactagaggctggactatcacctgtccaggggaaaaggggatctgaatagagtgaaaggttggactgggtggcccctgaggtctcttccagccctcagtctgaggttctgtattggaaagtgcatggagcccatggagaccgccgagccacatcctcgccagcccactcctcgccagcccactcctcgccagtccagtctctgctgagagcacaaggagcctccagcctgccctgtggcacataccaccccccagcttggcctccccaccagcccgctgagcaggctgccacccccgatgctgagcctcacagcgagcctcctgatcaccaggagcgccctgccgtccaccgtgggatccgctacctgttgtacagagcacagagagccatccgccttcgccatgccctccgcttgcaccctcaattgcatcgggcccctattcggacttggtctccccatgtggtccaagccagcactcctgccatcacagggcccctcaaccatcctgccaatgcccaggaacatcctgcccagctgcaaaggggcatcagcccaccccaccggatacgaggggctgtgcgatcccgcagccgctccctccggggctcctcccatttatcccagtggctcaacaacttttttgccctccccttctcctccatggcttcccagcttgacatgtcttccgtggtgggggcaggggaaggcagagcccagactcttggagcagttgttccccctggggactctgtcagaggctccatggaggcctctcaagtccaagtgcctctggaagcctctccaattacattcccaccaccctgtgccccagaaaggccccccatcagcccagtcccaggcgcccgtcaagcaggcctctgagagtgctacccttctcttgtaaccttgcagccaacacccctgcccggcccctgagctgcctcctccagcccatgctcttacaggccctgcacagagtagcactcattaattcttggttaaggaatgaatcaacgaatgaatggctatgcatggacctctgggcagggagacctgggtcttctctggctgagaggggaaggctaaggcatggctgagattcaagccaccattccaggcctctttgcccaagaaagaaacttctgtcacccttgcactctcctgtattctgagtccctggccaatagcacagccttccatgccccgacccccaccccaagcctctccactaggcctctgccaggatctaagcccatgagcacagggactggctatcccaagacctggcagatgtggctgctcaataaacacttgttgaaccatcacccttgcgaacccttattccacgaccatcgcgttctccgatggatccagctcctccctgcaggctgttctctcttccctatgctggaactcagttctcctctggggataccatgtcccctcttcctcccacactcatgggcatcagaggtgggaggtagggtcaaggccccctgcttcctggactgttccagccccttcctggccgtctggtaagatcctctgtccctctcagggtgggccccatgctccccagctcatcccagacacccacctgcccaccctcattgagggcagacgtgagcattcacctcccagatttcttctccctgctcaggtcctgccttcctcctgagtgacttctatttccacccacctgcccgccactccttaacctctcaggggttgtcaccccattcccccagacagctgcctgccccgtggccgtgccctgcaccttgccatcaccgagcactgttggtccctcagccggtcctctcagactctgac

SEQ ID NO: 72205 - DNA, 3438 bp, Homo sapiens
gctctccagaggcgggccctgagccggcacctcccctttcggacagctcaagggactcagccaactggctcacgcctccccttcagcttctcttcacgcactccaagatctaaaccgagaatcgaaactaagctggggtccatggagcctgcacccgcccgatctccgaggccccagcaggaccccgcccggccccaggagcccaccatgcctccccccgagaccccctctgaaggccgccagcccagccccagccccagccctacagagcgagcccccgcttcggaggaggagttccagtttctgcgctgccagcaatgccaggcggaagccaagtgcccgaagctgctgccttgtctgcacacgctgtgctcaggatgcctggaggcgtcgggcatgcagtgccccatctgccaggcgccctggcccctaggtgcagacacacccgccctggataacgtctttttcgagagtctgcagcggcgcctgtcggtgtaccggcagattgtggatgcgcaggctgtgtgcacccgctgcaaagagtcggccgacttctggtgctttgagtgcgagcagctcctctgcgccaagtgcttcgaggcacaccagtggttcctcaagcacgaggcccggcccctagcagagctgcgcaaccagtcggtgcgtgagttcctggacggcacccgcaagaccaacaacatcttctgctccaaccccaaccaccgcacccctacgctgaccagcatctactgccgaggatgttccaagccgctgtgctgctcgtgcgcgctccttgacagcagccacagtgagctcaagtgcgacatcagcgcagagatccagcagcgacaggaggagctggacgccatgacgcaggcgctgcaggagcaggatagtgcctttggcgcggttcacgcgcagatgcacgcggccgtcggccagctgggccgcgcgcgtgccgagaccgaggagctgatccgcgagcgcgtgcgccaggtggtagctcacgtgcgggctcaggagcgcgagctgctggaggctgtggacgcgcggtaccagcgcgactacgaggagatggccagtcggctgggccgcctggatgctgtgctgcagcgcatccgcacgggcagcgcgctggtgcagaggatgaagtgctacgcctcggaccaggaggtgctggacatgcacggtttcctgcgccaggcgctctgccgcctgcgccaggaggagccccagagcctgcaagctgccgtgcgcaccgatggcttcgacgagttcaaggtgcgcctgcaggacctcagctcttgcatcacccaggggaaagatgcagctgtatccaagaaagccagcccagaggctgccagcactcccagggaccctattgacgttgacctggatgtctccaatacaacgacagcccagaagaggaagtgcagccagacccagtgccccaggaaggtcatcaagatggagtctgaggaggggaaggaggcaaggttggctcggagctccccggagcagcccaggcccagcacctccaaggcagtctcaccaccccacctggatggaccgcctagccccaggagccccgtcataggaagtgaggtcttcctgcccaacagcaaccacgtggccagtggcgccggggaggcagaggaacgcgttgtggtgatcagcagctcggaagactcagatgccgaaaactcgtgcatggagcccatggagaccgccgagccacagtcctcgccagcccactcctcgccagcccactcctcgccagcccactcctcgccagtccagtctctgctgagagcacaaggagcctccagcctgccctgtggcacataccaccccccagcttggcctccccaccagcccgctgagcaggctgccacccccgatgctgagcctcacagcgagcctcctgatcaccaggagcgccctgccgtccaccgtgggatccgctacctgttgtacagagcacagagagccatccgccttcgccatgccctccgcttgcaccctcaattgcatcgggcccctattcggacttggtctccccatgtggtccaagccagcactcctgccatcacagggcccctcaaccatcctgccaatgcccaggaacatcctgcccagctgcaaaggggcatcagcccaccccaccggatacgaggggctgtgcgatcccgcagccgctccctccggggctcctcccatttatcccagtggctcaacaacttttttgccctccccttctcctccatggcttcccagcttgacatgtcttccgtggtgggggcaggggaaggcagagcccagactcttggagcagttgttccccctggggactctgtcagaggctccatggaggcctctcaagtccaagtgcctctggaagcctctccaattacattcccaccaccctgtgccccagaaaggccccccatcagcccagtcccaggcgcccgtcaagcaggcctctgagagtgctacccttctcttgtaaccttgcagccaacacccctgcccggcccctgagctgcctcctccagcccatgctcttacaggccctgcacagagtagcactcattaattcttggttaaggaatgaatcaacgaatgaatggctatgcatggacctctgggcagggagacctgggtcttctctggctgagaggggaaggctaaggcatggctgagattcaagccaccattccaggcctctttgcccaagaaagaaacttctgtcacccttgcactctcctgtattctgagtccctggccaatagcacagccttccatgccccgacccccaccccaagcctctccactaggcctctgccaggatctaagcccatgagcacagggactggctatcccaagacctggcagatgtggctgctcaataaacacttgttgaaccatcacccttgcgaacccttattccacgaccatcgcgttctccgatggatccagctcctccctgcaggctgttctctcttccctatgctggaactcagttctcctctggggataccatgtcccctcttcctcccacactcatgggcatcagaggtgggaggtagggtcaaggccccctgcttcctggactgttccagccccttcctggccgtctggtaagatcctctgtccctctcagggtgggccccatgctccccagctcatcccagacacccacctgcccaccctcattgagggcagacgtgagcattcacctcccagatttcttctccctgctcaggtcctgccttcctcctgagtgacttctatttccacccacctgcccgccactccttaacctctcaggggttgtcaccccattcccccagacagctgcctgccccgtggccgtgccctgcaccttgccatcaccgagcactgttggtccctcagccggtcctctcagactctgac

SEQ ID NO: 72206 - DNA, 2057 bp, Homo sapiens
gctctccagaggcgggccctgagccggcacctcccctttcggacagctcaagggactcagccaactggctcacgcctccccttcagcttctcttcacgcactccaagatctaaaccgagaatcgaaactaagctggggtccatggagcctgcacccgcccgatctccgaggccccagcaggaccccgcccggccccaggagcccaccatgcctccccccgagaccccctctgaaggccgccagcccagccccagccccagccctacagagcgagcccccgcttcggaggaggagttccagtttctgcgctgccagcaatgccaggcggaagccaagtgcccgaagctgctgccttgtctgcacacgctgtgctcaggatgcctggaggcgtcgggcatgcagtgccccatctgccaggcgccctggcccctaggtgcagacacacccgccctggataacgtctttttcgagagtctgcagcggcgcctgtcggtgtaccggcagattgtggatgcgcaggctgtgtgcacccgctgcaaagagtcggccgacttctggtgctttgagtgcgagcagctcctctgcgccaagtgcttcgaggcacaccagtggttcctcaagcacgaggcccggcccctagcagagctgcgcaaccagtcggtgcgtgagttcctggacggcacccgcaagaccaacaacatcttctgctccaaccccaaccaccgcacccctacgctgaccagcatctactgccgaggatgttccaagccgctgtgctgctcgtgcgcgctccttgacagcagccacagtgagctcaagtgcgacatcagcgcagagatccagcagcgacaggaggagctggacgccatgacgcaggcgctgcaggagcaggatagtgcctttggcgcggttcacgcgcagatgcacgcggccgtcggccagctgggccgcgcgcgtgccgagaccgaggagctgatccgcgagcgcgtgcgccaggtggtagctcacgtgcgggctcaggagcgcgagctgctggaggctgtggacgcgcggtaccagcgcgactacgaggagatggccagtcggctgggccgcctggatgctgtgctgcagcgcatccgcacgggcagcgcgctggtgcagaggatgaagtgctacgcctcggaccaggaggtgctggacatgcacggtttcctgcgccaggcgctctgccgcctgcgccaggaggagccccagagcctgcaagctgccgtgcgcaccgatggcttcgacgagttcaaggtgcgcctgcaggacctcagctcttgcatcacccaggggaaagatgcagctgtatccaagaaagccagcccagaggctgccagcactcccagggaccctattgacgttgacctggatgtctccaatacaacgacagcccagaagaggaagtgcagccagacccagtgccccaggaaggtcatcaagatggagtctgaggaggggaaggaggcaaggttggctcggagctccccggagcagcccaggcccagcacctccaaggcagtctcaccaccccacctggatggaccgcctagccccaggagccccgtcataggaagtgaggtcttcctgcccaacagcaaccacgtggccagtggcgccggggaggcagaggaacgcgttgtggtgatcagcagctcggaagactcagatgccgaaaactcgtcctcccgagagctggatgacagcagcagtgagtccagtgacctccagctggaaggccccagcaccctcagggtcctggacgagaaccttgctgacccccaagcagaagacagacctctggttttctttgacctcaagattgacaatgaaagtgggttctcctggggctacccccacccctttctaatttagtctctgagtcccaaaaagaagtgcaggcagagccatctgccaggcccaggagagctctgagctctggccaacaactgcagccaggctgggcagagcactccggctcacctgggctcctggcgtgtcatttgctggcttgaataaagatgtccgcctta

SEQ ID NO: 72207 - DNA, 2291 bp, Homo sapiens
gctctccagaggcgggccctgagccggcacctcccctttcggacagctcaagggactcagccaactggctcacgcctccccttcagcttctcttcacgcactccaagatctaaaccgagaatcgaaactaagctggggtccatggagcctgcacccgcccgatctccgaggccccagcaggaccccgcccggccccaggagcccaccatgcctccccccgagaccccctctgaaggccgccagcccagccccagccccagccctacagagcgagcccccgcttcggaggaggagttccagtttctgcgctgccagcaatgccaggcggaagccaagtgcccgaagctgctgccttgtctgcacacgctgtgctcaggatgcctggaggcgtcgggcatgcagtgccccatctgccaggcgccctggcccctaggtgcagacacacccgccctggataacgtctttttcgagagtctgcagcggcgcctgtcggtgtaccggcagattgtggatgcgcaggctgtgtgcacccgctgcaaagagtcggccgacttctggtgctttgagtgcgagcagctcctctgcgccaagtgcttcgaggcacaccagtggttcctcaagcacgaggcccggcccctagcagagctgcgcaaccagtcggtgcgtgagttcctggacggcacccgcaagaccaacaacatcttctgctccaaccccaaccaccgcacccctacgctgaccagcatctactgccgaggatgttccaagccgctgtgctgctcgtgcgcgctccttgacagcagccacagtgagctcaagtgcgacatcagcgcagagatccagcagcgacaggaggagctggacgccatgacgcaggcgctgcaggagcaggatagtgcctttggcgcggttcacgcgcagatgcacgcggccgtcggccagctgggccgcgcgcgtgccgagaccgaggagctgatccgcgagcgcgtgcgccaggtggtagctcacgtgcgggctcaggagcgcgagctgctggaggctgtggacgcgcggtaccagcgcgactacgaggagatggccagtcggctgggccgcctggatgctgtgctgcagcgcatccgcacgggcagcgcgctggtgcagaggatgaagtgctacgcctcggaccaggaggtgctggacatgcacggtttcctgcgccaggcgctctgccgcctgcgccaggaggagccccagagcctgcaagctgccgtgcgcaccgatggcttcgacgagttcaaggtgcgcctgcaggacctcagctcttgcatcacccaggggaaagatgcagctgtatccaagaaagccagcccagaggctgccagcactcccagggaccctattgacgttgacctgctgcctcctccagcccatgctcttacaggccctgcacagagtagcactcattaattcttggttaaggaatgaatcaacgaatgaatggctatgcatggacctctgggcagggagacctgggtcttctctggctgagaggggaaggctaaggcatggctgagattcaagccaccattccaggcctctttgcccaagaaagaaacttctgtcacccttgcactctcctgtattctgagtccctggccaatagcacagccttccatgccccgacccccaccccaagcctctccactaggcctctgccaggatctaagcccatgagcacagggactggctatcccaagacctggcagatgtggctgctcaataaacacttgttgaaccatcacccttgcgaacccttattccacgaccatcgcgttctccgatggatccagctcctccctgcaggctgttctctcttccctatgctggaactcagttctcctctggggataccatgtcccctcttcctcccacactcatgggcatcagaggtgggaggtagggtcaaggccccctgcttcctggactgttccagccccttcctggccgtctggtaagatcctctgtccctctcagggtgggccccatgctccccagctcatcccagacacccacctgcccaccctcattgagggcagacgtgagcattcacctcccagatttcttctccctgctcaggtcctgccttcctcctgagtgacttctatttccacccacctgcccgccactccttaacctctcaggggttgtcaccccattcccccagacagctgcctgccccgtggccgtgccctgcaccttgccatcaccgagcactgttggtccctcagccggtcctctcagactctgac

SEQ ID NO: 72208 - DNA, 2245 bp, Homo sapiens
gcccatctaggagtggcatcttttttggtgccctgaaggccagctctggaccttcccaggaaaagtgccagctcacagaactgcttgaccaaaggaccggctcttgagacatcccccaacccacctggcccccagctagggtgggggtccaggagactgagattagcctgccctctttggacagcagctccaggacagggcgggtgggctgaccacccaaaccccatctgggcccaggccccatgccccgaggaggggtggtctgaagcccaccagagccccctgccagactgtctgcctcccttctgactgtggccgcttggcatggccagcaacagcagctcctgcccgacacctgggggcgggcacctcaatgggtacccggtgcctccctacgccttcttcttcccccctatgctgggtggactctccccgccaggcgctctgaccactctccagcaccagcttccagttagtggatatagcacaccatccccagccaatgcagctgtatccaagaaagccagcccagaggctgccagcactcccagggaccctattgacgttgacctggatgtctccaatacaacgacagcccagaagaggaagtgcagccagacccagtgccccaggaaggtcatcaagatggagtctgaggaggggaaggaggcaaggttggctcggagctccccggagcagcccaggcccagcacctccaaggcagtctcaccaccccacctggatggaccgcctagccccaggagccccgtcataggaagtgaggtcttcctgcccaacagcaaccacgtggccagtggcgccggggaggcagaggaacgcgttgtggtgatcagcagctcggaagactcagatgccgaaaactcgtgcatggagcccatggagaccgccgagccacagtcctcgccagcccactcctcgccagcccactcctcgccagcccactcctcgccagtccagtctctgctgagagcacaaggagcctccagcctgccctgtggcacataccaccccccagcttggcctccccaccagcccgctgagcaggctgccacccccgatgctgagcctcacagcgagcctcctgatcaccaggagcgccctgccgtccaccgtgggatccgctacctgttgtacagagcacagagagccatccgccttcgccatgccctccgcttgcaccctcaattgcatcgggcccctattcggacttggtctccccatgtggtccaagccagcactcctgccatcacagggcccctcaaccatcctgccaatgcccaggaacatcctgcccagctgcaaaggggcatcagcccaccccaccggatacgaggggctgtgcgatcccgcagccgctccctccggggctcctcccatttatcccagtggctcaacaacttttttgccctccccttctcctccatggcttcccagcttgacatgtcttccgtggtgggggcaggggaaggcagagcccagactcttggagcagttgttccccctggggactctgtcagaggctccatggaggcctctcaagtccaagtgcctctggaagcctctccaattacattcccaccaccctgtgccccagaaaggccccccatcagcccagtcccaggcgcccgtcaagcaggcctctgagagtgctacccttctcttgtaaccttgcagccaacacccctgcccggcccctgagctgcctcctccagcccatgctcttacaggccctgcacagagtagcactcattaattcttggttaaggaatgaatcaacgaatgaatggctatgcatggacctctgggcagggagacctgggtcttctctggctgagaggggaaggctaaggcatggctgagattcaagccaccattccaggcctctttgcccaagaaagaaacttctgtcacccttgcactctcctgtattctgagtccctggccaatagcacagccttccatgccccgacccccaccccaagcctctccactaggcctctgccaggatctaagcccatgagcacagggactggctatcccaagacctggcagatgtggctgctccaaaggaagatcctcaaatgtagagtatattttttctctttctaccatgacaggaagcaagaaagaagaaaaagcattctaaacaaaatggttttgtaaataagaaaccagagggaggagctgattttcagtgggacagagttccatctttaacaggttc

SEQ ID NO: 72209 - DNA, 324 bp, Homo sapiens
ctctgtgactccctctatgcaggatgtctccaatacaacgacagcccagaagaggaagtgcagccagacccagtgccccaggaaggtcatcaagatggagtctgaggaggggaaggaggcaaggttggctcggagctccccggagcagcccaggcccagcacctcctggtccgaggcgtagcacttcatcctctgcaccagcgcgctgcccgtgcggatgcgctgcagcacagcatccaggcggaccagccgactggccatctcctcgtagtcgcgctggtaccgcgcgctcacagcctccagcatctccgctttggaaggggt

SEQ ID NO: 72210 - DNA, 3622 bp, Homo sapiens
gctctccagaggcgggccctgagccggcacctcccctttcggacagctcaagggactcagccaactggctcacgcctccccttcagcttctcttcacgcactccaagatctaaaccgagaatcgaaactaagctggggtccatggagcctgcacccgcccgatctccgaggccccagcaggaccccgcccggccccaggagcccaccatgcctccccccgagaccccctctgaaggccgccagcccagccccagccccagccctacagagcgagcccccgcttcggaggaggagttccagtttctgcgctgccagcaatgccaggcggaagccaagtgcccgaagctgctgccttgtctgcacacgctgtgctcaggatgcctggaggcgtcgggcatgcagtgccccatctgccaggcgccctggcccctaggtgcagacacacccgccctggataacgtctttttcgagagtctgcagcggcgcctgtcggtgtaccggcagattgtggatgcgcaggctgtgtgcacccgctgcaaagagtcggccgacttctggtgctttgagtgcgagcagctcctctgcgccaagtgcttcgaggcacaccagtggttcctcaagcacgaggcccggcccctagcagagctgcgcaaccagtcggtgcgtgagttcctggacggcacccgcaagaccaacaacatcttctgctccaaccccaaccaccgcacccctacgctgaccagcatctactgccgaggatgttccaagccgctgtgctgctcgtgcgcgctccttgacagcagccacagtgagctcaagtgcgacatcagcgcagagatccagcagcgacaggaggagctggacgccatgacgcaggcgctgcaggagcaggatagtgcctttggcgcggttcacgcgcagatgcacgcggccgtcggccagctgggccgcgcgcgtgccgagaccgaggagctgatccgcgagcgcgtgcgccaggtggtagctcacgtgcgggctcaggagcgcgagctgctggaggctgtggacgcgcggtaccagcgcgactacgaggagatggccagtcggctgggccgcctggatgctgtgctgcagcgcatccgcacgggcagcgcgctggtgcagaggatgaagtgctacgcctcggaccaggaggtgctggacatgcacggtttcctgcgccaggcgctctgccgcctgcgccaggaggagccccagagcctgcaagctgccgtgcgcaccgatggcttcgacgagttcaaggtgcgcctgcaggacctcagctcttgcatcacccaggggaaagatgcagctgtatccaagaaagccagcccagaggctgccagcactcccagggaccctattgacgttgacctgcccgaggaggcagagagagtgaaggcccaggttcaggccctggggctggctgaagcccagcctatggctgtggtacagtcagtgcccggggcacaccccgtgccagtgtacgccttctccatcaaaggcccttcctatggagaggatgtctccaatacaacgacagcccagaagaggaagtgcagccagacccagtgccccaggaaggtcatcaagatggagtctgaggaggggaaggaggcaaggttggctcggagctccccggagcagcccaggcccagcacctccaaggcagtctcaccaccccacctggatggaccgcctagccccaggagccccgtcataggaagtgaggtcttcctgcccaacagcaaccacgtggccagtggcgccggggaggcagaggaacgcgttgtggtgatcagcagctcggaagactcagatgccgaaaactcggtctcttccagccctcagtctgaggttctgtattggaaagtgcatggagcccatggagaccgccgagccacagtcctcgccagcccactcctcgccagcccactcctcgccagcccactcctcgccagtccagtctctgctgagagcacaaggagcctccagcctgccctgtggcacataccaccccccagcttggcctccccaccagcccgctgagcaggctgccacccccgatgctgagcctcacagcgagcctcctgatcaccaggagcgccctgccgtccaccgtgggatccgctacctgttgtacagagcacagagagccatccgccttcgccatgccctccgcttgcaccctcaattgcatcgggcccctattcggacttggtctccccatgtggtccaagccagcactcctgccatcacagggcccctcaaccatcctgccaatgcccaggaacatcctgcccagctgcaaaggggcatcagcccaccccaccggatacgaggggctgtgcgatcccgcagccgctccctccggggctcctcccatttatcccagtggctcaacaacttttttgccctccccttctcctccatggcttcccagcttgacatgtcttccgtggtgggggcaggggaaggcagagcccagactcttggagcagttgttccccctggggactctgtcagaggctccatggaggcctctcaagtccaagtgcctctggaagcctctccaattacattcccaccaccctgtgccccagaaaggccccccatcagcccagtcccaggcgcccgtcaagcaggcctctgagagtgctacccttctcttgtaaccttgcagccaacacccctgcccggcccctgagctgcctcctccagcccatgctcttacaggccctgcacagagtagcactcattaattcttggttaaggaatgaatcaacgaatgaatggctatgcatggacctctgggcagggagacctgggtcttctctggctgagaggggaaggctaaggcatggctgagattcaagccaccattccaggcctctttgcccaagaaagaaacttctgtcacccttgcactctcctgtattctgagtccctggccaatagcacagccttccatgccccgacccccaccccaagcctctccactaggcctctgccaggatctaagcccatgagcacagggactggctatcccaagacctggcagatgtggctgctcaataaacacttgttgaaccatcacccttgcgaacccttattccacgaccatcgcgttctccgatggatccagctcctccctgcaggctgttctctcttccctatgctggaactcagttctcctctggggataccatgtcccctcttcctcccacactcatgggcatcagaggtgggaggtagggtcaaggccccctgcttcctggactgttccagccccttcctggccgtctggtaagatcctctgtccctctcagggtgggccccatgctccccagctcatcccagacacccacctgcccaccctcattgagggcagacgtgagcattcacctcccagatttcttctccctgctcaggtcctgccttcctcctgagtgacttctatttccacccacctgcccgccactccttaacctctcaggggttgtcaccccattcccccagacagctgcctgccccgtggccgtgccctgcaccttgccatcaccgagcactgttggtccctcagccggtcctctcagactctgac

SEQ ID NO: 72211 - DNA, 3820 bp, Homo sapiens
gctctccagaggcgggccctgagccggcacctcccctttcggacagctcaagggactcagccaactggctcacgcctccccttcagcttctcttcacgcactccaagatctaaaccgagaatcgaaactaagctggggtccatggagcctgcacccgcccgatctccgaggccccagcaggaccccgcccggccccaggagcccaccatgcctccccccgagaccccctctgaaggccgccagcccagccccagccccagccctacagagcgagcccccgcttcggaggaggagttccagtttctgcgctgccagcaatgccaggcggaagccaagtgcccgaagctgctgccttgtctgcacacgctgtgctcaggatgcctggaggcgtcgggcatgcagtgccccatctgccaggcgccctggcccctaggtgcagacacacccgccctggataacgtctttttcgagagtctgcagcggcgcctgtcggtgtaccggcagattgtggatgcgcaggctgtgtgcacccgctgcaaagagtcggccgacttctggtgctttgagtgcgagcagctcctctgcgccaagtgcttcgaggcacaccagtggttcctcaagcacgaggcccggcccctagcagagctgcgcaaccagtcggtgcgtgagttcctggacggcacccgcaagaccaacaacatcttctgctccaaccccaaccaccgcacccctacgctgaccagcatctactgccgaggatgttccaagccgctgtgctgctcgtgcgcgctccttgacagcagccacagtgagctcaagtgcgacatcagcgcagagatccagcagcgacaggaggagctggacgccatgacgcaggcgctgcaggagcaggatagtgcctttggcgcggttcacgcgcagatgcacgcggccgtcggccagctgggccgcgcgcgtgccgagaccgaggagctgatccgcgagcgcgtgcgccaggtggtagctcacgtgcgggctcaggagcgcgagctgctggaggctgtggacgcgcggtaccagcgcgactacgaggagatggccagtcggctgggccgcctggatgctgtgctgcagcgcatccgcacgggcagcgcgctggtgcagaggatgaagtgctacgcctcggaccaggaggtgctggacatgcacggtttcctgcgccaggcgctctgccgcctgcgccaggaggagccccagagcctgcaagctgccgtgcgcaccgatggcttcgacgagttcaaggtgcgcctgcaggacctcagctcttgcatcacccaggggaaagatgcagctgtatccaagaaagccagcccagaggctgccagcactcccagggaccctattgacgttgacctgaggaacgcgttgtggtgatcagcagctcggaagactcagatgccgaaaactcggtgagtggcccagaagttcagcccaggactcctgcctccccccatttcaggtcccagggggcacagccacagcaggtgactctcagacttgccttgcgcctggggaattttccagtgaggcattgagtcccaagctgtgctgaggacagtctccaaatgacagctgcatgcctggaccaccccagccctcccactacaccagggccaggagctcttctgaaatgctgatagcatgtgtccagagccctgtctcttttctggaatgtccaagacctttgtctggagcttccttatgcattttctgtcctctaagtcctcagtgaggagggctggacaagaatccattccttggtttattacagccagtgggggccagtgaaggggtgtcaggccacagggcagctatataggggccaaacaagtgaggtttgactccatccatgtagaaagatatataaatccattccacagtgaaacaggtggcctcgtgggtagtgacccttctgtccctagaggtttattactagaggctggactatcacctgtccaggggaaaaggggatctgaatagagtgaaaggttggactgggtggcccctgaggtctcttccagccctcagtctgaggttctgtattggaaagtgcatggagcccatggagaccgccgagccacagtcctcgccagcccactcctcgccagcccactcctcgccagcccactcctcgccagtccagtctctgctgagagcacaaggagcctccagcctgccctgtggcacataccaccccccagcttggcctccccaccagcccgctgagcaggctgccacccccgatgctgagcctcacagcgagcctcctgatcaccaggagcgccctgccgtccaccgtgggatccgctacctgttgtacagagcacagagagccatccgccttcgccatgccctccgcttgcaccctcaattgcatcgggcccctattcggacttggtctccccatgtggtccaagccagcactcctgccatcacagggcccctcaaccatcctgccaatgcccaggaacatcctgcccagctgcaaaggggcatcagcccaccccaccggatacgaggggctgtgcgatcccgcagccgctccctccggggctcctcccatttatcccagtggctcaacaacttttttgccctccccttctcctccatggcttcccagcttgacatgtcttccgtggtgggggcaggggaaggcagagcccagactcttggagcagttgttccccctggggactctgtcagaggctccatggaggcctctcaagtccaagtgcctctggaagcctctccaattacattcccaccaccctgtgccccagaaaggccccccatcagcccagtcccaggcgcccgtcaagcaggcctctgagagtgctacccttctcttgtaaccttgcagccaacacccctgcccggcccctgagctgcctcctccagcccatgctcttacaggccctgcacagagtagcactcattaattcttggttaaggaatgaatcaacgaatgaatggctatgcatggacctctgggcagggagacctgggtcttctctggctgagaggggaaggctaaggcatggctgagattcaagccaccattccaggcctctttgcccaagaaagaaacttctgtcacccttgcactctcctgtattctgagtccctggccaatagcacagccttccatgccccgacccccaccccaagcctctccactaggcctctgccaggatctaagcccatgagcacagggactggctatcccaagacctggcagatgtggctgctcaataaacacttgttgaaccatcacccttgcgaacccttattccacgaccatcgcgttctccgatggatccagctcctccctgcaggctgttctctcttccctatgctggaactcagttctcctctggggataccatgtcccctcttcctcccacactcatgggcatcagaggtgggaggtagggtcaaggccccctgcttcctggactgttccagccccttcctggccgtctggtaagatcctctgtccctctcagggtgggccccatgctccccagctcatcccagacacccacctgcccaccctcattgagggcagacgtgagcattcacctcccagatttcttctccctgctcaggtcctgccttcctcctgagtgacttctatttccacccacctgcccgccactccttaacctctcaggggttgtcaccccattcccccagacagctgcctgccccgtggccgtgccctgcaccttgccatcaccgagcactgttggtccctcagccggtcctctcagactctgac

SEQ ID NO: 72212 - DNA, 3092 bp, Homo sapiens
tgacttcagaggatcccccgcgtggatcttgtgctggatcttgtgctggacatgcacggtttcctgcgccaggcgctctgccgcctgcgccaggaggagccccagagcctgcaagctgccgtgcgcaccgatggcttcgacgagttcaaggtgcgcctgcaggacctcagctcttgcatcacccaggggaaagatgcagctgtatccaagaaagccagcccagaggctgccagcactcccagggaccctattgacgttgacctgcccgaggaggcagagagagtgaaggcccaggttcaggccctggggctggctgaagcccagcctatggctgtggtacagtcagtgcccggggcacaccccgtgccagtgtacgccttctccatcaaaggcccttcctatggagaggatgtctccaatacaacgacagcccagaagaggaagtgcagccagacccagtgccccaggaaggtcatcaagatggagtctgaggaggggaaggaggcaaggttggctcggagctccccggagcagcccaggcccagcacctccaaggcagtctcaccaccccacctggatggaccgcctagccccaggagccccgtcataggaagtgaggtcttcctgcccaacagcaaccacgtggccagtggcgccggggaggcagaggaacgcgttgtggtgatcagcagctcggaagactcagatgccgaaaactcggtgagtggcccagaagttcagcccaggactcctgcctccccccatttcaggtcccagggggcacagccacagcaggtgactctcagacttgccttgcgcctggggaattttccagtgaggcattgagtcccaagctgtgctgaggacagtctccaaatgacagctgcatgcctggaccaccccagccctcccactacaccagggccaggagctcttctgaaatgctgatagcatgtgtccagagccctgtctcttttctggaatgtccaagacctttgtctggagcttccttatgcattttctgtcctctaagtcctcagtgaggagggctggacaagaatccattccttggtttattacagccagtgggggccagtgaaggggtgtcaggccacagggcagctatataggggccaaacaagtgaggtttgactccatccatgtagaaagatatataaatccattccacagtgaaacaggtggcctcgtgggtagtgacccttctgtccctagaggtttattactagaggctggactatcacctgtccaggggaaaaggggatctgaatagagtgaaaggttggactgggtggcccctgaggtctcttccagccctcagtctgaggttctgtattggaaagtgcatggagcccatggagaccgccgagccacagtcctcgccagcccactcctcgccagcccactcctcgccagcccactcctcgccagtccagtctctgctgagagcacaaggagcctccagcctgccctgtggcacataccaccccccagcttggcctccccaccagcccgctgagcaggctgccacccccgatgctgagcctcacagcgagcctcctgatcaccaggagcgccctgccgtccaccgtgggatccgctacctgttgtacagagcacagagagccatccgccttcgccatgccctccgcttgcaccctcaattgcatcgggcccctattcggacttggtctccccatgtggtccaagccagcactcctgccatcacagggcccctcaaccatcctgccaatgcccaggaacatcctgcccagctgcaaaggggcatcagcccaccccaccggatacgaggggctgtgcgatcccgcagccgctccctccggggctcctcccatttatcccagtggctcaacaacttttttgccctccccttctcctccatggcttcccagcttgacatgtcttccgtggtgggggcaggggaaggcagagcccagactcttggagcagttgttccccctggggactctgtcagaggctccatggaggcctctcaagtccaagtgcctctggaagcctctccaattacattcccaccaccctgtgccccagaaaggccccccatcagcccagtcccaggcgcccgtcaagcaggcctctgagagtgctacccttctcttgtaaccttgcagccaacacccctgcccggcccctgagctgcctcctccagcccatgctcttacaggccctgcacagagtagcactcattaattcttggttaaggaatgaatcaacgaatgaatggctatgcatggacctctgggcagggagacctgggtcttctctggctgagaggggaaggctaaggcatggctgagattcaagccaccattccaggcctctttgcccaagaaagaaacttctgtcacccttgcactctcctgtattctgagtccctggccaatagcacagccttccatgccccgacccccaccccaagcctctccactaggcctctgccaggatctaagcccatgagcacagggactggctatcccaagacctggcagatgtggctgctcaataaacacttgttgaaccatcacccttgcgaacccttattccacgaccatcgcgttctccgatggatccagctcctccctgcaggctgttctctcttccctatgctggaactcagttctcctctggggataccatgtcccctcttcctcccacactcatgggcatcagaggtgggaggtagggtcaaggccccctgcttcctggactgttccagccccttcctggccgtctggtaagatcctctgtccctctcagggtgggccccatgctccccagctcatcccagacacccacctgcccaccctcattgagggcagacgtgagcattcacctcccagatttcttctccctgctcaggtcctgccttcctcctgagtgacttctatttccacccacctgcccgccactccttaacctctcaggggttgtcaccccattcccccagacagctgcctgccccgtggccgtgccctgcaccttgccatcaccgagcactgttggtccctcagccggtcctctcagactctgac

SEQ ID NO: 72213 - DNA, 2792 bp, Homo sapiens
ttcagctggtctgcgctcccctgacgtgggctggggcacgtcaccgccgaatggcagcctccagaaagccaccgcgagtaagtcctcccgagagctggatgacagcagcagtgagtccagtgacctccagctggaaggccccagcaccctcagggtcctggacgagaaccttgctgacccccaagcagaagacagacctctggttttctttgacctcaagattgacaatgaaacccagaagattagccagctggctgcggtgaaccgggaaagcaagttccgcgtggtcatccagcctgaagccctcttcagcatctactccaaggccgtgtccctggaggtggggctgcagcacttcctcagctttctgagctccatgcgccgccctatcttggcctgctacaagctgtgggggcctggcctcccaaacttcttccgggccctggaggacattaacaggctgtgggaattccaggaggccatctcgggcttcctggctgccctgcctctcatccgggagcgtgtgcccggggccagcagcttcaaactcaagaacctggcccagacctacctggcgagaaacatgagcgagcgcagcgccatggctgccgtgctggccatgcgtgacctgtgccgcctcctcgaggtctccccgggcccccagctggcccagcatgtctaccccttcagtagcctgcagtgctttgcctccctgcagcccctggtgcaggcagctgtgctgccccgggctgaggcccgcctcctggccctacacaacgtgagcttcatggagctgctgagtgcacaccgccgtgaccggcaggggggcctgaagaagtacagccgctatctaagcctgcagaccaccacgttgccccctgcccagcctgctttcaacctgcaggctctgggcacctactttgaaggcctgttggagggtccggcgctggcacgggcagaaggagtctccaccccacttgctggccgtggcttggcagagagggcctcccagcagagctgagaggagggggtgaccagcttggagtctctggtgggcagagagggatggggtccctgagccaggccccacccatcacagcattcccaggtcctggtacccagccctcagttgtcatttggttcagaatcagttccctttctctgggaccaaatttcccttctctaaacatcctacagagaaggttccaaagctgagcacccatcaccctaggtgtgcaccagactcctattagcccctccttccaggagctagaaccagggaggtcctgagtgaggaaggcatgacctctgggctctctaggtggccctggtcttgccccatccatcccacctgccactaccttgggtgtccttacagctctgccctgaccccagcccctgcccctggacacctgctgacagctcccacacagaacagtctgaggtgatgctggctacagccctggcagcccatggcaactcaaagtgccttccaaaccaaactgcccctcatgaggttagggtcccccaccctccacctgcccagaggccaactctgttcccttctcctttcatcccagaggggcctcatcagcaaagacagaaactgatgttccatgcatgtccctgcttccaaagcctgaccttccaaagcttgcttccttcctcctggctgcacagacacctctgcttggccacagctttgctctttggtcctcaggccaccagacccctcacagcatggcccttggctcttcctgcactgccctcaccctcagccgtcccaaggagtgcccagcactactcagcatgtagtccaggacctgcggcatcagcatcccctgggagcttcttagaaatgcagacctgtgggctctaccacaggcctctggaatcagaatcttcagggtggggcccagcagtctgtgttttaacaggttctcccggtgatgctggtgcatgctcaagtttgagaaccgctgctctcatagactgctcctccaaggggaagcagtgtggaacagcagagaaagtcccgtccctatctctgactgtgcagtgagtgtggcctaggaacaggtcccttcctaagctctagtgtccccatctgtaaaatgggctgattggcctccacggtcagagcggccatctggctgtgccatcctgcatttttaggaatggaaagcaggcctctgaggcagtggacaggaagacttctcatccttgaattctagctcccattccaaactgttagtccccaaccttgtggtcacatcagaggtcaacagcagaacagaggcaggtcagggttgtccgctctgattagcagaacgacagccccttcctcctcctccctccttcccatccctactcattagctccctgctcctgggatgcttcccaagcagcccaggcctctagcctccatggctgatgacctcagctttcacactggtgaagtctgtgtacccatactgcagccccatcccatggggcccctgaagacccactgaggaattccgtagggtcttgttcccacgaccggagtgctggctctcacagtgaattttgatgcatttaaaataagattctgatgccagactgttaaaataggcgctggttctgaagcaccgatggaaacagattgatgcagatggaaggaggaagggagactgggcccactgatttccagccccaccatgtgtgctgttttcagatgtgattgaggggtgttctgccctgcctccactgtcacagcctttaataaagatgtgaatcttgaaaaaaaaaaa

SEQ ID NO: 72214 - DNA, 3011 bp, Homo sapiens
ctcttggccttgctctgagtggagtgctttctatgtcccagggctctgactgggctggggtccttgaggggattggaggaaggagcatgggatggagagctaagttcaagcagcctgggatctctagtataggtggctgaggctgatagaagacaggagggacctgtatccatggggtttggccaactctggggccggtagtggaggaggggagagctggatccccagctggtgaacaaagtgtttggagggcagccgagcctccccttctgactgctatcccaccacaaccaggatcagagctgcatttgggggctgatgtgtggctactgccagcagaccccaaggtgaggtctctagatggtgagtcagcagccctagaggaccccctgctcccaccccagagctctctgtgaccctgggtcctcaccctgcccttctctcctgcccagcccagaagattagccagctggctgcggtgaaccgggaaagcaagttccgcgtggtcatccagcctgaagccctcttcagcatctactccaaggccgtgtccctggaggtggggctgcagcacttcctcagctttctgagctccatgcgccgccctatcttggcctgctacaagctgtgggggcctggcctcccaaacttcttccgggccctggaggacattaacaggctgtgggaattccaggaggccatctcgggcttcctggctgccctgcctctcatccgggagcgtgtgcccggggccagcagcttcaaactcaagaacctggcccagacctacctggcgagaaacatgagcgagcgcagcgccatggctgccgtgctggccatgcgtgacctgtgccgcctcctcgaggtctccccgggcccccagctggcccagcatgtctaccccttcagtagcctgcagtgctttgcctccctgcagcccctggtgcaggcagctgtgctgccccgggctgaggcccgcctcctggccctacacaacgtgagcttcatggagctgctgagtgcacaccgccgtgaccggcaggggggcctgaagaagtacagccgctatctaagcctgcagaccaccacgttgccccctgcccagcctgctttcaacctgcaggctctgggcacctactttgaaggcctgttggagggtccggcgctggcacgggcagaaggagtctccaccccacttgctggccgtggcttggcagagagggcctcccagcagagctgagaggagggggtgaccagcttggagtctctggtgggcagagagggatggggtccctgagccaggccccacccatcacagcattcccaggtcctggtacccagccctcagttgtcatttggttcagaatcagttccctttctctgggaccaaatttcccttctctaaacatcctacagagaaggttccaaagctgagcacccatcaccctaggtgtgcaccagactcctattagcccctccttccaggagctagaaccagggaggtcctgagtgaggaaggcatgacctctgggctctctaggtggccctggtcttgccccatccatcccacctgccactaccttgggtgtccttacagctctgccctgaccccagcccctgcccctggacacctgctgacagctcccacacagaacagtctgaggtgatgctggctacagccctggcagcccatggcaactcaaagtgccttccaaaccaaactgcccctcatgaggttagggtcccccaccctccacctgcccagaggccaactctgttcccttctcctttcatcccagaggggcctcatcagcaaagacagaaactgatgttccatgcatgtccctgcttccaaagcctgaccttccaaagcttgcttccttcctcctggctgcacagacacctctgcttggccacagctttgctctttggtcctcaggccaccagacccctcacagcatggcccttggctcttcctgcactgccctcaccctcagccgtcccaaggagtgcccagcactactcagcatgtagtccaggacctgcggcatcagcatcccctgggagcttcttagaaatgcagacctgtgggctctaccacaggcctctggaatcagaatcttcagggtggggcccagcagtctgtgttttaacaggttctcccggtgatgctggtgcatgctcaagtttgagaaccgctgctctcatagactgctcctccaaggggaagcagtgtggaacagcagagaaagtcccgtccctatctctgactgtgcagtgagtgtggcctaggaacaggtcccttcctaagctctagtgtccccatctgtaaaatgggctgattggcctccacggtcagagcggccatctggctgtgccatcctgcatttttaggaatggaaagcaggcctctgaggcagtggacaggaagacttctcatccttgaattctagctcccattccaaactgttagtccccaaccttgtggtcacatcagaggtcaacagcagaacagaggcaggtcagggttgtccgctctgattagcagaacgacagccccttcctcctcctccctccttcccatccctactcattagctccctgctcctgggatgcttcccaagcagcccaggcctctagcctccatggctgatgacctcagctttcacactggtgaagtctgtgtacccatactgcagccccatcccatggggcccctgaagacccactgaggaattccgtagggtcttgttcccacgaccggagtgctggctctcacagtgaattttgatgcatttaaaataagattctgatgccagactgttaaaataggcgctggttctgaagcaccgatggaaacagattgatgcagatggaaggaggaagggagactgggcccactgatttccagccccaccatgtgtgctgttttcagatgtgattgaggggtgttctgccctgcctccactgtcacagcctttaataaagatgtgaatcttgaaaaaaaaaaa

SEQ ID NO: 72215 - DNA, 2011 bp, Homo sapiens
tgatgctgatgtgatctagaggatcccgaggctctctcgtgtgggggcctgaagaagtacagccgctatctaagcctgcagaccaccacgttgccccctgcccagcctgctttcaacctgcaggctctgggcacctactttgaaggcctgttggagggtccggcgctggcacgggcagaaggagtctccaccccacttgctggccgtggcttggcagagagggcctcccagcagagctgagaggagggggtgaccagcttggagtctctggtgggcagagagggatggggtccctgagccaggccccacccatcacagcattcccaggtcctggtacccagccctcagttgtcatttggttcagaatcagttccctttctctgggaccaaatttcccttctctaaacatcctacagagaaggttccaaagctgagcacccatcaccctaggtgtgcaccagactcctattagcccctccttccaggagctagaaccagggaggtcctgagtgaggaaggcatgacctctgggctctctaggtggccctggtcttgccccatccatcccacctgccactaccttgggtgtccttacagctctgccctgaccccagcccctgcccctggacacctgctgacagctcccacacagaacagtctgaggtgatgctggctacagccctggcagcccatggcaactcaaagtgccttccaaaccaaactgcccctcatgaggttagggtcccccaccctccacctgcccagaggccaactctgttcccttctcctttcatcccagaggggcctcatcagcaaagacagaaactgatgttccatgcatgtccctgcttccaaagcctgaccttccaaagcttgcttccttcctcctggctgcacagacacctctgcttggccacagctttgctctttggtcctcaggccaccagacccctcacagcatggcccttggctcttcctgcactgccctcaccctcagccgtcccaaggagtgcccagcactactcagcatgtagtccaggacctgcggcatcagcatcccctgggagcttcttagaaatgcagacctgtgggctctaccacaggcctctggaatcagaatcttcagggtggggcccagcagtctgtgttttaacaggttctcccggtgatgctggtgcatgctcaagtttgagaaccgctgctctcatagactgctcctccaaggggaagcagtgtggaacagcagagaaagtcccgtccctatctctgactgtgcagtgagtgtggcctaggaacaggtcccttcctaagctctagtgtccccatctgtaaaatgggctgattggcctccacggtcagagcggccatctggctgtgccatcctgcatttttaggaatggaaagcaggcctctgaggcagtggacaggaagacttctcatccttgaattctagctcccattccaaactgttagtccccaaccttgtggtcacatcagaggtcaacagcagaacagaggcaggtcagggttgtccgctctgattagcagaacgacagccccttcctcctcctccctccttcccatccctactcattagctccctgctcctgggatgcttcccaagcagcccaggcctctagcctccatggctgatgacctcagctttcacactggtgaagtctgtgtacccatactgcagccccatcccatggggcccctgaagacccactgaggaattccgtagggtcttgttcccacgaccggagtgctggctctcacagtgaattttgatgcatttaaaataagattctgatgccagactgttaaaataggcgctggttctgaagcaccgatggaaacagattgatgcagatggaaggaggaagggagactgggcccactgatttccagccccaccatgtgtgctgttttcagatgtgattgaggggtgttctgccctgcctccactgtcacagcctttaataaagatgtgaatcttgaaaaaaaaaaa

SEQ ID NO: 72216 - DNA, 1699 bp, Homo sapiens
gctctccagaggcgggccctgagccggcacctcccctttcggacagctcaagggactcagccaactggctcacgcctccccttcagcttctcttcacgcactccaagatctaaaccgagaatcgaaactaagctggggtccatggagcctgcacccgcccgatctccgaggccccagcaggaccccgcccggccccaggagcccaccatgcctccccccgagaccccctctgaaggccgccagcccagccccagccccagccctacagagcgagcccccgcttcggaggaggagttccagtttctgcgctgccagcaatgccaggcggaagccaagtgcccgaagctgctgccttgtctgcacacgctgtgctcaggatgcctggaggcgtcgggcatgcagtgccccatctgccaggcgccctggcccctaggtgcagacacacccgccctggataacgtctttttcgagagtctgcagcggcgcctgtcggtgtaccggcagattgtggatgcgcaggctgtgtgcacccgctgcaaagagtcggccgacttctggtgctttgagtgcgagcagctcctctgcgccaagtgcttcgaggcacaccagtggttcctcaagcacgaggcccggcccctagcagagctgcgcaaccagtcggtgcgtgagttcctggacggcacccgcaagaccaacaacatcttctgctccaaccccaaccaccgcacccctacgctgaccagcatctactgccgaggatgttccaagccgctgtgctgctcgtgcgcgctccttgacagcagccacagtgagctcaagtgcgacatcagcgcagagatccagcagcgacaggaggagctggacgccatgacgcaggcgctgcaggagcaggatagtgcctttggcgcggttcacgcgcagatgcacgcggccgtcggccagctgggccgcgcgcgtgccgagaccgaggagctgatccgcgagcgcgtgcgccaggtggtagctcacgtgcgggctcaggagcgcgagctgctggaggctgtggacgcgcggtaccagcgcgactacgaggagatggccagtcggctgggccgcctggatgctgtgctgcagcgcatccgcacgggcagcgcgctggtgcagaggatgaagtgctacgcctcggaccaggaggtgctggacatgcacggtttcctgcgccaggcgctctgccgcctgcgccaggaggagccccagagcctgcaagctgccgtgcgcaccgatggcttcgacgagttcaaggtgcgcctgcaggacctcagctcttgcatcacccaggggaaagatgcagctgtatccaagaaagccagcccagaggctgccagcactcccagggaccctattgacgttgacctgcccgaggaggcagagagagtgaaggcccaggttcaggccctggggctggctgaagcccagcctatggctgtggtacagtcagtgcccggggcacaccccgtgccagtgtacgccttctccatcaaaggcccttcctatggagaggatgtctccaatacaacgacagcccagaagaggaagtgcagccagacccagtgccccaggaaggtcatcaagatggagtctgaggaggggaaggaggcaaggttggctcggagacaagagaacttgaacgttgccattgagacccagagcagcagttctg

SEQ ID NO: 72217 - DNA, 3656 bp, Homo sapiens
gctctccagaggcgggccctgagccggcacctcccctttcggacagctcaagggactcagccaactggctcacgcctccccttcagcttctcttcacgcactccaagatctaaaccgagaatcgaaactaagctggggtccatggagcctgcacccgcccgatctccgaggccccagcaggaccccgcccggccccaggagcccaccatgcctccccccgagaccccctctgaaggccgccagcccagccccagccccagccctacagagcgagcccccgcttcggaggaggagttccagtttctgcgctgccagcaatgccaggcggaagccaagtgcccgaagctgctgccttgtctgcacacgctgtgctcaggatgcctggaggcgtcgggcatgcagtgccccatctgccaggcgccctggcccctaggtgcagacacacccgccctggataacgtctttttcgagagtctgcagcggcgcctgtcggtgtaccggcagattgtggatgcgcaggctgtgtgcacccgctgcaaagagtcggccgacttctggtgctttgagtgcgagcagctcctctgcgccaagtgcttcgaggcacaccagtggttcctcaagcacgaggcccggcccctagcagagctgcgcaaccagtcggtgcgtgagttcctggacggcacccgcaagaccaacaacatcttctgctccaaccccaaccaccgcacccctacgctgaccagcatctactgccgaggatgttccaagccgctgtgctgctcgtgcgcgctccttgacagcagccacagtgagctcaagtgcgacatcagcgcagagatccagcagcgacaggaggagctggacgccatgacgcaggcgctgcaggagcaggatagtgcctttggcgcggttcacgcgcagatgcacgcggccgtcggccagctgggccgcgcgcgtgccgagaccgaggagctgatccgcgagcgcgtgcgccaggtggtagctcacgtgcgggctcaggagcgcgagctgctggaggctgtggacgcgcggtaccagcgcgactacgaggagatggccagtcggctgggccgcctggatgctgtgctgcagcgcatccgcacgggcagcgcgctggtgcagaggatgaagtgctacgcctcggaccaggaggtgctggacatgcacggtttcctgcgccaggcgctctgccgcctgcgccaggaggagccccagagcctgcaagctgccgtgcgcaccgatggcttcgacgagttcaaggtgcgcctgcaggacctcagctcttgcatcacccaggggaaagatgcagctgtatccaagaaagccagcccagaggctgccagcactcccagggaccctattgacgttgacctgcccgaggaggcagagagagtgaaggcccaggttcaggccctggggctggctgaagcccagcctatggctgtggtacagtcagtgcccggggcacaccccgtgccagtgtacgccttctccatcaaaggcccttcctatggagaggatgtctccaatacaacgacagcccagaagaggaagtgcagccagacccagtgccccaggaaggtcatcaagatggagtctgaggaggggaaggaggcaaggttggctcggagctccccggagcagcccaggcccagcacctccaaggcagtctcaccaccccacctggatggaccgcctagccccaggagccccgtcataggaagtgaggtcttcctgcccaacagcaaccacgtggccagtggcgccggggaggcagaggaacgcgttgtggtgatcagcagctcggaagactcagatgccgaaaactcgtgcatggagcccatggagaccgccgagccacatcctcgccagcccactcctcgccagcccactcctcgccagtccagtctctgctgagagcacaaggagcctccagcctgccctgtggcacataccaccccccagcttggcctccccaccagcccgctgagcaggctgccacccccgatgctgagcctcacagcgagcctcctgatcaccaggagcgccctgccgtccaccgtgggatccgctacctgttgtacagagcacagagagccatccgccttcgccatgccctccgcttgcaccctcaattgcatcgggcccctattcggacttggtctccccatgtggtccaagccagcactcctgccatcacagggcccctcaaccatcctgccaatgcccaggaacatcctgcccagctgcaaaggggcatcagcccaccccaccggatacgaggggctgtgcgatcccgcagccgctccctccggggctcctcccatttatcccagtggcaaaggggcatcagcccaccccaccggatacgaggggctgtgcgatcccgcagccgctccctccggggctcctcccatttatcccagtggctcaacaacttttttgccctccccttctcctccatggcttcccagcttgacatgtcttccgtggtgggggcaggggaaggcagagcccagactcttggagcagttgttccccctggggactctgtcagaggctccatggaggcctctcaagtccaagtgcctctggaagcctctccaattacattcccaccaccctgtgccccagaaaggccccccatcagcccagtcccaggcgcccgtcaagcaggcctctgagagtgctacccttctcttgtaaccttgcagccaacacccctgcccggcccctgagctgcctcctccagcccatgctcttacaggccctgcacagagtagcactcattaattcttggttaaggaatgaatcaacgaatgaatggctatgcatggacctctgggcagggagacctgggtcttctctggctgagaggggaaggctaaggcatggctgagattcaagccaccattccaggcctctttgcccaagaaagaaacttctgtcacccttgcactctcctgtattctgagtccctggccaatagcacagccttccatgccccgacccccaccccaagcctctccactaggcctctgccaggatctaagcccatgagcacagggactggctatcccaagacctggcagatgtggctgctcaataaacacttgttgaaccatcacccttgcgaacccttattccacgaccatcgcgttctccgatggatccagctcctccctgcaggctgttctctcttccctatgctggaactcagttctcctctggggataccatgtcccctcttcctcccacactcatgggcatcagaggtgggaggtagggtcaaggccccctgcttcctggactgttccagccccttcctggccgtctggtaagatcctctgtccctctcagggtgggccccatgctccccagctcatcccagacacccacctgcccaccctcattgagggcagacgtgagcattcacctcccagatttcttctccctgctcaggtcctgccttcctcctgagtgacttctatttccacccacctgcccgccactccttaacctctcaggggttgtcaccccattcccccagacagctgcctgccccgtggccgtgccctgcaccttgccatcaccgagcactgttggtccctcagccggtcctctcagactctgac

SEQ ID NO: 72218 - DNA, 4223 bp, Homo sapiens
gctctccagaggcgggccctgagccggcacctcccctttcggacagctcaagggactcagccaactggctcacgcctccccttcagcttctcttcacgcactccaagatctaaaccgagaatcgaaactaagctggggtccatggagcctgcacccgcccgatctccgaggccccagcaggaccccgcccggccccaggagcccaccatgcctccccccgagaccccctctgaaggccgccagcccagccccagccccagccctacagagcgagcccccgcttcggaggaggagttccagtttctgcgctgccagcaatgccaggcggaagccaagtgcccgaagctgctgccttgtctgcacacgctgtgctcaggatgcctggaggcgtcgggcatgcagtgccccatctgccaggcgccctggcccctaggtgcagacacacccgccctggataacgtctttttcgagagtctgcagcggcgcctgtcggtgtaccggcagattgtggatgcgcaggctgtgtgcacccgctgcaaagagtcggccgacttctggtgctttgagtgcgagcagctcctctgcgccaagtgcttcgaggcacaccagtggttcctcaagcacgaggcccggcccctagcagagctgcgcaaccagtcggtgcgtgagttcctggacggcacccgcaagaccaacaacatcttctgctccaaccccaaccaccgcacccctacgctgaccagcatctactgccgaggatgttccaagccgctgtgctgctcgtgcgcgctccttgacagcagccacagtgagctcaagtgcgacatcagcgcagagatccagcagcgacaggaggagctggacgccatgacgcaggcgctgcaggagcaggatagtgcctttggcgcggttcacgcgcagatgcacgcggccgtcggccagctgggccgcgcgcgtgccgagaccgaggagctgatccgcgagcgcgtgcgccaggtggtagctcacgtgcgggctcaggagcgcgagctgctggaggctgtggacgcgcggtaccagcgcgactacgaggagatggccagtcggctgggccgcctggatgctgtgctgcagcgcatccgcacgggcagcgcgctggtgcagaggatgaagtgctacgcctcggaccaggaggtgctggacatgcacggtttcctgcgccaggcgctctgccgcctgcgccaggaggagccccagagcctgcaagctgccgtgcgcaccgatggcttcgacgagttcaaggtgcgcctgcaggacctcagctcttgcatcacccaggggaaagatgcagctgtatccaagaaagccagcccagaggctgccagcactcccagggaccctattgacgttgacctgcccgaggaggcagagagagtgaaggcccaggttcaggccctggggctggctgaagcccagcctatggctgtggtacagtcagtgcccggggcacaccccgtgccagtgtacgccttctccatcaaaggcccttcctatggagaggatgtctccaatacaacgacagcccagaagaggaagtgcagccagacccagtgccccaggaaggtcatcaagatggagtctgaggaggggaaggaggcaaggttggctcggagctccccggagcagcccaggcccagcacctccaaggcagtctcaccaccccacctggatggaccgcctagccccaggagccccgtcataggaagtgaggtcttcctgcccaacagcaaccacgtggccagtggcgccggggaggcagaggaacgcgttgtggtgatcagcagctcggaagactcagatgccgaaaactcggtgagtggcccagaagttcagcccaggactcctgcctccccccatttcaggtcccagggggcacagccacagcaggtgactctcagacttgccttgcgcctggggaattttccagtgaggcattgagtcccaagctgtgctgaggacagtctccaaatgacagctgcatgcctggaccaccccagccctcccactacaccagggccaggagctcttctgaaatgctgatagcatgtgtccagagccctgtctcttttctggaatgtccaagacctttgtctggagcttccttatgcattttctgtcctctaagtcctcagtgaggagggctggacaagaatccattccttggtttattacagccagtgggggccagtgaaggggtgtcaggccacagggcagctatataggggccaaacaagtgaggtttgactccatccatgtagaaagatatataaatccattccacagtgaaacaggtggcctcgtgggtagtgacccttctgtccctagaggtttattactagaggctggactatcacctgtccaggggaaaaggggatctgaatagagtgaaaggttggactgggtggcccctgaggtctcttccagccctcagtctgaggttctgtattggaaagtgcatggagcccatggagaccgccgagccacagtcctcgccagcccactcctcgccagcccactcctcgccagcccactcctcgccagtccagtctctgctgagagcacaaggagcctccagcctgccctgtggcacataccaccccccagcttggcctccccaccagcccgctgagcaggctgccacccccgatgctgagcctcacagcgagcctcctgatcaccaggagcgccctgccgtccaccgtgggatccgctacctgttgtacagagcacagagagccatccgccttcgccatgccctccgcttgcaccctcaattgcatcgggcccctattcggacttggtctccccatgtggtccaagccagcactcctgccatcacagggcccctcaaccatcctgccaatgcccaggaacatcctgcccagctgcaaaggggcatcagcccaccccaccggatacgaggggctgtgcgatcccgcagccgctccctccggggctcctcccatttatcccagtggctcaacaacttttttgccctccccttctcctccatggcttcccagcttgacatgtcttccgtggtgggggcaggggaaggcagagcccagactcttggagcagttgttccccctggggactctgtcagaggctccatggaggcctctcaagtccaagtgcctctggaagcctctccaattacattcccaccaccctgtgccccagaaaggccccccatcagcccagtcccaggcgcccgtcaagcaggcctctgagagtgctacccttctcttgtaaccttgcagccaacacccctgcccggcccctgagctgcctcctccagcccatgctcttacaggccctgcacagagtagcactcattaattcttggttaaggaatgaatcaacgaatgaatggctatgcatggacctctgggcagggagacctgggtcttctctggctgagaggggaaggctaaggcatggctgagattcaagccaccattccaggcctctttgcccaagaaagaaacttctgtcacccttgcactctcctgtattctgagtccctggccaatagcacagccttccatgccccgacccccaccccaagcctctccactaggcctctgccaggatctaagcccatgagcacagggactggctatcccaagacctggcagatgtggctgctcaataaacacttgttgaaccatcacccttgcgaacccttattccacgaccatcgcgttctccgatggatccagctcctccctgcaggctgttctctcttccctatgctggaactcagttctcctctggggataccatgtcccctcttcctcccacactcatgggcatcagaggtgggaggtagggtcaaggccccctgcttcctggactgttccagccccttcctggccgtctggtaagatcctctgtccctctcagggtgggccccatgctccccagctcatcccagacacccacctgcccaccctcattgagggcagacgtgagcattcacctcccagatttcttctccctgctcaggtcctgccttcctcctgagtgacttctatttccacccacctgcccgccactccttaacctctcaggggttgtcaccccattcccccagacagctgcctgccccgtggccgtgccctgcaccttgccatcaccgagcactgttggtccctcagccggtcctctcagactctgac

SEQ ID NO: 72219 - DNA, 3566 bp, Homo sapiens
gctctccagaggcgggccctgagccggcacctcccctttcggacagctcaagggactcagccaactggctcacgcctccccttcagcttctcttcacgcactccaagatctaaaccgagaatcgaaactaagctggggtccatggagcctgcacccgcccgatctccgaggccccagcaggaccccgcccggccccaggagcccaccatgcctccccccgagaccccctctgaaggccgccagcccagccccagccccagccctacagagcgagcccccgcttcggaggaggagttccagtttctgcgctgccagcaatgccaggcggaagccaagtgcccgaagctgctgccttgtctgcacacgctgtgctcaggatgcctggaggcgtcgggcatgcagtgccccatctgccaggcgccctggcccctaggtgcagacacacccgccctggataacgtctttttcgagagtctgcagcggcgcctgtcggtgtaccggcagattgtggatgcgcaggctgtgtgcacccgctgcaaagagtcggccgacttctggtgctttgagtgcgagcagctcctctgcgccaagtgcttcgaggcacaccagtggttcctcaagcacgaggcccggcccctagcagagctgcgcaaccagtcggtgcgtgagttcctggacggcacccgcaagaccaacaacatcttctgctccaaccccaaccaccgcacccctacgctgaccagcatctactgccgaggatgttccaagccgctgtgctgctcgtgcgcgctccttgacagcagccacagtgagctcaagtgcgacatcagcgcagagatccagcagcgacaggaggagctggacgccatgacgcaggcgctgcaggagcaggatagtgcctttggcgcggttcacgcgcagatgcacgcggccgtcggccagctgggccgcgcgcgtgccgagaccgaggagctgatccgcgagcgcgtgcgccaggtggtagctcacgtgcgggctcaggagcgcgagctgctggaggctgtggacgcgcggtaccagcgcgactacgaggagatggccagtcggctgggccgcctggatgctgtgctgcagcgcatccgcacgggcagcgcgctggtgcagaggatgaagtgctacgcctcggaccaggaggtgctggacatgcacggtttcctgcgccaggcgctctgccgcctgcgccaggaggagccccagagcctgcaagctgccgtgcgcaccgatggcttcgacgagttcaaggtgcgcctgcaggacctcagctcttgcatcacccaggggaaagatgcagctgtatccaagaaagccagcccagaggctgccagcactcccagggaccctattgacgttgacctgcccgaggaggcagagagagtgaaggcccaggttcaggccctggggctggctgaagcccagcctatggctgtggtacagtcagtgcccggggcacaccccgtgccagtgtacgccttctccatcaaaggcccttcctatggagaggatgtctccaatacaacgacagcccagaagaggaagtgcagccagacccagtgccccaggaaggtcatcaagatggagtctgaggaggggaaggaggcaaggttggctcggagctccccggagcagcccaggcccagcacctccaaggcagtctcaccaccccacctggatggaccgcctagccccaggagccccgtcataggaagtgaggtcttcctgcccaacagcaaccacgtggccagtggcgccggggaggcagaggaacgcgttgtggtgatcagcagctcggaagactcagatgccgaaaactcgtgcatggagcccatggagaccgccgagccacatcctcgccagcccactcctcgccagcccactcctcgccagtccagtctctgctgagagcacaaggagcctccagcctgccctgtggcacataccaccccccagcttggcctccccaccagcccgctgagcaggctgccacccccgatgctgagcctcacagcgagcctcctgatcaccaggagcgccctgccgtccaccgtgggatccgctacctgttgtacagagcacagagagccatccgccttcgccatgccctccgcttgcaccctcaattgcatcgggcccctattcggacttggtctccccatgtggtccaagccagcactcctgccatcacagggcccctcaaccatcctgccaatgcccaggaacatcctgcccagctgcaaaggggcatcagcccaccccaccggatacgaggggctgtgcgatcccgcagccgctccctccggggctcctcccatttatcccagtggctcaacaacttttttgccctccccttctcctccatggcttcccagcttgacatgtcttccgtggtgggggcaggggaaggcagagcccagactcttggagcagttgttccccctggggactctgtcagaggctccatggaggcctctcaagtccaagtgcctctggaagcctctccaattacattcccaccaccctgtgccccagaaaggccccccatcagcccagtcccaggcgcccgtcaagcaggcctctgagagtgctacccttctcttgtaaccttgcagccaacacccctgcccggcccctgagctgcctcctccagcccatgctcttacaggccctgcacagagtagcactcattaattcttggttaaggaatgaatcaacgaatgaatggctatgcatggacctctgggcagggagacctgggtcttctctggctgagaggggaaggctaaggcatggctgagattcaagccaccattccaggcctctttgcccaagaaagaaacttctgtcacccttgcactctcctgtattctgagtccctggccaatagcacagccttccatgccccgacccccaccccaagcctctccactaggcctctgccaggatctaagcccatgagcacagggactggctatcccaagacctggcagatgtggctgctcaataaacacttgttgaaccatcacccttgcgaacccttattccacgaccatcgcgttctccgatggatccagctcctccctgcaggctgttctctcttccctatgctggaactcagttctcctctggggataccatgtcccctcttcctcccacactcatgggcatcagaggtgggaggtagggtcaaggccccctgcttcctggactgttccagccccttcctggccgtctggtaagatcctctgtccctctcagggtgggccccatgctccccagctcatcccagacacccacctgcccaccctcattgagggcagacgtgagcattcacctcccagatttcttctccctgctcaggtcctgccttcctcctgagtgacttctatttccacccacctgcccgccactccttaacctctcaggggttgtcaccccattcccccagacagctgcctgccccgtggccgtgccctgcaccttgccatcaccgagcactgttggtccctcagccggtcctctcagactctgac

SEQ ID NO: 72220 - DNA, 2201 bp, Homo sapiens
gctctccagaggcgggccctgagccggcacctcccctttcggacagctcaagggactcagccaactggctcacgcctccccttcagcttctcttcacgcactccaagatctaaaccgagaatcgaaactaagctggggtccatggagcctgcacccgcccgatctccgaggccccagcaggaccccgcccggccccaggagcccaccatgcctccccccgagaccccctctgaaggccgccagcccagccccagccccagccctacagagcgagcccccgcttcggaggaggagttccagtttctgcgctgccagcaatgccaggcggaagccaagtgcccgaagctgctgccttgtctgcacacgctgtgctcaggatgcctggaggcgtcgggcatgcagtgccccatctgccaggcgccctggcccctaggtgcagacacacccgccctggataacgtctttttcgagagtctgcagcggcgcctgtcggtgtaccggcagattgtggatgcgcaggctgtgtgcacccgctgcaaagagtcggccgacttctggtgctttgagtgcgagcagctcctctgcgccaagtgcttcgaggcacaccagtggttcctcaagcacgaggcccggcccctagcagagctgcgcaaccagtcggtgcgtgagttcctggacggcacccgcaagaccaacaacatcttctgctccaaccccaaccaccgcacccctacgctgaccagcatctactgccgaggatgttccaagccgctgtgctgctcgtgcgcgctccttgacagcagccacagtgagctcaagtgcgacatcagcgcagagatccagcagcgacaggaggagctggacgccatgacgcaggcgctgcaggagcaggatagtgcctttggcgcggttcacgcgcagatgcacgcggccgtcggccagctgggccgcgcgcgtgccgagaccgaggagctgatccgcgagcgcgtgcgccaggtggtagctcacgtgcgggctcaggagcgcgagctgctggaggctgtggacgcgcggtaccagcgcgactacgaggagatggccagtcggctgggccgcctggatgctgtgctgcagcgcatccgcacgggcagcgcgctggtgcagaggatgaagtgctacgcctcggaccaggaggtgctggacatgcacggtttcctgcgccaggcgctctgccgcctgcgccaggaggagccccagagcctgcaagctgccgtgcgcaccgatggcttcgacgagttcaaggtgcgcctgcaggacctcagctcttgcatcacccaggggaaagatgcagctgtatccaagaaagccagcccagaggctgccagcactcccagggaccctattgacgttgacctgcccgaggaggcagagagagtgaaggcccaggttcaggccctggggctggctgaagcccagcctatggctgtggtacagtcagtgcccggggcacaccccgtgccagtgtacgccttctccatcaaaggcccttcctatggagaggatgtctccaatacaacgacagcccagaagaggaagtgcagccagacccagtgccccaggaaggtcatcaagatggagtctgaggaggggaaggaggcaaggttggctcggagctccccggagcagcccaggcccagcacctccaaggcagtctcaccaccccacctggatggaccgcctagccccaggagccccgtcataggaagtgaggtcttcctgcccaacagcaaccacgtggccagtggcgccggggaggcagaggaacgcgttgtggtgatcagcagctcggaagactcagatgccgaaaactcgtcctcccgagagctggatgacagcagcagtgagtccagtgacctccagctggaaggccccagcaccctcagggtcctggacgagaaccttgctgacccccaagcagaagacagacctctggttttctttgacctcaagattgacaatgaaagtgggttctcctggggctacccccacccctttctaatttagtctctgagtcccaaaaagaagtgcaggcagagccatctgccaggcccaggagagctctgagctctggccaacaactgcagccaggctgggcagagcactccggctcacctgggctcctggcgtgtcatttgctggcttgaataaagatgtccgcctta

SEQ ID NO: 72221 - DNA, 3663 bp, Homo sapiens
aattaggctaggtaagagggccgggttggtttaatcggccgaggcttagcttctcttcacgcactccaagatctaaaccgagaatcgaaactaagctggggtccatggagcctgcacccgcccgatctccgaggccccagcaggaccccgcccggccccaggagcccaccatgcctccccccgagaccccctctgaaggccgccagcccagccccagccccagccctacagagcgagcccccgcttcggaggaggagttccagtttctgcgctgccagcaatgccaggcggaagccaagtgcccgaagctgctgccttgtctgcacacgctgtgctcaggatgcctggaggcgtcgggcatgcagtgccccatctgccaggcgccctggcccctaggtgcagacacacccgccctggataacgtctttttcgagagtctgcagcggcgcctgtcggtgtaccggcagattgtggatgcgcaggctgtgtgcacccgctgcaaagagtcggccgacttctggtgctttgagtgcgagcagctcctctgcgccaagtgcttcgaggcacaccagtggttcctcaagcacgaggcccggcccctagcagagctgcgcaaccagtcggtgcgtgagttcctggacggcacccgcaagaccaacaacatcttctgctccaaccccaaccaccgcacccctacgctgaccagcatctactgccgaggatgttccaagccgctgtgctgctcgtgcgcgctccttgacagcagccacagtgagctcaagtgcgacatcagcgcagagatccagcagcgacaggaggagctggacgccatgacgcaggcgctgcaggagcaggatagtgcctttggcgcggttcacgcgcagatgcacgcggccgtcggccagctgggccgcgcgcgtgccgagaccgaggagctgatccgcgagcgcgtgcgccaggtggtagctcacgtgcgggctcaggagcgcgagctgctggaggctgtggacgcgcggtaccagcgcgactacgaggagatggccagtcggctgggccgcctggatgctgtgctgcagcgcatccgcacgggcagcgcgctggtgcagaggatgaagtgctacgcctcggaccaggaggtgctggacatgcacggtttcctgcgccaggcgctctgccgcctgcgccaggaggagccccagagcctgcaagctgccgtgcgcaccgatggcttcgacgagttcaaggtgcgcctgcaggacctcagctcttgcatcacccaggggaaagatgcagctgtatccaagaaagccagcccagaggctgccagcactcccagggaccctattgacgttgacctgcccgaggaggcagagagagtgaaggcccaggttcaggccctggggctggctgaagcccagcctatggctgtggtacagtcagtgcccggggcacaccccgtgccagtgtacgccttctccatcaaaggcccttcctatggagaggatgtctccaatacaacgacagcccagaagaggaagtgcagccagacccagtgccccaggaaggtcatcaagatggagtctgaggaggggaaggaggcaaggttggctcggagctccccggagcagcccaggcccagcacctccaaggcagtctcaccaccccacctggatggaccgcctagccccaggagccccgtcataggaagtgaggtcttcctgcccaacagcaaccacgtggccagtggcgccggggaggcagaggaacgcgttgtggtgatcagcagctcggaagactcagatgccgaaaactcgtcctcccgagagctggatgacagcagcagtgagtccagtgacctccagctggaaggccccagcaccctcagggtcctggacgagaaccttgctgacccccaagcagaagacagacctctggttttctttgacctcaagattgacaatgaaacccagaagattagccagctggctgcggtgaaccgggaaagcaagttccgcgtggtcatccagcctgaagccctcttcagcatctactccaaggccgtgtccctggaggtggggctgcagcacttcctcagctttctgagctccatgcgccgccctatcttggcctgctacaagctgtgggggcctggcctcccaaacttcttccgggccctggaggacattaacaggctgtgggaattccaggaggccatctcgggcttcctggctgccctgcctctcatccgggagcgtgtgcccggggccagcagcttcaaactcaagaacctggcccagacctacctggcgagaaacatgagcgagcgcagcgccatggctgccgtgctggccatgcgtgacctgtgccgcctcctcgaggtctccccgggcccccagctggcccagcatgtctaccccttcagtagcctgcagtgctttgcctccctgcagcccctggtgcaggcagctgtgctgccccgggctgaggcccgcctcctggccctacacaacgtgagcttcatggagctgctgagtgcacaccgccgtgaccggcaggggggcctgaagaagtacagccgctatctaagcctgcagaccaccacgttgccccctgcccagcctgctttcaacctgcaggctctgggcacctactttgaaggcctgttggagggtccggcgctggcacgggcagaaggagtctccaccccacttgctggccgtggcttggcagagagggcctcccagcagagctgagaggagggggtgaccagcttggagtctctggtgggcagagagggatggggtccctgagccaggccccacccatcacagcattcccaggtcctggtacccagccctcagttgtcatttggttcagaatcagttccctttctctgggaccaaatttcccttctctaaacatcctacagagaaggttccaaagctgagcacccatcaccctaggtgtgcaccagactcctattagcccctccttccaggagctagaaccagggaggtcctgagtgaggaaggcatgacctctgggctctctaggtggccctggtcttgccccatccatcccacctgccactaccttgggtgtccttacagctctgccctgaccccagcccctgcccctggacacctgctgacagctcccacacagaacagtctgaggtgatgctggctacagccctggcagcccatggcaactcaaagtgccttccaaaccaaactgcccctcatgaggttagggtcccccaccctccacctgcccagaggccaactctgttcccttctcctttcatcccagaggggcctcatcagcaaagacagaaactgatgttccatgcatgtccctgcttccaaagcctgaccttccaaagcttggggaatgtcctcggcttagaaccagtcttccgccttcagatctgctcttccaagaggagagctccctggagagccacagtactgtctctttaggccacccctcccatcgttacagcagggtcatttatggcagccactagaacctcgtttttagagccttccattgtcccggggccagggaaatgtcctttgtcctaaacttactcgagctgccttctctaagaaacctctactgtctcctttaataaaaggacaccccctttccaccaagctt

SEQ ID NO: 72222 - DNA, 1798 bp, Homo sapiens
gctctccagaggcgggccctgagccggcacctcccctttcggacagctcaagggactcagccaactggctcacgcctccccttcagcttctcttcacgcactccaagatctaaaccgagaatcgaaactaagctggggtccatggagcctgcacccgcccgatctccgaggccccagcaggaccccgcccggccccaggagcccaccatgcctccccccgagaccccctctgaaggccgccagcccagccccagccccagccctacagagcgagcccccgcttcggaggaggagttccagtttctgcgctgccagcaatgccaggcggaagccaagtgcccgaagctgctgccttgtctgcacacgctgtgctcaggatgcctggaggcgtcgggcatgcagtgccccatctgccaggcgccctggcccctaggtgcagacacacccgccctggataacgtctttttcgagagtctgcagcggcgcctgtcggtgtaccggcagattgtggatgcgcaggctgtgtgcacccgctgcaaagagtcggccgacttctggtgctttgagtgcgagcagctcctctgcgccaagtgcttcgaggcacaccagtggttcctcaagcacgaggcccggcccctagcagagctgcgcaaccagtcggtgcgtgagttcctggacggcacccgcaagaccaacaacatcttctgctccaaccccaaccaccgcacccctacgctgaccagcatctactgccgaggatgttccaagccgctgtgctgctcgtgcgcgctccttgacagcagccacagtgagctcaagtgcgacatcagcgcagagatccagcagcgacaggaggagctggacgccatgacgcaggcgctgcaggagcaggatagtgcctttggcgcggttcacgcgcagatgcacgcggccgtcggccagctgggccgcgcgcgtgccgagaccgaggagctgatccgcgagcgcgtgcgccaggtggtagctcacgtgcgggctcaggagcgcgagctgctggaggctgtggacgcgcggtaccagcgcgactacgaggagatggccagtcggctgggccgcctggatgctgtgctgcagcgcatccgcacgggcagcgcgctggtgcagaggatgaagtgctacgcctcggaccaggaggtgctggacatgcacggtttcctgcgccaggcgctctgccgcctgcgccaggaggagccccagagcctgcaagctgccgtgcgcaccgatggcttcgacgagttcaaggtgcgcctgcaggacctcagctcttgcatcacccaggggaaagatgcagctgtatccaagaaagccagcccagaggctgccagcactcccagggaccctattgacgttgacctgaggaacgcgttgtggtgatcagcagctcggaagactcagatgccgaaaactcgtcctcccgagagctggatgacagcagcagtgagtccagtgacctccagctggaaggccccagcaccctcagggtcctggacgagaaccttgctgacccccaagcagaagacagacctctggttttctttgacctcaagattgacaatgaaagtgggttctcctggggctacccccacccctttctaatttagtctctgagtcccaaaaagaagtgcaggcagagccatctgccaggcccaggagagctctgagctctggccaacaactgcagccaggctgggcagagcactccggctcacctgggctcctggcgtgtcatttgctggcttgaataaagatgtccgcctta

SEQ ID NO: 72223 - DNA, 4524 bp, Homo sapiens
aattaggctaggtaagagggccgggttggtttaatcggccgaggcttagcttctcttcacgcactccaagatctaaaccgagaatcgaaactaagctggggtccatggagcctgcacccgcccgatctccgaggccccagcaggaccccgcccggccccaggagcccaccatgcctccccccgagaccccctctgaaggccgccagcccagccccagccccagccctacagagcgagcccccgcttcggaggaggagttccagtttctgcgctgccagcaatgccaggcggaagccaagtgcccgaagctgctgccttgtctgcacacgctgtgctcaggatgcctggaggcgtcgggcatgcagtgccccatctgccaggcgccctggcccctaggtgcagacacacccgccctggataacgtctttttcgagagtctgcagcggcgcctgtcggtgtaccggcagattgtggatgcgcaggctgtgtgcacccgctgcaaagagtcggccgacttctggtgctttgagtgcgagcagctcctctgcgccaagtgcttcgaggcacaccagtggttcctcaagcacgaggcccggcccctagcagagctgcgcaaccagtcggtgcgtgagttcctggacggcacccgcaagaccaacaacatcttctgctccaaccccaaccaccgcacccctacgctgaccagcatctactgccgaggatgttccaagccgctgtgctgctcgtgcgcgctccttgacagcagccacagtgagctcaagtgcgacatcagcgcagagatccagcagcgacaggaggagctggacgccatgacgcaggcgctgcaggagcaggatagtgcctttggcgcggttcacgcgcagatgcacgcggccgtcggccagctgggccgcgcgcgtgccgagaccgaggagctgatccgcgagcgcgtgcgccaggtggtagctcacgtgcgggctcaggagcgcgagctgctggaggctgtggacgcgcggtaccagcgcgactacgaggagatggccagtcggctgggccgcctggatgctgtgctgcagcgcatccgcacgggcagcgcgctggtgcagaggatgaagtgctacgcctcggaccaggaggtgctggacatgcacggtttcctgcgccaggcgctctgccgcctgcgccaggaggagccccagagcctgcaagctgccgtgcgcaccgatggcttcgacgagttcaaggtgcgcctgcaggacctcagctcttgcatcacccaggggaaagatgcagctgtatccaagaaagccagcccagaggctgccagcactcccagggaccctattgacgttgacctgcccgaggaggcagagagagtgaaggcccaggttcaggccctggggctggctgaagcccagcctatggctgtggtacagtcagtgcccggggcacaccccgtgccagtgtacgccttctccatcaaaggcccttcctatggagaggatgtctccaatacaacgacagcccagaagaggaagtgcagccagacccagtgccccaggaaggtcatcaagatggagtctgaggaggggaaggaggcaaggttggctcggagctccccggagcagcccaggcccagcacctccaaggcagtctcaccaccccacctggatggaccgcctagccccaggagccccgtcataggaagtgaggtcttcctgcccaacagcaaccacgtggccagtggcgccggggaggcagaggaacgcgttgtggtgatcagcagctcggaagactcagatgccgaaaactcgtcctcccgagagctggatgacagcagcagtgagtccagtgacctccagctggaaggccccagcaccctcagggtcctggacgagaaccttgctgacccccaagcagaagacagacctctggttttctttgacctcaagattgacaatgaaacccagaagattagccagctggctgcggtgaaccgggaaagcaagttccgcgtggtcatccagcctgaagccctcttcagcatctactccaaggccgtgtccctggaggtggggctgcagcacttcctcagctttctgagctccatgcgccgccctatcttggcctgctacaagctgtgggggcctggcctcccaaacttcttccgggccctggaggacattaacaggctgtgggaattccaggaggccatctcgggcttcctggctgccctgcctctcatccgggagcgtgtgcccggggccagcagcttcaaactcaagaacctggcccagacctacctggcgagaaacatgagcgagcgcagcgccatggctgccgtgctggccatgcgtgacctgtgccgcctcctcgaggtctccccgggcccccagctggcccagcatgtctaccccttcagtagcctgcagtgctttgcctccctgcagcccctggtgcaggcagctgtgctgccccgggctgaggcccgcctcctggccctacacaacgtgagcttcatggagctgctgagtgcacaccgccgtgaccggcaggggggcctgaagaagtacagccgctatctaagcctgcagaccaccacgttgccccctgcccagcctgctttcaacctgcaggctctgggcacctactttgaaggcctgttggagggtccggcgctggcacgggcagaaggagtctccaccccacttgctggccgtggcttggcagagagggcctcccagcagagctgagaggagggggtgaccagcttggagtctctggtgggcagagagggatggggtccctgagccaggccccacccatcacagcattcccaggtcctggtacccagccctcagttgtcatttggttcagaatcagttccctttctctgggaccaaatttcccttctctaaacatcctacagagaaggttccaaagctgagcacccatcaccctaggtgtgcaccagactcctattagcccctccttccaggagctagaaccagggaggtcctgagtgaggaaggcatgacctctgggctctctaggtggccctggtcttgccccatccatcccacctgccactaccttgggtgtccttacagctctgccctgaccccagcccctgcccctggacacctgctgacagctcccacacagaacagtctgaggtgatgctggctacagccctggcagcccatggcaactcaaagtgccttccaaaccaaactgcccctcatgaggttagggtcccccaccctccacctgcccagaggccaactctgttcccttctcctttcatcccagaggggcctcatcagcaaagacagaaactgatgttccatgcatgtccctgcttccaaagcctgaccttccaaagcttgcttccttcctcctggctgcacagacacctctgcttggccacagctttgctctttggtcctcaggccaccagacccctcacagcatggcccttggctcttcctgcactgccctcaccctcagccgtcccaaggagtgcccagcactactcagcatgtagtccaggacctgcggcatcagcatcccctgggagcttcttagaaatgcagacctgtgggctctaccacaggcctctggaatcagaatcttcagggtggggcccagcagtctgtgttttaacaggttctcccggtgatgctggtgcatgctcaagtttgagaaccgctgctctcatagactgctcctccaaggggaagcagtgtggaacagcagagaaagtcccgtccctatctctgactgtgcagtgagtgtggcctaggaacaggtcccttcctaagctctagtgtccccatctgtaaaatgggctgattggcctccacggtcagagcggccatctggctgtgccatcctgcatttttaggaatggaaagcaggcctctgaggcagtggacaggaagacttctcatccttgaattctagctcccattccaaactgttagtccccaaccttgtggtcacatcagaggtcaacagcagaacagaggcaggtcagggttgtccgctctgattagcagaacgacagccccttcctcctcctccctccttcccatccctactcattagctccctgctcctgggatgcttcccaagcagcccaggcctctagcctccatggctgatgacctcagctttcacactggtgaagtctgtgtacccatactgcagccccatcccatggggcccctgaagacccactgaggaattccgtagggtcttgttcccacgaccggagtgctggctctcacagtgaattttgatgcatttaaaataagattctgatgccagactgttaaaataggcgctggttctgaagcaccgatggaaacagattgatgcagatggaaggaggaagggagactgggcccactgatttccagccccaccatgtgtgctgttttcagatgtgattgaggggtgttctgccctgcctccactgtcacagcctttaataaagatgtgaatcttgaaaaaaaaaaa

SEQ ID NO: 72224 - DNA, 3805 bp, Homo sapiens
acgctctctctgtggggcacggtggtggacgcctgtagtcccacctacttgagagtctgcagcggcgcctgtcggtgtaccggcagattgtggatgcgcaggctgtgtgcacccgctgcaaagagtcggccgacttctggtgctttgagtgcgagcagctcctctgcgccaagtgcttcgaggcacaccagtggttcctcaagcacgaggcccggcccctagcagagctgcgcaaccagtcggtgcgtgagttcctggacggcacccgcaagaccaacaacatcttctgctccaaccccaaccaccgcacccctacgctgaccagcatctactgccgaggatgttccaagccgctgtgctgctcgtgcgcgctccttgacagcagccacagtgagctcaagtgcgacatcagcgcagagatccagcagcgacaggaggagctggacgccatgacgcaggcgctgcaggagcaggatagtgcctttggcgcggttcacgcgcagatgcacgcggccgtcggccagctgggccgcgcgcgtgccgagaccgaggagctgatccgcgagcgcgtgcgccaggtggtagctcacgtgcgggctcaggagcgcgagctgctggaggctgtggacgcgcggtaccagcgcgactacgaggagatggccagtcggctgggccgcctggatgctgtgctgcagcgcatccgcacgggcagcgcgctggtgcagaggatgaagtgctacgcctcggaccaggaggtgctggacatgcacggtttcctgcgccaggcgctctgccgcctgcgccaggaggagccccagagcctgcaagctgccgtgcgcaccgatggcttcgacgagttcaaggtgcgcctgcaggacctcagctcttgcatcacccaggggaaagatgcagctgtatccaagaaagccagcccagaggctgccagcactcccagggaccctattgacgttgacctgcccgaggaggcagagagagtgaaggcccaggttcaggccctggggctggctgaagcccagcctatggctgtggtacagtcagtgcccggggcacaccccgtgccagtgtacgccttctccatcaaaggcccttcctatggagaggatgtctccaatacaacgacagcccagaagaggaagtgcagccagacccagtgccccaggaaggtcatcaagatggagtctgaggaggggaaggaggcaaggttggctcggagctccccggagcagcccaggcccagcacctccaaggcagtctcaccaccccacctggatggaccgcctagccccaggagccccgtcataggaagtgaggtcttcctgcccaacagcaaccacgtggccagtggcgccggggaggcagaggaacgcgttgtggtgatcagcagctcggaagactcagatgccgaaaactcggtgagtggcccagaagttcagcccaggactcctgcctccccccatttcaggtcccagggggcacagccacagcaggtgactctcagacttgccttgcgcctggggaattttccagtgaggcattgagtcccaagctgtgctgaggacagtctccaaatgacagctgcatgcctggaccaccccagccctcccactacaccagggccaggagctcttctgaaatgctgatagcatgtgtccagagccctgtctcttttctggaatgtccaagacctttgtctggagcttccttatgcattttctgtcctctaagtcctcagtgaggagggctggacaagaatccattccttggtttattacagccagtgggggccagtgaaggggtgtcaggccacagggcagctatataggggccaaacaagtgaggtttgactccatccatgtagaaagatatataaatccattccacagtgaaacaggtggcctcgtgggtagtgacccttctgtccctagaggtttattactagaggctggactatcacctgtccaggggaaaaggggatctgaatagagtgaaaggttggactgggtggcccctgaggtctcttccagccctcagtctgaggttctgtattggaaagtgcatggagcccatggagaccgccgagccacagtcctcgccagcccactcctcgccagcccactcctcgccagcccactcctcgccagtccagtctctgctgagagcacaaggagcctccagcctgccctgtggcacataccaccccccagcttggcctccccaccagcccgctgagcaggctgccacccccgatgctgagcctcacagcgagcctcctgatcaccaggagcgccctgccgtccaccgtgggatccgctacctgttgtacagagcacagagagccatccgccttcgccatgccctccgcttgcaccctcaattgcatcgggcccctattcggacttggtctccccatgtggtccaagccagcactcctgccatcacagggcccctcaaccatcctgccaatgcccaggaacatcctgcccagctgcaaaggggcatcagcccaccccaccggatacgaggggctgtgcgatcccgcagccgctccctccggggctcctcccatttatcccagtggctcaacaacttttttgccctccccttctcctccatggcttcccagcttgacatgtcttccgtggtgggggcaggggaaggcagagcccagactcttggagcagttgttccccctggggactctgtcagaggctccatggaggcctctcaagtccaagtgcctctggaagcctctccaattacattcccaccaccctgtgccccagaaaggccccccatcagcccagtcccaggcgcccgtcaagcaggcctctgagagtgctacccttctcttgtaaccttgcagccaacacccctgcccggcccctgagctgcctcctccagcccatgctcttacaggccctgcacagagtagcactcattaattcttggttaaggaatgaatcaacgaatgaatggctatgcatggacctctgggcagggagacctgggtcttctctggctgagaggggaaggctaaggcatggctgagattcaagccaccattccaggcctctttgcccaagaaagaaacttctgtcacccttgcactctcctgtattctgagtccctggccaatagcacagccttccatgccccgacccccaccccaagcctctccactaggcctctgccaggatctaagcccatgagcacagggactggctatcccaagacctggcagatgtggctgctcaataaacacttgttgaaccatcacccttgcgaacccttattccacgaccatcgcgttctccgatggatccagctcctccctgcaggctgttctctcttccctatgctggaactcagttctcctctggggataccatgtcccctcttcctcccacactcatgggcatcagaggtgggaggtagggtcaaggccccctgcttcctggactgttccagccccttcctggccgtctggtaagatcctctgtccctctcagggtgggccccatgctccccagctcatcccagacacccacctgcccaccctcattgagggcagacgtgagcattcacctcccagatttcttctccctgctcaggtcctgccttcctcctgagtgacttctatttccacccacctgcccgccactccttaacctctcaggggttgtcaccccattcccccagacagctgcctgccccgtggccgtgccctgcaccttgccatcaccgagcactgttggtccctcagccggtcctctcagactctgac

SEQ ID NO: 72225 - DNA, 3107 bp, Homo sapiens
agactgaaacaggagaattgctcaagcccaggagttcaagaccagcgtgggcaacatagtgagaccctgtctctacaaaaaaatttttttaaaaaaaggaggtgatgtgatggagagtttggaggacttcttgtccccagtgagctcggagctttgagtcagggagcctggacctgtgacttggtgaggccccagggattaggccaaccacaggtctggggtacctggccctggggctgctgcctagtcatttctgactcaattttcccaactttgcagcccgaggaggcagagagagtgaaggcccaggttcaggccctggggctggctgaagcccagcctatggctgtggtacagtcagtgcccggggcacaccccgtgccagtgtacgccttctccatcaaaggcccttcctatggagaggatgtctccaatacaacgacagcccagaagaggaagtgcagccagacccagtgccccaggaaggtcatcaagatggagtctgaggaggggaaggaggcaaggttggctcggagctccccggagcagcccaggcccagcacctccaaggcagtctcaccaccccacctggatggaccgcctagccccaggagccccgtcataggaagtgaggtcttcctgcccaacagcaaccacgtggccagtggcgccggggaggcagaggaacgcgttgtggtgatcagcagctcggaagactcagatgccgaaaactcggtgagtggcccagaagttcagcccaggactcctgcctccccccatttcaggtcccagggggcacagccacagcaggtgactctcagacttgccttgcgcctggggaattttccagtgaggcattgagtcccaagctgtgctgaggacagtctccaaatgacagctgcatgcctggaccaccccagccctcccactacaccagggccaggagctcttctgaaatgctgatagcatgtgtccagagccctgtctcttttctggaatgtccaagacctttgtctggagcttccttatgcattttctgtcctctaagtcctcagtgaggagggctggacaagaatccattccttggtttattacagccagtgggggccagtgaaggggtgtcaggccacagggcagctatataggggccaaacaagtgaggtttgactccatccatgtagaaagatatataaatccattccacagtgaaacaggtggcctcgtgggtagtgacccttctgtccctagaggtttattactagaggctggactatcacctgtccaggggaaaaggggatctgaatagagtgaaaggttggactgggtggcccctgaggtctcttccagccctcagtctgaggttctgtattggaaagtgcatggagcccatggagaccgccgagccacagtcctcgccagcccactcctcgccagcccactcctcgccagcccactcctcgccagtccagtctctgctgagagcacaaggagcctccagcctgccctgtggcacataccaccccccagcttggcctccccaccagcccgctgagcaggctgccacccccgatgctgagcctcacagcgagcctcctgatcaccaggagcgccctgccgtccaccgtgggatccgctacctgttgtacagagcacagagagccatccgccttcgccatgccctccgcttgcaccctcaattgcatcgggcccctattcggacttggtctccccatgtggtccaagccagcactcctgccatcacagggcccctcaaccatcctgccaatgcccaggaacatcctgcccagctgcaaaggggcatcagcccaccccaccggatacgaggggctgtgcgatcccgcagccgctccctccggggctcctcccatttatcccagtggctcaacaacttttttgccctccccttctcctccatggcttcccagcttgacatgtcttccgtggtgggggcaggggaaggcagagcccagactcttggagcagttgttccccctggggactctgtcagaggctccatggaggcctctcaagtccaagtgcctctggaagcctctccaattacattcccaccaccctgtgccccagaaaggccccccatcagcccagtcccaggcgcccgtcaagcaggcctctgagagtgctacccttctcttgtaaccttgcagccaacacccctgcccggcccctgagctgcctcctccagcccatgctcttacaggccctgcacagagtagcactcattaattcttggttaaggaatgaatcaacgaatgaatggctatgcatggacctctgggcagggagacctgggtcttctctggctgagaggggaaggctaaggcatggctgagattcaagccaccattccaggcctctttgcccaagaaagaaacttctgtcacccttgcactctcctgtattctgagtccctggccaatagcacagccttccatgccccgacccccaccccaagcctctccactaggcctctgccaggatctaagcccatgagcacagggactggctatcccaagacctggcagatgtggctgctcaataaacacttgttgaaccatcacccttgcgaacccttattccacgaccatcgcgttctccgatggatccagctcctccctgcaggctgttctctcttccctatgctggaactcagttctcctctggggataccatgtcccctcttcctcccacactcatgggcatcagaggtgggaggtagggtcaaggccccctgcttcctggactgttccagccccttcctggccgtctggtaagatcctctgtccctctcagggtgggccccatgctccccagctcatcccagacacccacctgcccaccctcattgagggcagacgtgagcattcacctcccagatttcttctccctgctcaggtcctgccttcctcctgagtgacttctatttccacccacctgcccgccactccttaacctctcaggggttgtcaccccattcccccagacagctgcctgccccgtggccgtgccctgcaccttgccatcaccgagcactgttggtccctcagccggtcctctcagactctgac

SEQ ID NO: 72226 - DNA, 4474 bp, Homo sapiens
gctctccagaggcgggccctgagccggcacctcccctttcggacagctcaagggactcagccaactggctcacgcctccccttcagcttctcttcacgcactccaagatctaaaccgagaatcgaaactaagctggggtccatggagcctgcacccgcccgatctccgaggccccagcaggaccccgcccggccccaggagcccaccatgcctccccccgagaccccctctgaaggccgccagcccagccccagccccagccctacagagcgagcccccgcttcggaggaggagttccagtttctgcgctgccagcaatgccaggcggaagccaagtgcccgaagctgctgccttgtctgcacacgctgtgctcaggatgcctggaggcgtcgggcatgcagtgccccatctgccaggcgccctggcccctaggtgcagacacacccgccctggataacgtctttttcgagagtctgcagcggcgcctgtcggtgtaccggcagattgtggatgcgcaggctgtgtgcacccgctgcaaagagtcggccgacttctggtgctttgagtgcgagcagctcctctgcgccaagtgcttcgaggcacaccagtggttcctcaagcacgaggcccggcccctagcagagctgcgcaaccagtcggtgcgtgagttcctggacggcacccgcaagaccaacaacatcttctgctccaaccccaaccaccgcacccctacgctgaccagcatctactgccgaggatgttccaagccgctgtgctgctcgtgcgcgctccttgacagcagccacagtgagctcaagtgcgacatcagcgcagagatccagcagcgacaggaggagctggacgccatgacgcaggcgctgcaggagcaggatagtgcctttggcgcggttcacgcgcagatgcacgcggccgtcggccagctgggccgcgcgcgtgccgagaccgaggagctgatccgcgagcgcgtgcgccaggtggtagctcacgtgcgggctcaggagcgcgagctgctggaggctgtggacgcgcggtaccagcgcgactacgaggagatggccagtcggctgggccgcctggatgctgtgctgcagcgcatccgcacgggcagcgcgctggtgcagaggatgaagtgctacgcctcggaccaggaggtgctggacatgcacggtttcctgcgccaggcgctctgccgcctgcgccaggaggagccccagagcctgcaagctgccgtgcgcaccgatggcttcgacgagttcaaggtgcgcctgcaggacctcagctcttgcatcacccaggggaaagatgcagctgtatccaagaaagccagcccagaggctgccagcactcccagggaccctattgacgttgacctgcccgaggaggcagagagagtgaaggcccaggttcaggccctggggctggctgaagcccagcctatggctgtggtacagtcagtgcccggggcacaccccgtgccagtgtacgccttctccatcaaaggcccttcctatggagaggatgtctccaatacaacgacagcccagaagaggaagtgcagccagacccagtgccccaggaaggtcatcaagatggagtctgaggaggggaaggaggcaaggttggctcggagctccccggagcagcccaggcccagcacctccaaggcagtctcaccaccccacctggatggaccgcctagccccaggagccccgtcataggaagtgaggtcttcctgcccaacagcaaccacgtggccagtggcgccggggaggcagaggaacgcgttgtggtgatcagcagctcggaagactcagatgccgaaaactcgtcctcccgagagctggatgacagcagcagtgagtccagtgacctccagctggaaggccccagcaccctcagggtcctggacgagaaccttgctgacccccaagcagaagacagacctctggttttctttgacctcaagattgacaatgaaacccagaagattagccagctggctgcggtgaaccgggaaagcaagttccgcgtggtcatccagcctgaagccctcttcagcatctactccaaggccgtgtccctggaggtggggctgcagcacttcctcagctttctgagctccatgcgccgccctatcttggcctgctacaagctgtgggggcctggcctcccaaacttcttccgggccctggaggacattaacaggctgtgggaattccaggaggccatctcgggcttcctggctgccctgcctctcatccgggagcgtgtgcccggggccagcagcttcaaactcaagaacctggcccagacctacctggcgagaaacatgagcgagcgcagcgccatggctgccgtgctggccatgcgtgacctgtgccgcctcctcgaggtctccccgggcccccagctggcccagcatgtctaccccttcagtagcctgcagtgctttgcctccctgcagcccctggtgcaggcagctgtgctgccccgggctgaggcccgcctcctggccctacacaacgtgagcttcatggagctgctgagtgcacaccgccgtgaccggcaggggggcctgaagaagtacagccgctatctaagcctgcagaccaccacgttgccccctgcccagcctgctttcaacctgcaggctctgggcacctactttgaaggcctgttggagggtccggcgctggcacgggcagaaggagtctccaccccacttgctggccgtggcttggcagagagggcctcccagcagagctgagaggagggggtgaccagcttggagtctctggtgggcagagagggatggggtccctgagccaggccccacccatcacagcattcccaggtcctggtacccagccctcagttgtcatttggttcagaatcagttccctttctctgggaccaaatttcccttctctaaacatcctacagagaaggttccaaagctgagcacccatcaccctaggtgtgcaccagactcctattagcccctccttccaggagctagaaccagggaggtcctgagtgaggaaggcatgacctctgggctctctaggtggccctggtcttgccccatccatcccacctgccactaccttgggtgtccttacagctctgccctgaccccagcccctgcccctggacacctgctgacagctcccacacagaacagtctgaggtgatgctggctacagccctggcagcccatggcaactcaaagtgccttccaaaccaaactgcccctcatgaggttagggtcccccaccctccacctgcccagaggccaactctgttcccttctcctttcatcccagaggggcctcatcagcaaagacagaaactgatgttccatgcatgtccctgcttccaaagcctgaccttccaaagcttgcttccttcctcctggctgcacagacacctctgcttggccacagctttgctctttggtcctcaggccaccagacccctcacagcatggcccttggctcttcctgcactgccctcaccctcagccgtcccaaggagtgcccagcactactcagcatgtagtccaggacctgcggcatcagcatcccctgggagcttcttagaaatgcagacctgtgggctctaccacaggcctctggaatcagaatcttcagggtggggcccagcagtctgtgttttaacaggttctcccggtgatgctggtgcatgctcaagtttgagaaccgctgctctcatagactgctcctccaaggggaagcagtgtggaacagcagagaaagtcccgtccctatctctgactgtgcagtgagtgtggcctaggaacaggtcccttcctaagctctagtgtccccatctgtaaaatgggctgattggcctccacggtcagagcggccatctggctgtgccatcctgcatttttaggaatggaaagcaggcctctgaggcagtggacaggaagacttctcatccttgaattctagctcccattccaaactgttagtccccaaccttgtggtcacatcagaggtcaacagcagaacagaggcaggtcagggttgtccgctctgattagcagaacgacagccccttcctcctcctccctccttcccatccctactcattagctccctgctcctgggatgcttcccaagcagcccaggcctctagcctccatggctgatgacctcagctttcacactggtgaagtctgtgtacccatactgcagccccatcccatggggcccctgaagacccactgaggaattccgtagggtcttgttcccacgaccggagtgctggctctcacagtgaattttgatgcatttaaaataagattctgatgccagactgttaaaataggcgctggttctgaagcaccgatggaaacagattgatgcagatggaaggaggaagggaggaggaggaaggtgctgtcgttctgctaatcagag

SEQ ID NO: 72227 - DNA, 2239 bp, Homo sapiens
gctctccagaggcgggccctgagccggcacctcccctttcggacagctcaagggactcagccaactggctcacgcctccccttcagcttctcttcacgcactccaagatctaaaccgagaatcgaaactaagctggggtccatggagcctgcacccgcccgatctccgaggccccagcaggaccccgcccggccccaggagcccaccatgcctccccccgagaccccctctgaaggccgccagcccagccccagccccagccctacagagcgagcccccgcttcggaggaggagttccagtttctgcgctgccagcaatgccaggcggaagccaagtgcccgaagctgctgccttgtctgcacacgctgtgctcaggatgcctggaggcgtcgggcatgcagtgccccatctgccaggcgccctggcccctaggtgcagacacacccgccctggataacgtctttttcgagagtctgcagcggcgcctgtcggtgtaccggcagattgtggatgcgcaggctgtgtgcacccgctgcaaagagtcggccgacttctggtgctttgagtgcgagcagctcctctgcgccaagtgcttcgaggcacaccagtggttcctcaagcacgaggcccggcccctagcagagctgcgcaaccagtcggtgcgtgagttcctggacggcacccgcaagaccaacaacatcttctgctccaaccccaaccaccgcacccctacgctgaccagcatctactgccgaggatgttccaagccgctgtgctgctcgtgcgcgctccttgacagcagccacagtgagctcaagtgcgacatcagcgcagagatccagcagcgacaggaggagctggacgccatgacgcaggcgctgcaggagcaggatagtgcctttggcgcggttcacgcgcagatgcacgcggccgtcggccagctgggccgcgcgcgtgccgagaccgaggagctgatccgcgagcgcgtgcgccaggtggtagctcacgtgcgggctcaggagcgcgagctgctggaggctgtggacgcgcggtaccagcgcgactacgaggagatggccagtcggctgggccgcctggatgctgtgctgcagcgcatccgcacgggcagcgcgctggtgcagaggatgaagtgctacgcctcggaccaggaggtgctggacatgcacggtttcctgcgccaggcgctctgccgcctgcgccaggaggagccccagagcctgcaagctgccgtgcgcaccgatggcttcgacgagttcaaggtgcgcctgcaggacctcagctcttgcatcacccaggggaaagatgcagctgtatccaagaaagccagcccagaggctgccagcactcccagggaccctattgacgttgacctgcccgaggaggcagagagagtgaaggcccaggttcaggccctggggctggctgaagcccagcctatggctgtggtacagtcagtgcccggggcacaccccgtgccagtgtacgccttctccatcaaaggcccttcctatggagaggatgtctccaatacaacgacagcccagaagaggaagtgcagccagacccagtgccccaggaaggtcatcaagatggagtctgaggaggggaaggaggcaaggttggctcggagctccccggagcagcccaggcccagcacctccaaggcagtctcaccaccccacctggatggaccgcctagccccaggagccccgtcataggaagtgaggtcttcctgcccaacagcaaccacgtggccagtggcgccggggaggcagaggaacgcgttgtggtgatcagcagctcggaagactcagatgccgaaaactcgtcctcccgagagctggatgacagcagcagtgagtccagtgacctccagctggaaggccccagcaccctcagggtcctggacgagaaccttgctgacccccaagcagaagacagacctctggttttctttgacctcaagattgacaatgaaagtgggttctcctggggctacccccacccctttctaatttagtctctgagtcccaaaaagaagtgcaggcagagccatctgccaggcccaggagagctctgagctctggccaacaactgcagccaggctgggcagagcactccggctcacctgggctcctggcgtgtcatttgctggcttgaataaagatgtccgccttatccagtgcctgagtgtgcgagagaggcagatgcctcca

SEQ ID NO: 72228 - DNA, 361 bp, Homo sapiens
ccacatgtaactgatgactagtggctacctaccatatatagaacatttctattattgcacattattctactggacaatgctgttttaggatgtagaagtcctgatggataatatcaaagccaccttaccacagacagagttttacagagctgtgaagtaattcttactgggaacaccagatacttacttaccattttatatagcgtatgtggcattctctcatcttatcattagagcatgcctgtatctttagcgacaatagcattcaaacaccaaatgttatattgtctgtctggaaatgttttcttatacaactcaaaggggaagagaggaatatgtcgtgagtaaatggaattatttt

SEQ ID NO: 72229 - DNA, 474 bp, Homo sapiens
ggttcagggaggccaagtaactgacctagatttagtggaagaactgggattggaagtcaggaatgccgaaatctagtggagattccttctgtcactctgtgttcctgctgtgcagaaaggtcctcagattgtggtagcctaacatggaaaatcatgggctttggagaacagcagatccgagacgaaatctatgttctaccattacgttatgagaatttagacaagttgtttactatctctgaccctatttatcatataaatggggacaataaactgttaaagattaagagaaaacactataaaatatctaccagagtatctgggtttgaatcctggctttgcctttttctaattgattgcgtgacaaacggcagaaatgtcatacagtagaaatgagagatgagaggtcctctgggtaagtggggaactgtttggtctcatcgcctccatttctacatctctaataatatccct

SEQ ID NO: 72230 - DNA, 507 bp, Homo sapiens
gaaaaaagagagctccttctggctcctggtgacccatatttaggacaccatcccatcccccagcacacacattcctacagtgtcacctggtccccaatccgagcatttcctggagtgctcgccacattccccttcctggtgcttttctatggtggggccaggggaggccttgttttgaacatcgctgtgacgtcactccccctcctccgagctaagcacccctcggtgggccctgggaattgttgcgcggcctgctggggaggggcggagtgtgggcccagggagggttccaccaaacatccattaccgctgtcgcctgcggggccttcaggctgcaagtacgtgaggtgtcagaaaagaagccgaagggttcccgtgggggctcttctgccaaatgagtcaagagatgtgcggaagcggatgattgaagtaccccgtggagtagcagaaaggggcatcaaaaactgtaacctgaaaataaaagctttaacctgttccccaaaagac

SEQ ID NO: 72231 - DNA, 422 bp, Homo sapiens
gctcaaaaaacaaaaggatggaggcacaggagccaacctgagagagctctcaatggccaaagctaaaacaattttagcaacaaactaaatgacatagtattagcttatggcacaaagaatagaataaatatctgtgagcccatactgattacataaaataaatgattgagtaaatcaatggagaacaagtctttctcacagaagaatttgaaataatatatgaggacactcctgtttttagaaggtggagtttagttcctccctaccctctttaatgactcagccccaaagaataaaatgtgaaagggaaaaatactgaatgtggaaaaacctggcaaatatcataatttattaaactagccttctgttgatggtcatttaggttgtttcttatcttttagtatttgaatctagcagtaagt

SEQ ID NO: 72232 - DNA, 621 bp, Homo sapiens
cttgcaacaaaatcaaggttccagaagctcaaagcattactgattttcttggtaattaccagtacaccaaaaacagcattttagaagggagcaccaagccctgtggaatgcttctgaactagattaaactactagactagtaattaaactaacttcatatgggagagttctcttgctcaaacttgagcaatcctgctcatttcaggaaagcaattttagcacaaaagtggaaacaagaaacttctgagcctcaatttcagctcagataccatggttggcagcctctattcacctgaactacaaaaccaggataccaactacttccaagaagtgttaaaggggattaagattattaaataatgtgaagatgaaaagcactaagtcccagtattgtatcatttgcaggtagtttaacagtctctgtttctgtatcagcaaacaagttcctaccattttactcatctagacatttcaataacagtcactgccacagtacctaagtgctttttaccagacaacccattgaaagactcctggcatcttgtcaaaatgacatgctgctacatcatattacagactgcaagagcctaaaaatttagaaaagatgatttttcttcaaat

SEQ ID NO: 72233 - DNA, 568 bp, Homo sapiens
cttgcaacaaaatcaaggttccagaagctcaaagcattactgattttcttggtaattaccagtacaccaaaaacagcattttagaagggagcaccaagccctgtggaatgcttctgaactagattaaactactagactagtaattaaactaacttcatatgggagagttctcttgctcaaacttgagcaatcctgctcatttcaggaaagcaattttagcacaaaagtggaaacaagaaacttctgagcctcaatttcagctcagataccatggttggcagcctctattcacctgaactacaaaaccaggataccaactacttccaagaagtgttaaaggggattaagattattaaataatgtgaagatgaaaagcactaagtcccagtattgtatcatttgcagtcatctagacatttcaataacagtcactgccacagtacctaagtgctttttaccagacaacccattgaaagactcctggcatcttgtcaaaatgacatgctgctacatcatattacagactgcaagagcctaaaaatttagaaaagatgatttttcttcaaat

SEQ ID NO: 72234 - DNA, 166 bp, Homo sapiens
tacccccggatttctacatggctccgtcctcctttcctccgtgctaccctccgatttctaaatggctccgtcctcctttccaaatatttattcctccgtattgtatttccctggccacttttcttaccagcaatcttacaccttccatttaatatagccaaagttt

SEQ ID NO: 72235 - DNA, 428 bp, Homo sapiens
aactttcattccatgcctatgtctgtacttaaggtacaggtaatgttgaaatgaaggatatctttcagcagggttttccatcttctcactgtcatgctgcaaactaacttaccaatgtaatgtccatatctggcagatatctcaatgatagagaatactacaagacagtagttcccaaactttgctgcacattagaatttcctgaggttctttggaaaagtcctgatgcctagggctcactttgagagattctgatttttgttttgttttgttttgtttttttaaccacagcactgagttttattagggatttcattaaggttaaatttctaggaatgagggaatcctagttagagggcacaaaagcccacgaagcctcctcagatctagtagtgaaccaccgactcaggttctttggagggatcacc

SEQ ID NO: 72236 - DNA, 2013 bp, Homo sapiens
atggcagcagattcacagggcctctgagcattatcccccatactcctccccatcattctccacccagctgttggagccatctgtctgatcaccttggactccatagtacactggggcaaagcacagccccagtttctggaggcagatgggtaaccaggaaaaggcatgaatgagggggccccaggagacagtgacttagagactgaggcaagagtgccgtggtcaatcatgggtcattgtcttcgaactggacaggccagaatgtctgccacacccacacctgcaggtgaaggagccagaagctcttcaacctgtagctccctgagcaggctgttctggtctcaacttgagcacataaactgggatggagccacagccaagaactttattaatttaagggagttcttctcttttctgctccctgcattgagaaaagctcaaattgaaattattccatgcaagatctgtggagacaaatcatcaggaatccattatggtgtcattacatgtgaaggctgcaagggctttttcaggagaagtcagcaaagcaatgccacctactcctgtcctcgtcagaagaactgtttgattgatcgaaccagtagaaaccgctgccaacactgtcgattacagaaatgccttgccgtagggatgtctcgagatgctgtaaaatttggccgaatgtcaaaaaagcagagagacagcttgtatgcagaagtacagaaacaccggatgcagcagcagcagcgcgaccaccagcagcagcctggagaggctgagccgctgacgcccacctacaacatctcggccaacgggctgacggaacttcacgacgacctcagtaactacattgacgggcacacccctgaggggagtaaggcagactccgccgtcagcagcttctacctggacatacagccttccccagaccagtcaggtcttgatatcaatggaatcaaaccagaaccaatatgtgactacacaccagcatcaggcttctttccctactgttcgttcaccaacggcgagacttccccaactgtgtccatggcagaattagaacaccttgcacagaatatatctaaatcgcatctggaaacctgccaatacttgagagaagagctccagcagataacgtggcagacctttttacaggaagaaattgagaactatcaaaacaagcagcgggaggtgatgtggcaattgtgtgccatcaaaattacagaagctatacagtatgtggtggagtttgccaaacgcattgatggatttatggaactgtgtcaaaatgatcaaattgtgcttctaaaagcaggttctctagaggtggtgtttatcagaatgtgccgtgcctttgactctcagaacaacaccgtgtactttgatgggaagtatgccagccccgacgtcttcaaatccttaggttgtgaagactttattagctttgtgtttgaatttggaaagagtttatgttctatgcacctgactgaagatgaaattgcattattttctgcatttgtactgatgtcagcagatcgctcatggctgcaagaaaaggtaaaaattgaaaaactgcaacagaaaattcagctagctcttcaacacgtcctacagaagaatcaccgagaagatggaatactaacaaagttaatatgcaaggtgtctacattaagagccttatgtggacgacatacagaaaagctaatggcatttaaagcaatatacccagacattgtgcgacttcattttcctccattatacaaggagttgttcacttcagaatttgagccagcaatgcaaattgatgggtaaatgttatcacctaagcacttctagaatgtctgaagtacaaacatgaaaaacaaacaaaaaaattaaccgagacactttatatggccctgcacagacctggagcgccacacactgcacatcttttggtgatcggggtcaggcaaaggaggggaaacaatgaaaacaaataaagttgaacttgtttttctcatgcatatgatt

SEQ ID NO: 72237 - DNA, 2037 bp, Homo sapiens
atggcagcagattcacagggcctctgagcattatcccccatactcctccccatcattctccacccagctgttggagccatctgtctgatcaccttggactccatagtacactggggcaaagcacagccccagtttctggaggcagatgggtaaccaggaaaaggcatgaatgagggggccccaggagacagtgacttagagactgaggcaagagtgccgtggtcaatcatgggtcattgtcttcgaactggacaggccagaatgtctgccacacccacacctgcaggtgaaggagccagaagggatgaactttttgggattctccaaatactccatcagtgtatcctgtcttcaggtgatgcttttgttcttactggcgtctgttgttcctggaggcagaatggcaagccaccatattcacaaaaggaagataaggaagtacaaactggatacatgaatgctcaaattgaaattattccatgcaagatctgtggagacaaatcatcaggaatccattatggtgtcattacatgtgaaggctgcaagggctttttcaggagaagtcagcaaagcaatgccacctactcctgtcctcgtcagaagaactgtttgattgatcgaaccagtagaaaccgctgccaacactgtcgattacagaaatgccttgccgtagggatgtctcgagatgctgtaaaatttggccgaatgtcaaaaaagcagagagacagcttgtatgcagaagtacagaaacaccggatgcagcagcagcagcgcgaccaccagcagcagcctggagaggctgagccgctgacgcccacctacaacatctcggccaacgggctgacggaacttcacgacgacctcagtaactacattgacgggcacacccctgaggggagtaaggcagactccgccgtcagcagcttctacctggacatacagccttccccagaccagtcaggtcttgatatcaatggaatcaaaccagaaccaatatgtgactacacaccagcatcaggcttctttccctactgttcgttcaccaacggcgagacttccccaactgtgtccatggcagaattagaacaccttgcacagaatatatctaaatcgcatctggaaacctgccaatacttgagagaagagctccagcagataacgtggcagacctttttacaggaagaaattgagaactatcaaaacaagcagcgggaggtgatgtggcaattgtgtgccatcaaaattacagaagctatacagtatgtggtggagtttgccaaacgcattgatggatttatggaactgtgtcaaaatgatcaaattgtgcttctaaaagcaggttctctagaggtggtgtttatcagaatgtgccgtgcctttgactctcagaacaacaccgtgtactttgatgggaagtatgccagccccgacgtcttcaaatccttaggttgtgaagactttattagctttgtgtttgaatttggaaagagtttatgttctatgcacctgactgaagatgaaattgcattattttctgcatttgtactgatgtcagcagatcgctcatggctgcaagaaaaggtaaaaattgaaaaactgcaacagaaaattcagctagctcttcaacacgtcctacagaagaatcaccgagaagatggaatactaacaaagttaatatgcaaggtgtctacattaagagccttatgtggacgacatacagaaaagctaatggcatttaaagcaatatacccagacattgtgcgacttcattttcctccattatacaaggagttgttcacttcagaatttgagccagcaatgcaaattgatgggtaaatgttatcacctaagcacttctagaatgtctgaagtacaaacatgaaaaacaaacaaaaaaattaaccgagacactttatatggccctgcacagacctggagcgccacacactgcacatcttttggtgatcggggtcaggcaaaggaggggaaacaatgaaaacaaataaagttgaacttgtttttctcatgcatatgatt

SEQ ID NO: 72238 - DNA, 1879 bp, Homo sapiens
atggcagcagattcacagggcctctgagcattatcccccatactcctccccatcattctccacccagctgttggagccatctgtctgatcaccttggactccatagtacactggggcaaagcacagccccagtttctggaggcagatgggtaaccaggaaaaggcatgaatgagggggccccaggagacagtgacttagagactgaggcaagagtgccgtggtcaatcatgggtcattgtcttcgaactggacaggccagaatgtctgccacacccacacctgcaggtgaaggagccagaagctcaaattgaaattattccatgcaagatctgtggagacaaatcatcaggaatccattatggtgtcattacatgtgaaggctgcaagggctttttcaggagaagtcagcaaagcaatgccacctactcctgtcctcgtcagaagaactgtttgattgatcgaaccagtagaaaccgctgccaacactgtcgattacagaaatgccttgccgtagggatgtctcgagatgctgtaaaatttggccgaatgtcaaaaaagcagagagacagcttgtatgcagaagtacagaaacaccggatgcagcagcagcagcgcgaccaccagcagcagcctggagaggctgagccgctgacgcccacctacaacatctcggccaacgggctgacggaacttcacgacgacctcagtaactacattgacgggcacacccctgaggggagtaaggcagactccgccgtcagcagcttctacctggacatacagccttccccagaccagtcaggtcttgatatcaatggaatcaaaccagaaccaatatgtgactacacaccagcatcaggcttctttccctactgttcgttcaccaacggcgagacttccccaactgtgtccatggcagaattagaacaccttgcacagaatatatctaaatcgcatctggaaacctgccaatacttgagagaagagctccagcagataacgtggcagacctttttacaggaagaaattgagaactatcaaaacaagcagcgggaggtgatgtggcaattgtgtgccatcaaaattacagaagctatacagtatgtggtggagtttgccaaacgcattgatggatttatggaactgtgtcaaaatgatcaaattgtgcttctaaaagcaggttctctagaggtggtgtttatcagaatgtgccgtgcctttgactctcagaacaacaccgtgtactttgatgggaagtatgccagccccgacgtcttcaaatccttaggttgtgaagactttattagctttgtgtttgaatttggaaagagtttatgttctatgcacctgactgaagatgaaattgcattattttctgcatttgtactgatgtcagcagatcgctcatggctgcaagaaaaggtaaaaattgaaaaactgcaacagaaaattcagctagctcttcaacacgtcctacagaagaatcaccgagaagatggaatactaacaaagttaatatgcaaggtgtctacattaagagccttatgtggacgacatacagaaaagctaatggcatttaaagcaatatacccagacattgtgcgacttcattttcctccattatacaaggagttgttcacttcagaatttgagccagcaatgcaaattgatgggtaaatgttatcacctaagcacttctagaatgtctgaagtacaaacatgaaaaacaaacaaaaaaattaaccgagacactttatatggccctgcacagacctggagcgccacacactgcacatcttttggtgatcggggtcaggcaaaggaggggaaacaatgaaaacaaataaagttgaacttgtttttctcatgcatatgatt

SEQ ID NO: 72239 - DNA, 1940 bp, Homo sapiens
tggtaccatagagttgctctgaaaacagaagatagagggagtctcggagctcgcatctccagcgatctctacattgggaaaaaacatggagtcagctccggcagcccccgaccccgccgccagcgagccaggcagcagcggcgcggacgcggccgccggctccagggagaccccgctgaaccaggaatccgcccgcaagagcgagccgcctgccccggtgcgcagacagagctattccagcaccagcagaggtatctcagtaacgaagaagacacatacatggcaggcatggtacagagcgcttccttgcacagccttgcccatgagctcgtccctggcccggagggacccactctagaggtgctcaaattgaaattattccatgcaagatctgtggagacaaatcatcaggaatccattatggtgtcattacatgtgaaggctgcaagggctttttcaggagaagtcagcaaagcaatgccacctactcctgtcctcgtcagaagaactgtttgattgatcgaaccagtagaaaccgctgccaacactgtcgattacagaaatgccttgccgtagggatgtctcgagatgctgtaaaatttggccgaatgtcaaaaaagcagagagacagcttgtatgcagaagtacagaaacaccggatgcagcagcagcagcgcgaccaccagcagcagcctggagaggctgagccgctgacgcccacctacaacatctcggccaacgggctgacggaacttcacgacgacctcagtaactacattgacgggcacacccctgaggggagtaaggcagactccgccgtcagcagcttctacctggacatacagccttccccagaccagtcaggtcttgatatcaatggaatcaaaccagaaccaatatgtgactacacaccagcatcaggcttctttccctactgttcgttcaccaacggcgagacttccccaactgtgtccatggcagaattagaacaccttgcacagaatatatctaaatcgcatctggaaacctgccaatacttgagagaagagctccagcagataacgtggcagacctttttacaggaagaaattgagaactatcaaaacaagcagcgggaggtgatgtggcaattgtgtgccatcaaaattacagaagctatacagtatgtggtggagtttgccaaacgcattgatggatttatggaactgtgtcaaaatgatcaaattgtgcttctaaaagcaggttctctagaggtggtgtttatcagaatgtgccgtgcctttgactctcagaacaacaccgtgtactttgatgggaagtatgccagccccgacgtcttcaaatccttaggttgtgaagactttattagctttgtgtttgaatttggaaagagtttatgttctatgcacctgactgaagatgaaattgcattattttctgcatttgtactgatgtcagcagatcgctcatggctgcaagaaaaggtaaaaattgaaaaactgcaacagaaaattcagctagctcttcaacacgtcctacagaagaatcaccgagaagatggaatactaacaaagttaatatgcaaggtgtctacattaagagccttatgtggacgacatacagaaaagctaatggcatttaaagcaatatacccagacattgtgcgacttcattttcctccattatacaaggagttgttcacttcagaatttgagccagcaatgcaaattgatgggtaaatgttatcacctaagcacttctagaatgtctgaagtacaaacatgaaaaacaaacaaaaaaattaaccgagacactttatatggccctgcacagacctggagcgccacacactgcacatcttttggtgatcggggtcaggcaaaggaggggaaacaatgaaaacaaataaagttgaacttgtttttctcatgcatatgatt

SEQ ID NO: 72240 - DNA, 1854 bp, Homo sapiens
caaagctaggctgccactgctagttcctgtagtcatctctccgatatcatgactcaagccctccggtcgtcttggccacgttccccctggtttatccatattccacgtaaactgtgttcatcatactgaaaacagacccctggaggaattctgaggtccaaggatttgggcaaggtcattacctcctttttcctggaccatcttcttcaattaatgcaacctaagactgcaataagctcttttacaggtatctcagtaacgaagaagacacatacatctcaaattgaaattattccatgcaagatctgtggagacaaatcatcaggaatccattatggtgtcattacatgtgaaggctgcaagggctttttcaggagaagtcagcaaagcaatgccacctactcctgtcctcgtcagaagaactgtttgattgatcgaaccagtagaaaccgctgccaacactgtcgattacagaaatgccttgccgtagggatgtctcgagatgctgtaaaatttggccgaatgtcaaaaaagcagagagacagcttgtatgcagaagtacagaaacaccggatgcagcagcagcagcgcgaccaccagcagcagcctggagaggctgagccgctgacgcccacctacaacatctcggccaacgggctgacggaacttcacgacgacctcagtaactacattgacgggcacacccctgaggggagtaaggcagactccgccgtcagcagcttctacctggacatacagccttccccagaccagtcaggtcttgatatcaatggaatcaaaccagaaccaatatgtgactacacaccagcatcaggcttctttccctactgttcgttcaccaacggcgagacttccccaactgtgtccatggcagaattagaacaccttgcacagaatatatctaaatcgcatctggaaacctgccaatacttgagagaagagctccagcagataacgtggcagacctttttacaggaagaaattgagaactatcaaaacaagcagcgggaggtgatgtggcaattgtgtgccatcaaaattacagaagctatacagtatgtggtggagtttgccaaacgcattgatggatttatggaactgtgtcaaaatgatcaaattgtgcttctaaaagcaggttctctagaggtggtgtttatcagaatgtgccgtgcctttgactctcagaacaacaccgtgtactttgatgggaagtatgccagccccgacgtcttcaaatccttaggttgtgaagactttattagctttgtgtttgaatttggaaagagtttatgttctatgcacctgactgaagatgaaattgcattattttctgcatttgtactgatgtcagcagatcgctcatggctgcaagaaaaggtaaaaattgaaaaactgcaacagaaaattcagctagctcttcaacacgtcctacagaagaatcaccgagaagatggaatactaacaaagttaatatgcaaggtgtctacattaagagccttatgtggacgacatacagaaaagctaatggcatttaaagcaatatacccagacattgtgcgacttcattttcctccattatacaaggagttgttcacttcagaatttgagccagcaatgcaaattgatgggtaaatgttatcacctaagcacttctagaatgtctgaagtacaaacatgaaaaacaaacaaaaaaattaaccgagacactttatatggccctgcacagacctggagcgccacacactgcacatcttttggtgatcggggtcaggcaaaggaggggaaacaatgaaaacaaataaagttgaacttgtttttctcatgcatatgatt

SEQ ID NO: 72241 - DNA, 1858 bp, Homo sapiens
tggtaccatagagttgctctgaaaacagaagatagagggagtctcggagctcgcatctccagcgatctctacattgggaaaaaacatggagtcagctccggcagcccccgaccccgccgccagcgagccaggcagcagcggcgcggacgcggccgccggctccagggagaccccgctgaaccaggaatccgcccgcaagagcgagccgcctgccccggtgcgcagacagagctattccagcaccagcagaggtatctcagtaacgaagaagacacatacatctcaaattgaaattattccatgcaagatctgtggagacaaatcatcaggaatccattatggtgtcattacatgtgaaggctgcaagggctttttcaggagaagtcagcaaagcaatgccacctactcctgtcctcgtcagaagaactgtttgattgatcgaaccagtagaaaccgctgccaacactgtcgattacagaaatgccttgccgtagggatgtctcgagatgctgtaaaatttggccgaatgtcaaaaaagcagagagacagcttgtatgcagaagtacagaaacaccggatgcagcagcagcagcgcgaccaccagcagcagcctggagaggctgagccgctgacgcccacctacaacatctcggccaacgggctgacggaacttcacgacgacctcagtaactacattgacgggcacacccctgaggggagtaaggcagactccgccgtcagcagcttctacctggacatacagccttccccagaccagtcaggtcttgatatcaatggaatcaaaccagaaccaatatgtgactacacaccagcatcaggcttctttccctactgttcgttcaccaacggcgagacttccccaactgtgtccatggcagaattagaacaccttgcacagaatatatctaaatcgcatctggaaacctgccaatacttgagagaagagctccagcagataacgtggcagacctttttacaggaagaaattgagaactatcaaaacaagcagcgggaggtgatgtggcaattgtgtgccatcaaaattacagaagctatacagtatgtggtggagtttgccaaacgcattgatggatttatggaactgtgtcaaaatgatcaaattgtgcttctaaaagcaggttctctagaggtggtgtttatcagaatgtgccgtgcctttgactctcagaacaacaccgtgtactttgatgggaagtatgccagccccgacgtcttcaaatccttaggttgtgaagactttattagctttgtgtttgaatttggaaagagtttatgttctatgcacctgactgaagatgaaattgcattattttctgcatttgtactgatgtcagcagatcgctcatggctgcaagaaaaggtaaaaattgaaaaactgcaacagaaaattcagctagctcttcaacacgtcctacagaagaatcaccgagaagatggaatactaacaaagttaatatgcaaggtgtctacattaagagccttatgtggacgacatacagaaaagctaatggcatttaaagcaatatacccagacattgtgcgacttcattttcctccattatacaaggagttgttcacttcagaatttgagccagcaatgcaaattgatgggtaaatgttatcacctaagcacttctagaatgtctgaagtacaaacatgaaaaacaaacaaaaaaattaaccgagacactttatatggccctgcacagacctggagcgccacacactgcacatcttttggtgatcggggtcaggcaaaggaggggaaacaatgaaaacaaataaagttgaacttgtttttctcatgcatatgatt

SEQ ID NO: 72242 - DNA, 1699 bp, Homo sapiens
tgtggctcgggcggcggcggcgcggcggcggcagagggggctccggggtcggaccatccgctctccctgcgctctccgcaccgcggcttaaatgatgtattttgtgatcgcagcgatgaaagctcaaattgaaattattccatgcaagatctgtggagacaaatcatcaggaatccattatggtgtcattacatgtgaaggctgcaagggctttttcaggagaagtcagcaaagcaatgccacctactcctgtcctcgtcagaagaactgtttgattgatcgaaccagtagaaaccgctgccaacactgtcgattacagaaatgccttgccgtagggatgtctcgagatgctgtaaaatttggccgaatgtcaaaaaagcagagagacagcttgtatgcagaagtacagaaacaccggatgcagcagcagcagcgcgaccaccagcagcagcctggagaggctgagccgctgacgcccacctacaacatctcggccaacgggctgacggaacttcacgacgacctcagtaactacattgacgggcacacccctgaggggagtaaggcagactccgccgtcagcagcttctacctggacatacagccttccccagaccagtcaggtcttgatatcaatggaatcaaaccagaaccaatatgtgactacacaccagcatcaggcttctttccctactgttcgttcaccaacggcgagacttccccaactgtgtccatggcagaattagaacaccttgcacagaatatatctaaatcgcatctggaaacctgccaatacttgagagaagagctccagcagataacgtggcagacctttttacaggaagaaattgagaactatcaaaacaagcagcgggaggtgatgtggcaattgtgtgccatcaaaattacagaagctatacagtatgtggtggagtttgccaaacgcattgatggatttatggaactgtgtcaaaatgatcaaattgtgcttctaaaagcaggttctctagaggtggtgtttatcagaatgtgccgtgcctttgactctcagaacaacaccgtgtactttgatgggaagtatgccagccccgacgtcttcaaatccttaggttgtgaagactttattagctttgtgtttgaatttggaaagagtttatgttctatgcacctgactgaagatgaaattgcattattttctgcatttgtactgatgtcagcagatcgctcatggctgcaagaaaaggtaaaaattgaaaaactgcaacagaaaattcagctagctcttcaacacgtcctacagaagaatcaccgagaagatggaatactaacaaagttaatatgcaaggtgtctacattaagagccttatgtggacgacatacagaaaagctaatggcatttaaagcaatatacccagacattgtgcgacttcattttcctccattatacaaggagttgttcacttcagaatttgagccagcaatgcaaattgatgggtaaatgttatcacctaagcacttctagaatgtctgaagtacaaacatgaaaaacaaacaaaaaaattaaccgagacactttatatggccctgcacagacctggagcgccacacactgcacatcttttggtgatcggggtcaggcaaaggaggggaaacaatgaaaacaaataaagttgaacttgtttttctcatgcatatgatt

SEQ ID NO: 72243 - DNA, 1245 bp, Homo sapiens
tggtaccatagagttgctctgaaaacagaagatagagggagtctcggagctcgcatctccagcgatctctacattgggaaaaaacatggagtcagctccggcagcccccgaccccgccgccagcgagccaggcagcagcggcgcggacgcggccgccggctccagggagaccccgctgaaccaggaatccgcccgcaagagcgagccgcctgccccggtgcgcagacagagctattccagcaccagcagaggtatctcagtaacgaagaagacacatacatctcaaattgaaattattccatgcaagatctgtggagacaaatcatcaggaatccattatggtgtcattacatgtgaaggctgcaagggctttttcaggagaagtcagcaaagcaatgccacctactcctgtcctcgtcagaagaactgtttgattgatcgaaccagtagaaaccgctgccaacactgtcgattacagaaatgccttgccgtagggatgtctcgagatgctgtaaaatttggccgaatgtcaaaaaagcagagagacagcttgtatgcagaagtacagaaacaccggatgcagcagcagcagcgcgaccaccagcagcagcctggagaggctgagccgctgacgcccacctacaacatctcggccaacgggctgacggaacttcacgacgacctcagtaactacattgacgggcacacccctgaggggagtaaggcagactccgccgtcagcagcttctacctggacatacagccttccccagaccagtcaggtcttgatatcaatggaatcaaaccagaaccaatatgtgactacacaccagcatcaggcttctttccctactgttcgttcaccaacggcgagacttccccaactgtgtccatggcagaattaggtaatggcatgcatgcttctcctgggatgctctattcatgccctttgaagtaaaaggggtatgtctgactttcctctaatgagttctgctaaatgatgcaattcacctttaccatttgggccacttaattttctgccctgcccccttgcttttgaccctctgctgtttcccatggtttatccaatacatgcattgacctctcagcattagaaatggggcaaaaccaacggaagcagtctttgaattctgcagaaaactgtaagttcaggaaatggctacattaacttcattagtggtttactttagttatattccaaggattgctttatacctaaggtga

SEQ ID NO: 72244 - DNA, 1132 bp, Homo sapiens
tggtaccatagagttgctctgaaaacagaagatagagggagtctcggagctcgcatctccagcgatctctacattgggaaaaaacatggagtcagctccggcagcccccgaccccgccgccagcgagccaggcagcagcggcgcggacgcggccgccggctccagggagaccccgctgaaccaggaatccgcccgcaagagcgagccgcctgccccggtgcgcagacagagctattccagcaccagcagaggtatctcagtaacgaagaagacacatacatctcaaattgaaattattccatgcaagatctgtggagacaaatcatcaggaatccattatggtgtcattacatgtgaaggctgcaagggctttttcaggagaagtcagcaaagcaatgccacctactcctgtcctcgtcagaagaactgtttgattgatcgaaccagtagaaaccgctgccaacactgtcgattacagaaatgccttgccgtagggatgtctcgagatgctgtaaaatttggccgaatgtcaaaaaagcagagagacagcttgtatgcagaagtacagaaacaccggatgcagcagcagcagcgcgaccaccagcagcagcctggagaggctgagccgctgacgcccacctacaacatctcggccaacgggctgacggaacttcacgacgacctcagtaactacattgacgggcacacccctgaggggagtaaggcagactccgccgtcagcagcttctacctggacatacagccttccccagaccagtcaggtcttgatatcaatggaatcaaaccagaaccaatatgtgactacacaccagcatcaggcttctttccctactgttcgttcaccaacggcgagacttccccaactgtgtccatggcagaattagaacaccttgcacagaatatatctaaatcgcatctggaaacctgccaatacttgagagaagagctccagcagataacgtggcagacctttttacaggaagaaattgagaactatcaaaacaagcagcgggaggtgatgtggcaattgtgtgccatcaaaattacagaagctatacagtatgtggtggagtttgccatcggccgcgggtgtaccggctcgattcgtatc

SEQ ID NO: 72245 - DNA, 1781 bp, Homo sapiens
ctggtaaccattcagtcatctatttcaacaccctgacatgacataaaggcaggcgtggaaccacacgttcaccacacagacacacacctccttgctggagcattcactaggcgaggcgctccatcggactcactagccgcactcatgaatcggcaccatctgcaggatcactttctggaaatagacaagaagaactgctgtgtgttccgagatgacttcattgtcaaggtgttgccgccggtgttggggctggagtttatcttcgggcttctgggcaatggccttgccctgtggattttctgtttccacctcaagtcctggaaatccagccggattttcctgttcaacctggcagtggctgactttctactgatcatctgcctgcccttcctgatggacaactatgtgaggcgttgggactggaagtttggggacatcccttgccggctgatgctcttcatgttggctatgaaccgccagggcagcatcatcttcctcacggtggtggcggtagacaggtatttccgggtggtccatccccaccacgccctgaacaagatctccaatcggacagcagccatcatctcttgccttctgtggggcatcactattggcctgacagtccacctcctgaagaagaagatgccgatccagaatggcggtgcaaatttgtgcagcagcttcagcatctgccataccttccagtggcacgaagccatgttcctcctggagttcttcctgcccctgggcatcatcctgttctgctcagccagaattatctggagcctgcggcagagacaaatggaccggcatgccaagatcaagagagccatcaccttcatcatggtggtggccatcgtctttgtcatctgcttccttcccagcgtggttgtgcggatccgcatcttctggctcctgcacacttcgggcacgcagaattgtgaagtgtaccgctcggtggacctggcgttctttatcactctcagcttcacctacatgaacagcatgctggaccccgtggtgtactacttctccagcccatcctttcccaacttcttctccactttgatcaaccgctgcctccagaggaagatgacaggtgagccagataataaccgcagcacgagcgtcgagctcacaggggaccccaacaaaaccagaggcgctccagaggcgttaatggccaactccggtgagccatggagcccctcttatctgggcccaacctctccttaaataaccatgccaagaagggacattgtcaccaagaaccaggatctctggagaaacagttgggctgttgcatcgagtaatgtcactggactcggcctaaggtttcctggaacttccagattcagagaatgcgatttagggaaacggtggcagatgagtgggagactggttgcaaggtgtgaccgcaggaatcctggaggaatagagagtaaagcttctaggcatctgaaacttttgcttcatctctgacgctcgcaggactgaagatgggcaaattgtaggcatttctgctgagcagagttggagccagagatctacttgtgacttgttggccttcttcccacatctgcctcagactggagggggctcagctcctggggtgatatctagcctgcttgtgagctctagcagggataaggagagctgagattggagggaattgtgttgctcctggagggagcccaggcatcattaaacaagccagtaggtcacctggcttccgtggaccaattcatctttcagaatccaaatcagggtccggagctcgc

SEQ ID NO: 72246 - DNA, 2143 bp, Homo sapiens
ctggtaaccattcagtcatctatttcaacaccctgacatgacataaaggcaggcgtggaaccacacgttcaccacacagacacacacctccttgctggagcattcactaggcgaggcgctccatcggactcactagccgcactcatgaatcggcaccatctgcaggatcactttctggaaatagacaagaagaactgctgtgtgttccgagatgacttcattgtcaaggtgttgccgccggtgttggggctggagtttatcttcgggcttctgggcaatggccttgccctgtggattttctgtttccacctcaagtcctggaaatccagccggattttcctgttcaacctggcagtggctgactttctactgatcatctgcctgcccttcctgatggacaactatgtgaggcgttgggactggaagtttggggacatcccttgccggctgatgctcttcatgttggctatgaaccgccagggcagcatcatcttcctcacggtggtggcggtagacaggtatttccgggtggtccatccccaccacgccctgaacaagatctccaatcggacagcagccatcatctcttgccttctgtggggcatcactattggcctgacagtccacctcctgaagaagaagatgccgatccagaatggcggtgcaaatttgtgcagcagcttcagcatctgccataccttccagtggcacgaagccatgttcctcctggagttcttcctgcccctgggcatcatcctgttctgctcagccagaattatctggagcctgcggcagagacaaatggaccggcatgccaagatcaagagagccatcaccttcatcatggtggtggccatcgtctttgtcatctgcttccttcccagcgtggttgtgcggatccgcatcttctggctcctgcacacttcgggcacgcagaattgtgaagtgtaccgctcggtggacctggcgttctttatcactctcagcttcacctacatgaacagcatgctggaccccgtggtgtactacttctccagcccatcctttcccaacttcttctccactttgatcaaccgctgcctccagaggaagatgacaggtgagccagataataaccgcagcacgagcgtcgagctcacaggggaccccaacaaaaccagaggcgctccagaggcgttaatggccaactccggtgagccatggagcccctcttatctgggcccaacctctccttaaataaccatgccaagaagggacattgtcaccaagaaccaggatctctggagaaacagttgggctgttgcatcgagtaatgtcactggactcggcctaaggtttcctggaacttccagattcagagaatgcgatttagggaaacggtggcagatgagtgggagactggttgcaaggtgtgaccgcaggaatcctggaggaatagagagtaaagcttctaggcatctgaaacttttgcttcatctctgacgctcgcaggactgaagatgggcaaattgtaggcatttctgctgagcagagttggagccagagatctacttgtgacttgttggccttcttcccacatctgcctcagactggagggggctcagctcctggggtgatatctagcctgcttgtgagctctagcagggataaggagagctgagattggagggaattgtgttgctcctggagggagcccaggcatcattaaacaagccagtaggtcacctggcttccgtggaccaattcatctttcagacaagctttagcagaaatggactcagggaagagactcacacgctttggttaatatctgtgtttccggtgggtgtaataggggattagccccagaagggactgagctaaacagtgttattatgggaaaggaaatggcattgctgctttcaaccagcgactaatgcaatccattcctctcttgtttatagtaatctaagggttgggcagttaaaacggcttcaggatagaaagctgtttcccacctctgtttgcttttaacattaaaagggaaatgtgcctctgccccacagttagaggggtgcacgttcctcctggttccttcgcttgtgtttctgtacttaccaaaaatctaccatttcaataaattttgataggagacaaaaaagcg

SEQ ID NO: 72247 - DNA, 2170 bp, Homo sapiens
ctggtaaccattcagtcatctatttcaacaccctgacatgacataaaggcaggcgtggaaccacacgttcaccacacagacacacacctccttgctggagcattcactaggcgaggcgctccatcggactcactagccgcactcatgaatcggcaccatctgcaggatcactttctggaaatagacaagaagaactgctgtgtgttccgagatgacttcattgtcaaggtgttgccgccggtgttggggctggagtttatcttcgggcttctgggcaatggccttgccctgtggattttctgtttccacctcaagtcctggaaatccagccggattttcctgttcaacctggcagtggctgactttctactgatcatctgcctgcccttcctgatggacaactatgtgaggcgttgggactggaagtttggggacatcccttgccggctgatgctcttcatgttggctatgaaccgccagggcagcatcatcttcctcacggtggtggcggtagacaggtatttccgggtggtccatccccaccacgccctgaacaagatctccaatcggacagcagccatcatctcttgccttctgtggggcatcactattggcctgacagtccacctcctgaagaagaagatgccgatccagaatggcggtgcaaatttgtgcagcagcttcagcatctgccataccttccagtggcacgaagccatgttcctcctggagttcttcctgcccctgggcatcatcctgttctgctcagccagaattatctggagcctgcggcagagacaaatggaccggcatgccaagatcaagagagccatcaccttcatcatggtggtggccatcgtctttgtcatctgcttccttcccagcgtggttgtgcggatccgcatcttctggctcctgcacacttcgggcacgcagaattgtgaagtgtaccgctcggtggacctggcgttctttatcactctcagcttcacctacatgaacagcatgctggaccccgtggtgtactacttctccagcccatcctttcccaacttcttctccactttgatcaaccgctgcctccagaggaagatgacaggtgagccagataataaccgcagcacgagcgtcgagctcacaggggaccccaacaaaaccagaggcgctccagaggcgttaatggccaactccggtgagccatggagcccctcttatctgggcccaacctctccttaaataaccatgccaagaagggacattgtcaccaagaaccaggatctctggagaaacagttgggctgttgcatcgagtaatgtcactggactcggcctaaggtttcctggaacttccagattcagagaatgcgatttagggaaacggtggcagatgagtgggagactggttgcaaggtgtgaccgcaggaatcctggaggaatagagagtaaagcttctaggcatctgaaacttttgcttcatctctgacgctcgcaggactgaagatgggcaaattgtaggcatttctgctgagcagagttggagccagagatctacttgtgacttgttggccttcttcccacatctgcctcagactggagggggctcagctcctggggtgatatctagcctgcttgtgagctctagcagggataaggagagctgagattggagggaattgtgttgctcctggagggagcccaggcatcattaaacaagccagtaggtcacctggcgtgcacagctggaccgattgatctggtcacggcaatgccacacgcagaaagagcgatctcatgaggaagacgactcgagaccgcgatccgggcaacatgcacgtgttatgcctgagtgggctctgaataaggggattagccccagaagggactgagctaaacagtgttattatgggaaaggaaatggcattgctgctttcaaccagcgactaatgcaatccattcctctcttgtttatagtaatctaagggttgggcagttaaaacggcttcaggatagaaagctgtttcccacctctgtttgcttttaacattaaaagggaaatgtgcctctgccccacagttagaggggtgcacgttcctcctggttccttcgcttgtgtttctgtacttaccaaaaatctaccatttcaataaattttgataggagacaaaaaagcg

SEQ ID NO: 72248 - DNA, 573 bp, Homo sapiens
caaagaacatacattgggaaaaggacgcccccttcaataaatggtgctgtgaaaactcgatattcctattcagaaggatgaaactagactcctgtgtctcaccatatacaaaatccactgaaaattgattaaagacttaaatctaaaacttgagactgtgaaactactggaagaaaacataggggaaacacttgaggacattggtctaggcaaagattttatagctaagatatcaaaagagtaggcaacaacaacaacaaaaaacagacaaatgggactatattaaactaaaaagcttctgcacagcaacgaaaacaacagaatgaagagacaacctgttaaaataggggaacatatttggaaactactcatctgacaagggactaatatccagaatatacaaggaactcaaacaactcaacagtaaaaaaaaaaaaaaaaaaatccgacatttcccaaaagacatacaaatagccaacaggtatataaaaatacgctcaatatcactaatcatagctcattagtgatgttgagcacttcaacattttacctcatttagaatgactgttacta

SEQ ID NO: 72249 - DNA, 851 bp, Homo sapiens
ctcctgccaaccagaatctttcccaacttgtctaagtcctctcaggccagccttggtgggaggtttctaggattcgctccctgcccttcccatcttagggtgtcgtctgagacagactcttattccctcaataaagagagagactcttattccctcagcggccagctcctcgcctcccctcggccgtagccacctcagtggtcaccgtcttcaccgtggtcgcctcagcccgctcgccaccccagttgaggcgctgctggtgtcatgtctgccacaggggaccgacacccgacccaaggggaccaggaggccccggtaagccaggagggagcacaggccgaggcggcggagctggtaaccaggagggcggcgactccggccccgacagcagcgacgtggtgcctgcggccgaggtggtcggagtcgcagggcccgtggaaggcctcggggaggaggagggtgagcaggcggcaggcctggccgcagtcccccggggcgggagcgccgaggaggactcagatatcgggcccgcgacggaggaagaggaggaggaagaggggaacgaggcggccaacttcgacttggcggtggtcgcccgtcgctacccggcgtcgggcattcacttcgtgctcctggacatggtccactcccttctccgccgcctctatcacaacgaccacatccagatagcgaaccgtcacctcagccgcctgatggtggggccccacgctgctgtgcccaacctctgggacaaccctcccctgctgctgctgtcccagaggctgggtgcaggggctgcagccccagaaggcgagggcctcggcctgatccaggaggctgcgtcggtccag

SEQ ID NO: 72250 - DNA, 473 bp, Homo sapiens
cgagatggggtagggatagggagtaactcctaatgggcctaaaggtttctttttggggtgatgaaactgttctaaaattacattgtggtgatggctgtacagctctctaaatatacttcaacccattgaatagtacatttaaaatcagtgaattttatggcatgtaaatgatttctcaataaagtcgttaaaaaatcccaactcagtaaaataactcaatagggtaataggtatgataaaattaacatggaaaaatcaaaagccttcataaatgtaaacaataatgagttagaaggtataaggaaggctggtccaaaggtccaactgagttatctcaattgacttttcagtcagttatagattaaactccttgttctagtctttctccacttgttactactgcgcttgactagtcttaaaaaaaaagagatataatcgaagagaaaaccccatttacaatagcaagaaaaaaa

SEQ ID NO: 72251 - DNA, 605 bp, Homo sapiens
cctcccaagtagctgggactacaggcgcccactaccactgccggctagttttttgtatttttagtagagacggggtttcactgtgttagccaggatggtctcgatctcctgacctcgtgatccgcccgcctcagcctcccaaagtgtcattttattctttattatctgtccctcccactcgaatgtaaggtccataactcaggaatttctgtcactgtttctgttttgtacactgatataaccaaacactgaaaacagtgcctgatgcagttgatactcaataaatatttgttgagtaaggaggcaagaaagaatagtcccagggcaaaggtatagaacttgcctttagagagagaaagagcatctctaattggtaacagtaaggagggaggaatggataagagcagatctaaatgattttaaaatttagcatttggagattgagagaattccttttaaatagcatgtgatggttagttttgtgtgtcaacttggctaggctatagtacccagttatttaatcaaaccctaatttgggtgttactgtgaaggcatttttataggtatgggtaacatgtacacttagttgactttaaataaaggag

SEQ ID NO: 72252 - DNA, 273 bp, Homo sapiens
ggttgcagtgagccgagattgcgccactacactccagtctgggtgacagagtgagactccatctcaaaaaaaaaaaaaaaaaatcagctcatgttactcccctgctcaaaaatctccagcagctttctactacacttaaaataaaaaaaagtcagatgcagctgagtgcagtggctcacacctgtaatcccagcactttgggagactgaggtgggaggatcgcttgagcctaggagttcaagaccagcctgggcaacatagcaaaactcccgt

SEQ ID NO: 72253 - DNA, 679 bp, Homo sapiens
  misc_feature (104)..(104): n is a, c, g, or t
  misc_feature (117)..(118): n is a, c, g, or t
agaacaaaaaagccagttaaacttattcctttttttaaatagcaatctggaatgaaaatatcagatgagcataatataagagttagaagtcaagagagatgganaaatgaaagcaanngtcaagttcttgtcttggggggacaagtttatgtaccaattagctcaaggctttggtaaaataaatgtttaaatatgtaaaattttaagggcaacaaaaaacaatgtaggacatccaaaccactaaagaagaagaatttaaaacataattaaattcaaaacaatccaaaaggaaagaatttatgaagaaaaaaataaatgtataataagatggaagtaataaacctaaatatttcaataatcaaaataataattaatggattaaatgccctaaagacactctcagattagaattttaaaaatccaagtaccaaataacttgtaagaaatacaccttcaaagttacccagaatgtaaggcattcaaaaaaaaaaggcaaatattaacccaaagaaataaagtatagcaatattaacagcaaatgaagtataattaaagcccaaaacccacaaacattaaacagagcaaaagaaaatatatttcagagtgttaaagatttagtccactaagaatttgttaacataaatgaaatttttatataaccaacaacacagcttttaac

SEQ ID NO: 72254 - DNA, 387 bp, Homo sapiens
tagagacagggttttgccatgttggctaggctggtctcgaactcctgacctcaggtgatttgccgcctcagcctcccaaagtgctgggatcacagacgtgagccaccgcacccagcctcagcttcttcatttaaatccactgattggaatcccaagcatctgcagagaaaagagaaaaagaagaaccacatttttttctgtgggtgtgttttttgatatccggggatcctgtaagaacccattgttaaattttcaagattttgaaattgctaagcacaataaatattaaatttatatacttaaataaattatattaaaatgtggcaataaatacttaaaacgtatcccttcctgattatgtcatgagattttactgttacctatgct

SEQ ID NO: 72255 - DNA, 403 bp, Homo sapiens
gcccagctaaatttttgtattttagtagagatggagtttcaccatgttgtccaggctggtctccaactccttacctcaggtgatccgcctgtctcagcctcccaaagtgctgggattacaggcatgagccaccgcgcccggccgagattccatctttaatgagaccatcctctaatcctccctctattacagtgattatcccaatctcttagaaatcctgaaataattagtctggggtcatcctggggcatttctattttttcacaagatcccctagtgattttaatgtgtagccagggtttagtacacccatctctttttaaattcaacagacataaggcacattattcaaatgttagctgaatattctggaaatccccagaagagagcctaaatttgtaca

SEQ ID NO: 72256 - DNA, 776 bp, Homo sapiens
  misc_feature (125)..(125): n is a, c, g, or t
  misc_feature (201)..(201): n is a, c, g, or t
  misc_feature (209)..(209): n is a, c, g, or t
  misc_feature (219)..(219): n is a, c, g, or t
agtacggatgtgagaggagctagaatcagactggatctctgccacttttcccttcctacctcttaacttgcaggaaacaatgtgtctcttccgacagtgtctccagtgttcacagaatcaactgnaagttttgtttgctcatctagatatactggtcttccattagttcctagtagcagcaatggggccaacagccctgcnctctgttnccctcccagnttagcttacagtgctacaggaccatgatttctggggttggattggtgctgccccaggacacactccagttgccgtaccagtggcacttctctgggttcttcacatggcaccatcatccagaatactcccccagataaagcaacttcgggagtagtgtttcagagaaggactcatgatttccaggagtcaaaagccctcagtccaccaacagaactatgccagttggtcttcatctccaagataaaagatgaggtcagggatgggcatggtgcataactctgagccctgagtgagagaactgaggcagctgcaacttcacaaggtcaaggcccgacctccgcccatccccaccagcccaaagacttgccacctcagtgcccgagcatcctctggtgacctccctcaccagcccaacttaatctcaccagtgaaaacagaggtgaggcgagagtacccagcctgaagatgcttcttctatcagcctgcagaaatgttacactttcccttcaggcatccattaataaaagaaattgccatgcttactgccaggaaaagga

SEQ ID NO: 72257 - DNA, 3984 bp, Homo sapiens
cgaaggtctgcagcttcactcctgagccagcaagaccacgaaccaaccagaaggaagaaactccgaacacatctgaacatcagaaggaacaaactccggacacgccgcctttaagaactgtaacactcaccgggagggtccgcagcttcattcttgaagtcagtgagacgaagaacccaccaattccggacacactgatttcacattcacaaaaatagaacttttacctcccgctgatcccactgacgcattctggtggcttcatgcatctggcagccttcagcaccaccatggcccccctctcagcatgagaatctcgtggaacagtgtcatagctgcaaagtggaattctatcctcaaatttcataggaaatagtcgaactgtacaatgaaagattatgcaaatcttcaaggagcatctaatcaatcaccgcggtgtgagcggaatgcagcccatcgctgaattagcttctgttggaatgtattcatgtgtaacatcccactgactggatgacatcacaacagctccaggtccttgaaagtcttgaggatgattagctgaaggaattggctgtttctgccaatcataatccggcaaagctgcctttatagttctggagatgtgagagagagggagggagggaaagaccgactacagctaaacaagaggcacagcagcactagcaacagcagagcaggagcagctggtattccggtgattaaatagttctcatagcctttttgctgtactcggtctgctccctggtgtaattctcgtgtccaagaaggaagctgcattttaacggtgtgctgaacagaggtttgaatcattccagctggctgcttgttttgaaaaggacaatgtgtgtataaataaaaggactctgctggaagagttcagacactaagactggagctagagagtgctcttggaatattgttgaggcagattgcatgaactgaaagctccttctaattaacctggagccaagtgaacctgaatactggatatctcatgttctaacacgggataaattcaagttagaaaaagacaaaatattgaaatgcttctctagattatgcttagaggattctgcagcaattctcagtattggacatattcaaaatctcctcaacgtatatccttcccatctattgccttccagctttaactcagttgtgctcccttcaaacattttacatgatttgcgatggttacatgaactctggggaagtgatatttgcaacatctcatactttattcactatggcactttaggaaacgaaattgggaaaaagcttccaaaacattattctaaaaaatgaatcttattgtgaaacttcggagaagttttcgaacattgattgttctcttagctaccttttgcttggtgagcattgtcatttctgcctattttctctactctggctacaaacaggaaatgacacttattgaaaccactgcagaagcagaatgcactgacatcaaaattctaccatataggtcaatggagctgaaaacagttaaacctattgacacatccaaaacggaccctactgtccttctcttcgtggagagccaatactctcaactcggtcaagatatcatagctattttggagtccagccgatttcagtaccacatggttattgcccctggaaagggagatatacctcctcttacagataatggcaaagggaaatatactttagttatttatgaaaatattctgaagtatgtcagcatggactcatggaatcgagagcttttagaaaaatactgtgtggaatacagtgttagtataatcggttttcataaagccaatgagaacagcttaccaagtacacaattaaaaggctttccgttaaaccttttcaataatctagctctaaaggactgttttgttaaccctcaatctcctttgctgcatattaccaaagcccccaaggttgagaaaggccctcttcctggggaagactggactattttccaatataatcattcaacctaccagcctgtacttttaactgagttacagacagaaaaatccctgtcatccttgtctagcaaaacactctttgcaacggtgattcaggatctggggcttcatgatggaattcagagagtactttttggcaacaacttgaacttttggctgcacaagctcatcttcatagatgccatctccttcttgtcagggaagaggctgacattgtccttggacaggtacatccttgtggacattgatgatatatttgttgggaaagagggaacaaggatgaatgtcaaagatgtgaaggcattactagagactcaaaatttactgcgcactcaggttgcaaattttaccttcaaccttggattttcagggaagttttaccacacagggactgaagaggaagatgaaggagatgaccttttacttcggtctgtggatgagttctggtggtttcctcacatgtggagccacatgcagccccacctcttccacaacgagtcatctttagtagagcagatgattctcaacaaggaatttgcactggaacatggaataccaatcaacatgggctatgctgtggccccacatcactcaggggtctacccggttcacattcagctgtatgcagcttggaagaaggtctggggtattcaagtcaccagcactgaagaatatccacatctgaaacctgcccggtacagaaagggcttcattcacaatagcatcatggtcctccctcgacagacttgtgggttgttcactcacactattttctacaaagaatatccaggaggaccccaagaactggataaaagtatcagaggaggtgaactttttctcacaatccttctaaacccaatcagcattttcatgacccatttatcaaactatggaaatgaccgcctagggttatatacctttgtgaacttggtcaactttgtgcagagctggaccaacctgaaattgcaaactctgcctccagtgcaactggcccaccagtattttgagctcttccctgagcagaaagaccctctatggcagaatccatgtgatgataaacgacacaaagacatctggtccagagagaaaacttgtgaccacttaccaaaatttctagtaattggtccacaaaaaacaggaacaactgcactttatttatttcttcttatgcatccttcaatcatcagcaatctccctagtccaaagacatttgaggaagttcagttctttaatggcaacaactatcacaaaggaatagactggtatatggactttttccctacaccatccaatactacaagtgactttctgtttgaaaagagtgctaattacttccattcggaagaagctccaagacgagccgcatctcttgtccccaaagccaagatcatcaccatcctcattgacccctcagacagggcatactcttggtaccagcaccaacgatcacatgaagatccagctgctctgaggttcaatttctatgaagttatttcaacaggacattgggctccatctgacttaaaaactttgcagagaagatgcctagtacctggatggtatgcagtccacatagaaagatggctaacttactttgctacttctcagttgctaattattgatggacagcagctgagatctgacccagctactgtgatggatgaagtccagaagtttctgggagttacacctcgttataattactctgaagcactaacgtttgatccccaaaagggtttttggtgtcaattactggaaggaggaaagacaaaatgccttggaaaaagcaaaggccgaaaatatccacctatggatccagagtctagaacgttcctctctaattactaccgagatcataatgtggaactatccaaactgctacacagactgggacagcctctgccatcgtggctgagacaggaactgcagaaagtgagatagcactggagacaagaactaagcctctcaagatacttttagtgct

SEQ ID NO: 72258 - DNA, 407 bp, Homo sapiens
cgaaggtctgcagcttcactcctgagccagcaagaccacgaaccaaccagaaggaagaaactccgaacacatctgaacatcagaaggaacaaactccggacacgccgcctttaagaactgtaacactcaccgggagggtccgcagcttcattcttgaagtcagtgagacgaagaacccaccaattccggacacactgatttcacattcacaaaaatagaacttttacctcccgctgatcccactgacgcattctggtggcttcatgcatctggcagccttcagcaccaccatggcccccctctcagcatgaggtatgtccttgactacaagtatccaagtactttccttatatcaacaactatcctgaatgctgaggtggaaagacaggtgggagttcagactgaaa

SEQ ID NO: 72259 - DNA, 1900 bp, Homo sapiens
cgaaggtctgcagcttcactcctgagccagcaagaccacgaaccaaccagaaggaagaaactccgaacacatctgaacatcagaaggaacaaactccggacacgccgcctttaagaactgtaacactcaccgggagggtccgcagcttcattcttgaagtcagtgagacgaagaacccaccaattccggacacactgatttcacattcacaaaaatagaacttttacctcccgctgatcccactgacgcattctggtggcttcatgcatctggcagccttcagcaccaccatggcccccctctcagcatgagaatctcgtggaacagtgtcatagctgcaaagtggaattctatcctcaaatttcataggaaatagtcgaactgtacaatgaaagattatgcaaatcttcaaggagcatctaatcaatcaccgcggtgtgagcggaatgcagcccatcgctgaattagcttctgttggaatgtattcatgtgtaacatcccactgactggatgacatcacaacagctccaggtccttgaaagtcttgaggatgattagctgaaggaattggctgtttctgccaatcataatccggcaaagctgcctttatagttctggagatgtgagagagagggagggagggaaagaccgactacagctaaacaagaggcacagcagcactagcaacagcagagcaggagcagctggtattccggtgattaaatagttctcatagcctttttgctgtactcggtctgctccctggtgtaattctcgtgtccaagaaggaagctgcattttaacggtgtgctgaacagaggtttgaatcattccagctggctgcttgttttgaaaaggacaatgtgtgtataaataaaaggactctgctggaagagttcagacactaagactggagctagagagtgctcttggaatattgttgaggcagattgcatgaactgaaagctccttctaattaacctggagccaagtgaacctgaatactggatatctcatgttctaacacgggataaattcaagttagaaaaagacaaaatattgaaatgcttctctaggcattactagagactcaaaatttactgcgcactcaggttgcaaattttaccttcaaccttggattttcagggaagttttaccacacagggactgaagaggaagatgaaggagatgaccttttacttcggtctgtggatgagttctggtggtttcctcacatgtggagccacatgcagccccacctcttccacaacgagtcatctttagtagagcagatgattctcaacaaggaatttgcactgagatgcggagaggagaaatgccgtggactgccatttccaaggagaaatcataagcctagacttgacactacagagagatgtagccctatgttcttggctacacttacccaaggaacatggaataccaatcaacatgggctatgctgtggccccacatcactcaggggtctacccggttcacattcagctgtatgcagcttggaagaaggtctggggtattcaagtcaccagcactgaagaatatccacatctgaaacctgcccggtacagaaagggcttcattcacaatagcatcatggtcctccctcgacagacttgtgggttgttcactcacactattttctacaaagaatatccaggaggaccccaagaactggataaaagtatcagaggaggtgaactttttctcacaatccttctaaacccagtatgtattctatgtatgcaccttacaataagattagcatttttaaatgtgttttattttcctgtcttttaaactaaatcatatttattttctttatttacagcacatcttactggtcatgcatttaaatctatattaaaatacttttcttgat

SEQ ID NO: 72260 - DNA, 10756 bp, Homo sapiens
  misc_feature (7485)..(7485): n is a, c, g, or t
  misc_feature (8249)..(8249): n is a, c, g, or t
gcggggggaggggaggggaggggagggggcgcggggccgcggcagcggagctcgcatcctcggcggggcggctgtgcaggaggcggcgcccgggcgtcagcggacggaccgatcgacggccaagggcgcgcggaccgacggcggctgcccggaggggatcgcgggcctcggagacagcgactgcggacgatgcgcggccccaggccccgcgcgagcgggcgctgcccggggggctgaccgcggccggacggcgccccagcaccgggcgagggagcccgcgtcgcgcggaggtcagggagcctgagctggagccagggccccagtgggacctgacccaaagtctgaggtcaagctgggcccagagcctggcctggagctggagcccaaggcacagctggactacccttgtcatgcagaaggagctgggcattgtgccttcctgccctggcatgaagagccccaggccccacctcctgctaccattgctgctgctgctgctgctgctgctgggggctggggtgccaggtgcctggggtcaggctgggagcctggacttgcagattgatgaggagcagccagcgggtacactgattggcgacatcagtgcggggcttccggcaggcacggcagctcctctcatgtacttcatctctgcccaagagggcagcggcgtgggcacagacctggccattgacgaacacagtggggtcgtccgtacagcccgtgtcttggaccgtgagcagcgggaccgctaccgcttcactgcagtcactcctgatggtgccaccgtagaagttacagtgcgagtggctgacatcaacgaccatgctccagccttcccacaggctcgggctgccctgcaggtacctgagcatacagcttttggcacccgctacccactggagcctgctcgtgatgcagatgctgggcgtctgggaacccagggctatgcgctatctggtgatggggctggagagaccttccggctggagacacgccccggtccagatgggactccagtacctgagctggtagttactggggaactggaccgagagaaccgctcacactatatgctacagctggaggcctatgatggtggttcacccccccggagggcccaggccctgctggacgtgacactgctggacatcaatgaccatgccccggctttcaatcagagccgctaccatgctgtggtgtctgagagcctggcccctggcagtcctgtcttgcaggtgttcgcatctgatgccgatgctggtgtcaatggggctgtgacttacgagatcaaccggaggcagagcgagggtgatggacccttctccatcgacgcacacacggggctgctgcagttagagcggccactggactttgagcagcggcgggtccatgaactggtggtgcaagcacgagatggtggggctcaccctgagctgggctcggcctttgtgactgtgcatgtgcgagatgccaatgacaatcagccctccatgactgtcatctttctcagtgcagatggctccccccaagtgtctgaggccgccccacctggacagctcgttgctcgcatctctgtgtcagacccagatgatggtgactttgcccatgtcaatgtgtccctggaaggtggagagggccactttgccctaagcacccaagacagcgtcatctatctggtgtgtgtggctcggcggctggatcgagaggagagggatgcctataacttgagggttacagccacagactcaggctcacctccactgcgggctgaggctgcctttgtgctgcacgtcactgatgtcaacgacaatgcacctgcctttgaccgccagctctaccgacctgagcccctgcctgaggttgcgctgcctggcagctttgtagtgcgggtgactgctcgggatcctgaccaaggcaccaatggtcaggtcacttatagcctagcccctggcgcccacacccactggttctccattgaccccacctcaggcattatcactacggctgcctcactggactatgagttggaacctcagccacagctgattgtggtggccacagatggtggcctgccccctctagcctcctctgccacagttagcgtggccctgcaagatgtgaatgataatgagccccaattccagaggactttctacaatgcctcactgcctgagggcacccagcctggaacttgcttcctgcaggtgacagccacagacgcggatagtggcccatttggcctcctctcctattccttgggtgctggacttgggtcctccggatctcccccattccgcattgatgcccatagcggtgatgtgtgcacaacccggaccctggaccgtgaccaggggccctcaagctttgacttcacagtgacagctgtggatgggggaggcctcaagtccatggtatatgtgaaggtgtttctgtcagacgagaatgacaaccctcctcagttttatccacgggagtatgctgccagtataagtgcccagagtccaccaggcacagctgtgctgaggttgcgtgcccatgaccctgaccagggatcccatgggcgactctcctaccatatcctggctggcaacagccccccactttttaccttggatgagcaatcagggctgttgacagtagcctggcccttggccagacgggccaattctgtggtgcagctggagatcggggctgaggacggaggtggcctacaggcagaacccagtgcccgagtggacatcagcattgtgcctggaacccccacaccacccatatttgagcaactacagtatgttttttctgtgccagaggatgtggcaccaggcaccagtgtgggcatagtccaggcacacaacccaccaggtcgcttggcacctgtgaccctttccctatcaggtggggatccccgaggactcttctccctagatgcggtatcaggactgttgcaaacacttcgccctctggaccgggagctactgggaccagtgttggagctggaggtgcgagcaggcagtggagtgcccccagctttcgctgtagctcgggtgcgtgtgctgctggatgatgtgaatgacaactcccctgcctttcctgcacctgaagacacggtattgctaccaccaaacactgccccagggactcccatctatacactgcgggctcttgaccccgactcaggtgttaacagtcgagtcacctttaccctgcttgctgggggtggtggagccttcaccgtggaccccaccacaggccatgtacggcttatgaggcctctggggccctcaggagggccagcccatgagctggagctggaggcccgggatgggggctccccaccacgcaccagccactttcgactacgggtggtggtacaggatgtgggaacccgtgggctggctccccgattcaacagccctacctaccgtgtggacctgccctcaggcaccactgctggaactcaggtcctgcaagtgcaggcccaagcaccagatgggggccctatcacctatcaccttgcagcagagggagcaagtagcccctttggcctggagccacagagtgggtggctatgggtgcgggcagcactagaccgtgaggcccaggaattgtacatactgaaggtaatggcagtgtctgggtccaaagctgagttggggcagcagacaggcacagccaccgtgagggtcagcatcctcaaccagaatgaacacagtccccgcttgtctgaggatcccaccttcctggctgtggctgagaaccagcccccagggaccagcgtgggccgagtctttgccactgaccgagactcaggacccaatggacgtctgacctacagcctgcaacagctgtctgaagacagcaaggccttccgcatccacccccagactggagaagtgaccacactccaaaccctggaccgtgagcagcagagcagctatcagctcctggtgcaggtgcaggatggagggagcccaccccgcagcaccacaggcactgtgcatgttgcagtgcttgacctcaacgacaacagccccacgttcctgcaggcttcaggagctgctggtgggggcctccctatacaggtaccagaccgcgtgcctccaggaacactggtgacgactctgcaggcgaaggatccagatgagggggagaatgggaccatcttgtacacgctaactggtcctggctcagagcttttctctctgcaccctcactcaggggagctgctcactgcagctcccctgatccgagcagagcggccccactatgtgctgacactgagtgctcatgaccaaggcagccctcctcgaagtgccagcctccagctgctggtgcaggtgcttccctcagctcgcttggccgagccgcccccagatctcgcagagcgggacccagcggcaccagtgcctgtcgtgctgacggtgacagcagctgagggactgcggcccggctctctgttgggctcggtggcagcgccagagcccgcgggtgtgggtgcactcacctacacactggtgggcggtgccgatcccgagggcaccttcgcgctggatgcggcctcagggcgcttgtacctggcgcggcccctggacttcgaagctggcccgccgtggcgcgcgctcacggtacgcgctgaggggccgggaggcgcgggcgcgcggctgctgcgagtgcaggtgcaagtgcaggacgagaatgagcatgcgcccgcctttgcgcgcgacccgctggcgctggcgctgccagagaacccggagcccggcgcagcgctgtacactttccgcgcgtcggacgccgacggccccggccccaatagcgacgtgcgctaccgcctgctgcgccaggagccgcccgtgccggcgcttcgcctggacgcgcgcaccggggcgctcagcgctccgcgcggcctggaccgagagaccactcccgcgctgctgctgctggtggaagccaccgaccggcccgccaacgccagccgccgtcgtgcagcgcgcgtttcagcgcgcgtcttcgtcacggatgagaatgacaacgcgcctgtcttcgcctcgccgtcacgcgtgcgcctcccagaggaccagccgcctgggcccgcggccctgcacgtggtagcccgggacccggatctgggcgaggctgcacgcgtgtcctatcggctggcatctggcggggacggccacttccggctgcactcaagcactggagcgctgtccgtggtgcggccgttggaccgcgaacaacgagctgagcacgtactgacagtggtggcctcagaccacggctccccgccgcgctcggccacgcaggtcctgaccgtcagtgtcgctgacgtcaacgacgaggcgcctactttccagcagcaggagtacagcgtcctcttgcgtgagaacaaccctcctggcacatctctgctcaccctgcgagcaaccgaccccgacgtgggggccaacgggcaagtgacttatggaggcgtctctagcgaaagcttttctctggatcctgacactggtgttctcacgactcttcgggccctggatcgagaggaacaggaggagatcaacctgacagtgtatgcccaggacaggggctcacctcctcagttaacgcatgtcactgttcgagtggctgtggaggatgagaatgaccatgcaccaacctttgggagtgcccatctctctctggaggtgcctgagggccaggacccccagacccttaccatgcttcgggcctctgatccagatgtgggagccaatgggcagttgcagtaccgcatcctagatggggacccatcaggagcctttgtcctagaccttgcttctggagagtttggcaccatgcggccactagacagagaagtggagccagctttccagctgaggatagaggcccgggatggaggccagccagctctcagtgccacgctgcttttgacagtgacagtgctggatgccaatgaccatgctccagcctttcctgtgcctgcctactcggtggaggtgccggaggatgtgcctgcagggaccctgctgctgcagctacaggctcatgaccctgatgctggagctaatggccatgtgacctactacctgggcgccggtacagcaggagccttcctgctggagcccagctctggagaactgcgcacagctgcagccttggacagagaacagtgtcccagctacaccttttctgtgagtgcagtggatggtgcagctgctgggcccctaagcaccacagtgtctgtcaccatcacggtgcgcgatgtcaatgaccatgcacccaccttccccaccagtcctctgcgcctacgtctgccccgcccaggccccagcttcagtaccccaaccctggctctggccacactgagagctgaagatcgtgatgctggtgccaatgcttccattctgtaccggctggcaggcacaccacctcctggcactactgtggactcttacactggtgaaatccgcgtggcccgctctcctgtagctctaggcccccgagatcgtgtcctcttcattgtggccactgatcttggccgtccagctcgctctgccactggtgtgatcattgttggactgcagggggaagctgagcgtggaccccgctttccccgggctagcagtgaggctacgattcgtgagaatgcgcccccagggactcctattgtctcccccagggccgtccatgcaggaggcacaaatggacccatcacctacagcattctcagtgggaatgagaaagggacattctccatccagcctagtacaggtgccatcacagttcgctcagcagaggggctagacttcgaggtgagtccacggctgcgactggtgctgcaggcagagagtggaggagcctttgccttcactgtgctgaccctgaccctgcaagatgccaacgacaatgctccccgtttcctgcggccccattatgtggccttccttcctgagtcccggcccttggaggggcccctgctgcaggtggaggcggatgacctggatcaaggctctggaggacagatttcctacagtctggctgcatcccagccggcacgtggattgttccacgtagacccaaccacaggcactatcactaccacagccatcctggaccgtgagatctgggctgaaacacggttggtgctgatggccacagacagagggagcccagccctggtgggctcagctaccttgacggtgatggtcatcgacaccaatgacaatcgccccaccatcccccaaccctgggagctccgagtgtcagaagatgcgttattgggctcagagattgcacaggtaacagggaatgatgtggactcaggacccgtgctgtggtatgtgctaagcccatctgggccccaggatcccttcagtgttggccgctatggaggccgtgtctccctcacggggcccctggactttgagcagtgtgaccgctaccagctgcagctgctggcacatgatgggcctcatgagggcngtgccaacctcacagtgcttgtggaggatgtcaatgacaatgcacctgccttctcacagagcctctaccaggtaatgctgcttgagcacacacccccaggcagtgccattctctccgtctctgccactgatcgggactcaggtgccaacggtcacatttcctaccacctggcttcccctgccgatggcttcagtgttgaccccaacaatgggaccctgttcacaatagtgggaacagtggccttgggccatgacgggtcaggagcagtggatgtggtgctggaagcacgagaccacggggctccaggccgggcagcacgagccacagtgcacgtgcagctgcaggaccagaacgaccacgccccgagcttcacattgtcacactaccgtgtggctgtgactgaagacctgccccctggctccactctgctcaccctggaggctacagatgctgatggaagccgcagccatgccgctgtggactacagcatcatcagtggcaactggggccgagtcttccagctggaacccaggctggctgaggctggggagagtgctggaccaggcccccgggcactgggctgcctggtgttgcttgaacctctagactttgaaagcctgacacagtacaatctaacagtggctgcagctgaccgtgggcagccaccccaaagctcagtcgtgccagtcactgtcactgtactagatgtcaatgacaacccacctgtctttacccgagcatcctaccgtgtgacagtacctgangacacacctgttggagctgagctgctgcatgtagaggcctctgacgctgaccctggccctcatggcctcgtgcgtttcactgtcagctcaggcgacccatcagggctctttgagctggatgagagctcaggcaccttgcgactggcccatgccctggactgtgagacccaggctcgacatcagcttgtagtacaggctgctgaccctgctggtgcacactttgctttggcaccagtgacaattgaggtccaggatgtgaatgatcatggcccagccttcccactgaacttactcagcaccagcgtggccgagaatcagcctccaggcactctcgtgaccactctgcatgcaatcgacggggatgctggggcttttgggaggctccgttacagcctgttggaggctgggccaggacctgagggccgtgaggcatttgcactgaacagctcaacaggggagttgcgtgcgcgagtgccctttgactatgagcacacagaaagcttccggctgctggtgggtgctgctgatgctgggaatctctcagcctctgtcactgtgtcggtgctagtgactggagaggatgagtatgaccctgtatttctggcaccagctttccacttccaagtgcccgaaggtgcccggcgtggccacagcttgggtcacgtgcaggccacagatgaggatgggggtgccgatggcctggttctgtattcccttgccacctcttccccctattttggtattaaccagactacaggagccctgtacctgcgggtggacagtcgggcaccaggcagcggaacagccacctctgggggtgggggccggacccggcgggaagcaccacgggagctgaggctggaggtgatagcacgggggcctctgcctggttcccggagtgccacagtgcctgtgaccgtggatatcacccacaccgcactgggcctggcacctgacctcaacctgctattagtaggggccgtggcagcctccttgggagttgtggtggtgcttgcactggcagccctggtcctaggacttgttcgggcccgtagccgcaaggctgaggcagcccctggcccaatgtcacaggcagcacccctagccagtgactcactgcagaaactgggccgggagccacctagtccaccaccctctgagcacctctatcaccagactcttcccagctatggtgggccaggagctggaggaccctacccccgtggtggctccttggacccttcacattcaagtggccgaggatcagcagaggctgcagaggatgatgagatccgcatgatcaatgagttcccccgtgtggccagtgtggcctcctctctggctgcccgtggccctgactcaggcatccagcaggatgcagatggtctgagtgacacatcctgcgaaccacctgcccctgacacctggtataagggccgaaaggcagggctgctgctgccaggtgcaggagccactctctacagagaggaggggcccccagccactgccacagccttcctggggggctgtggcctgagccctgcacccactggggactatggcttcccagcagatggcaagccatgtgtggcaggtgcgctgacagccattgtggccggcgaggaggagctccgtggcagctataactgggactacctgctgagctggtgccctcagttccaaccactggccagtgtcttcacagagatcgctcggctcaaggatgaagctcggccatgtcccccagctccccgtatcgacccaccacccctcatcactgccgtggcccacccaggagccaagtctgtgccccccaagccagcaaacacagctgcagcccgggccatcttcccaccagcttctcaccgctcccccatcagccatgaaggctccctgtcctcagctgccatgtcccccagcttctcaccctctctgtctcctctggctgctcgctcacccgttgtctcaccatttggggtggcccagggtccctcagcctcagcactcagcgcagagtctggcctggagccacctgatgacacggagctgcacatctagctgtggcccaggctgggccccgacctgggatgcgcacagtgtccccaacgcaggccccactctgagcctgccctgggcagcctcggactatgactggctacggggaggccaccaccaggccccagctctccaccctgaactccccagccccctcagagtactaggaccacagaagccctgttgctcactgacctgtgaccaggtccaatgtggggagaaatatgaaggaggtagcagccctgggttctcctcagtgagggatccctgccctgcaccagcaccctgagatggagctgagactttatttattgggggtagggggatggaggaggtccctccaacatgtttggacccagctcctttgggttccactgacacccctgcccctgcccctgcccagaaccaagtgccatttctcactctggagccttaataaactgcaatttgta

SEQ ID NO: 72261 - DNA, 10777 bp, Homo sapiens
  misc_feature (7364)..(7364): n is a, c, g, or t
  misc_feature (8128)..(8128): n is a, c, g, or t
gcggggggaggggaggggaggggagggggcgcggggccgcggcagcggagctcgcatcctcggcggggcggctgtgcaggaggcggcgcccgggcgtcagcggacggaccgatcgacggccaagggcgcgcggaccgacggcggctgcccggaggggatcgcgggcctcggagacagcgactgcggacgatgcgcggccccaggccccgcgcgagcgggcgctgcccggggggctgaccgcggccggacggcgccccagcaccgggcgagggagcccgcgtcgcgcggaggtcagggagcctgagctggagccagggccccagtgggacctgacccaaagtctgaggtcaagctgggcccagagcctggcctggagctggagcccaaggcacagctggactacccttgtcatgcagaaggagctgggcattgtgccttcctgccctggcatgaagagccccaggccccacctcctgctaccattgctgctgctgctgctgctgctgctgggggctggggtgccaggtgcctggggtcaggctgggagcctggacttgcagattgatgaggagcagccagcgggtacactgattggcgacatcagtgcggggcttccggcaggcacggcagctcctctcatgtacttcatctctgcccaagagggcagcggcgtgggcacagacctggccattgacgaacacagtggggtcgtccgtacagcccgtgtcttggaccgtgagcagcgggaccgctaccgcttcactgcagtcactcctgatggtgccaccgtagaagttacagtgcgagtggctgacatcaacgaccatgctccagccttcccacaggctcgggctgccctgcaggtacctgagcatacagcttttggcacccgctacccactggagcctgctcgtgatgcagatgctgggcgtctgggaacccagggctatgcgctatctggtgatggggctggagagaccttccggctggagacacgccccggtccagatgggactccagtacctgagctggtagttactggggaactggaccgagagaaccgctcacactatatgctacagctggaggcctatgatggtggttcacccccccggagggcccaggccctgctggacgtgacactgctggacatcaatgaccatgccccggctttcaatcagagccgctaccatgctgtggtgtctgagagcctggcccctggcagtcctgtcttgcaggtgttcgcatctgatgccgatgctggtgtcaatggggctgtgacttacgagatcaaccggaggcagagcgagggtgatggacccttctccatcgacgcacacacggggctgctgcagttagagcggccactggactttgagcagcggcgggtccatgaactggtggtgcaagcacgagatggtggggctcaccctgagctgggctcggcctttgtgactgtgcatgtgcgagatgccaatgacaatcagccctccatgactgtcatctttctcagtgcagatggctccccccaagtgtctgaggccgccccacctggacagctcgttgctcgcatctctgtgtcagacccagatgatggtgactttgcccatgtcaatgtgtccctggaaggtggagagggccactttgccctaagcacccaagacagcgtcatctatctggtgtgtgtggctcggcggctggatcgagaggagagggatgcctataacttgagggttacagccacagactcaggctcacctccactgcgggctgaggctgcctttgtgctgcacgtcactgatgtcaacgacaatgcacctgcctttgaccgccagctctaccgacctgagcccctgcctgaggttgcgctgcctggcagctttgtagtgcgggtgactgctcgggatcctgaccaaggcaccaatggtcaggtcacttatagcctagcccctggcgcccacacccactggttctccattgaccccacctcaggcattatcactacggctgcctcactggactatgagttggaacctcagccacagctgattgtggtggccacagatggtggcctgccccctctagcctcctctgccacagttagcgtggccctgcaagatgtgaatgataatgagccccaattccagaggactttctacaatgcctcactgcctgagggcacccagcctggaacttgcttcctgcaggtgacagccacagacgcggatagtggcccatttggcctcctctcctattccttgggtgctggacttgggtcctccggatctcccccattccgcattgatgcccatagcggtgatgtgtgcacaacccggaccctggaccgtgaccaggggccctcaagctttgacttcacagtgacagctgtggatgggggaggcctcaagtccatggtatatgtgaaggtgtttctgtcagacgagaatgacaaccctcctcagttttatccacgggagtatgctgccagtataagtgcccagagtccaccaggcacagctgtgctgaggttgcgtgcccatgaccctgaccagggatcccatgggcgactctcctaccatatcctggctggcaacagccccccactttttaccttggatgagcaatcagggctgttgacagtagcctggcccttggccagacgggccaattctgtggtgcagctggagatcggggctgaggacggaggtggcctacaggcagaacccagtgcccgagtggacatcagcattgtgcctggaacccccacaccacccatatttgagcaactacagtatgttttttctgtgccagaggatgtggcaccaggcaccagtgtgggcatagtccaggcacacaacccaccaggtcgcttggcacctgtgaccctttccctatcaggtggggatccccgaggactcttctccctagatgcggtatcaggactgttgcaaacacttcgccctctggaccgggagctactgggaccagtgttggagctggaggtgcgagcaggcagtggagtgcccccagctttcgctgtagctcgggtgcgtgtgctgctggatgatgtgaatgacaactcccctgcctttcctgcacctgaagacacggtattgctaccaccaaacactgccccagggactcccatctatacactgcgggctcttgaccccgactcaggtgttaacagtcgagtcacctttaccctgcttgctgggggtggtggagccttcaccgtggaccccaccacaggccatgtacggcttatgaggccttggctccccgattcaacagccctacctaccgtgtggacctgccctcaggcaccactgctggaactcaggtcctgcaagtgcaggcccaagcaccagatgggggccctatcacctatcaccttgcagcagagggagcaagtagcccctttggcctggagccacagagtgggtggctatgggtgcgggcagcactagaccgtgaggcccaggaattgtacatactgaaggtaatggcagtgtctgggtccaaagctgagttggggcagcagacaggcacagccaccgtgagggtcagcatcctcaaccagaatgaacacagtccccgcttgtctgaggatcccaccttcctggctgtggctgagaaccagcccccagggaccagcgtgggccgagtctttgccactgaccgagactcaggacccaatggacgtctgacctacagcctgcaacagctgtctgaagacagcaaggccttccgcatccacccccagactggagaagtgaccacactccaaaccctggaccgtgagcagcagagcagctatcagctcctggtgcaggtgcaggatggagggagcccaccccgcagcaccacaggcactgtgcatgttgcagtgcttgacctcaacgacaacagccccacgttcctgcaggcttcaggagctgctggtgggggcctccctatacaggtaccagaccgcgtgcctccaggaacactggtgacgactctgcaggcgaaggatccagatgagggggagaatgggaccatcttgtacacgctaactggtcctggctcagagcttttctctctgcaccctcactcaggggagctgctcactgcagctcccctgatccgagcagagcggccccactatgtgctgacactgagtgctcatgaccaaggcagccctcctcgaagtgccagcctccagctgctggtgcaggtgcttccctcagctcgcttggccgagccgcccccagatctcgcagagcgggacccagcggcaccagtgcctgtcgtgctgacggtgacagcagctgagggactgcggcccggctctctgttgggctcggtggcagcgccagagcccgcgggtgtgggtgcactcacctacacactggtgggcggtgccgatcccgagggcaccttcgcgctggatgcggcctcagggcgcttgtacctggcgcggcccctggacttcgaagctggcccgccgtggcgcgcgctcacggtacgcgctgaggggccgggaggcgcgggcgcgcggctgctgcgagtgcaggtgcaagtgcaggacgagaatgagcatgcgcccgcctttgcgcgcgacccgctggcgctggcgctgccagagaacccggagcccggcgcagcgctgtacactttccgcgcgtcggacgccgacggccccggccccaatagcgacgtgcgctaccgcctgctgcgccaggagccgcccgtgccggcgcttcgcctggacgcgcgcaccggggcgctcagcgctccgcgcggcctggaccgagagaccactcccgcgctgctgctgctggtggaagccaccgaccggcccgccaacgccagccgccgtcgtgcagcgcgcgtttcagcgcgcgtcttcgtcacggatgagaatgacaacgcgcctgtcttcgcctcgccgtcacgcgtgcgcctcccagaggaccagccgcctgggcccgcggccctgcacgtggtagcccgggacccggatctgggcgaggctgcacgcgtgtcctatcggctggcatctggcggggacggccacttccggctgcactcaagcactggagcgctgtccgtggtgcggccgttggaccgcgaacaacgagctgagcacgtactgacagtggtggcctcagaccacggctccccgccgcgctcggccacgcaggtcctgaccgtcagtgtcgctgacgtcaacgacgaggcgcctactttccagcagcaggagtacagcgtcctcttgcgtgagaacaaccctcctggcacatctctgctcaccctgcgagcaaccgaccccgacgtgggggccaacgggcaagtgacttatggaggcgtctctagcgaaagcttttctctggatcctgacactggtgttctcacgactcttcgggccctggatcgagaggaacaggaggagatcaacctgacagtgtatgcccaggacaggggctcacctcctcagttaacgcatgtcactgttcgagtggctgtggaggatgagaatgaccatgcaccaacctttgggagtgcccatctctctctggaggtgcctgagggccaggacccccagacccttaccatgcttcgggcctctgatccagatgtgggagccaatgggcagttgcagtaccgcatcctagatggggacccatcaggagcctttgtcctagaccttgcttctggagagtttggcaccatgcggccactagacagagaagtggagccagctttccagctgaggatagaggcccgggatggaggccagccagctctcagtgccacgctgcttttgacagtgacagtgctggatgccaatgaccatgctccagcctttcctgtgcctgcctactcggtggaggtgccggaggatgtgcctgcagggaccctgctgctgcagctacaggctcatgaccctgatgctggagctaatggccatgtgacctactacctgggcgccggtacagcaggagccttcctgctggagcccagctctggagaactgcgcacagctgcagccttggacagagaacagtgtcccagctacaccttttctgtgagtgcagtggatggtgcagctgctgggcccctaagcaccacagtgtctgtcaccatcacggtgcgcgatgtcaatgaccatgcacccaccttccccaccagtcctctgcgcctacgtctgccccgcccaggccccagcttcagtaccccaaccctggctctggccacactgagagctgaagatcgtgatgctggtgccaatgcttccattctgtaccggctggcaggcacaccacctcctggcactactgtggactcttacactggtgaaatccgcgtggcccgctctcctgtagctctaggcccccgagatcgtgtcctcttcattgtggccactgatcttggccgtccagctcgctctgccactggtgtgatcattgttggactgcagggggaagctgagcgtggaccccgctttccccgggctagcagtgaggctacgattcgtgagaatgcgcccccagggactcctattgtctcccccagggccgtccatgcaggaggcacaaatggacccatcacctacagcattctcagtgggaatgagaaagggacattctccatccagcctagtacaggtgccatcacagttcgctcagcagaggggctagacttcgaggtgagtccacggctgcgactggtgctgcaggcagagagtggaggagcctttgccttcactgtgctgaccctgaccctgcaagatgccaacgacaatgctccccgtttcctgcggccccattatgtggccttccttcctgagtcccggcccttggaggggcccctgctgcaggtggaggcggatgacctggatcaaggctctggaggacagatttcctacagtctggctgcatcccagccggcacgtggattgttccacgtagacccaaccacaggcactatcactaccacagccatcctggaccgtgagatctgggctgaaacacggttggtgctgatggccacagacagagggagcccagccctggtgggctcagctaccttgacggtgatggtcatcgacaccaatgacaatcgccccaccatcccccaaccctgggagctccgagtgtcagaagatgcgttattgggctcagagattgcacaggtaacagggaatgatgtggactcaggacccgtgctgtggtatgtgctaagcccatctgggccccaggatcccttcagtgttggccgctatggaggccgtgtctccctcacggggcccctggactttgagcagtgtgaccgctaccagctgcagctgctggcacatgatgggcctcatgagggcngtgccaacctcacagtgcttgtggaggatgtcaatgacaatgcacctgccttctcacagagcctctaccaggtaatgctgcttgagcacacacccccaggcagtgccattctctccgtctctgccactgatcgggactcaggtgccaacggtcacatttcctaccacctggcttcccctgccgatggcttcagtgttgaccccaacaatgggaccctgttcacaatagtgggaacagtggccttgggccatgacgggtcaggagcagtggatgtggtgctggaagcacgagaccacggggctccaggccgggcagcacgagccacagtgcacgtgcagctgcaggaccagaacgaccacgccccgagcttcacattgtcacactaccgtgtggctgtgactgaagacctgccccctggctccactctgctcaccctggaggctacagatgctgatggaagccgcagccatgccgctgtggactacagcatcatcagtggcaactggggccgagtcttccagctggaacccaggctggctgaggctggggagagtgctggaccaggcccccgggcactgggctgcctggtgttgcttgaacctctagactttgaaagcctgacacagtacaatctaacagtggctgcagctgaccgtgggcagccaccccaaagctcagtcgtgccagtcactgtcactgtactagatgtcaatgacaacccacctgtctttacccgagcatcctaccgtgtgacagtacctgangacacacctgttggagctgagctgctgcatgtagaggcctctgacgctgaccctggccctcatggcctcgtgcgtttcactgtcagctcaggcgacccatcagggctctttgagctggatgagagctcaggcaccttgcgactggcccatgccctggactgtgagacccaggctcgacatcagcttgtagtacaggctgctgaccctgctggtgcacactttgctttggcaccagtgacaattgaggtccaggatgtgaatgatcatggcccagccttcccactgaacttactcagcaccagcgtggccgagaatcagcctccaggcactctcgtgaccactctgcatgcaatcgacggggatgctggggcttttgggaggctccgttacagcctgttggaggctgggccaggacctgagggccgtgaggcatttgcactgaacagctcaacaggggagttgcgtgcgcgagtgccctttgactatgagcacacagaaagcttccggctgctggtgggtgctgctgatgctgggaatctctcagcctctgtcactgtgtcggtgctagtgactggagaggatgagtatgaccctgtatttctggcaccagctttccacttccaagtgcccgaaggtgcccggcgtggccacagcttgggtcacgtgcaggccacagatgaggatgggggtgccgatggcctggttctgtattcccttgccacctcttccccctattttggtattaaccagactacaggagccctgtacctgcgggtggacagtcgggcaccaggcagcggaacagccacctctgggggtgggggccggacccggcgggaagcaccacgggagctgaggctggaggtgatagcacgggggcctctgcctggttcccggagtgccacagtgcctgtgaccgtggatatcacccacaccgcactgggcctggcacctgacctcaacctgctattagtaggggccgtggcagcctccttgggagttgtggtggtgcttgcactggcagccctggtcctaggacttgttcgggcccgtagccgcaaggctgaggcagcccctggcccaatgtcacaggcagcacccctagccagtgactcactgcagaaactgggccgggagccacctagtccaccaccctctgagcacctctatcaccagactcttcccagctatggtgggccaggagctggaggaccctacccccgtggtggctccttggacccttcacattcaagtggccgaggatcagcagaggctgcagaggatgatgagatccgcatgatcaatgagttcccccgtgtggccagtgtggcctcctctctggctgcccgtggccctgactcaggcatccagcaggatgcagatggtctgagtgacacatcctgcgaaccacctgcccctgacacctggtataagggccgaaaggcagggctgctgctgccaggtgcaggagccactctctacagagaggaggggcccccagccactgccacagccttcctggggggctgtggcctgagccctgcacccactggggactatggcttcccagcagatggcaagccatgtgtggcaggtgcgctgacagccattgtggccggcgaggaggagctccgtggcagctataactgggactacctgctgagctggtgccctcagttccaaccactggccagtgtcttcacagagatcgctcggctcaaggatgaagcgtggcccacccaggagccaagtctgtgccccccaagccagcaaacacagctgcagcccgggccatcttcccaccagcttctcaccgctcccccatcagccatgaaggctccctgtcctcagctgccatgtcccccagcttctcaccctctctgtctcctctggctgctcgctcacccgttgtctcaccatttggggtggcccagggtccctcagcctcagcactcagcgcagagtctggcctggagccacctgatgacacggagctgcacatctagctgtggcccaggctgggccccgacctgggatgcgcacagtgtccccaacgcaggccccactctgagcctgccctgggcagcctcggactatgactggctacggggaggccaccaccaggccccagctctccaccctgaactccccagccccctcagagtactaggaccacagaagccctgttgctcactgacctgtgaccaggtccaatgtggggagaaatatgaaggaggtagcagccctgggttctcctcagtgagggatccctgccctgcaccagcaccctgagatggagctgagactttatttattgggggtagggggatggaggaggtccctccaacatgtttggacccagctcctttgggttccactgacacccctgcccctgcccctgcccagaaccaagtgccatttctcactctggagccttaataaactgcaatttgtatccagtctccagctttgttctatagggatgactggaagacacctggcagagtattgtggatacctcaggaggcacagaggggtggtggggtggggatggcactgggagctcaggagcctagcctgaggctgatgatcacatctctctgcagctattcttttccctctaatatgggcaaagaggccagcagggcc

SEQ ID NO: 72262 - DNA, 10538 bp, Homo sapiens
  misc_feature (7364)..(7364): n is a, c, g, or t
  misc_feature (8128)..(8128): n is a, c, g, or t
gcggggggaggggaggggaggggagggggcgcggggccgcggcagcggagctcgcatcctcggcggggcggctgtgcaggaggcggcgcccgggcgtcagcggacggaccgatcgacggccaagggcgcgcggaccgacggcggctgcccggaggggatcgcgggcctcggagacagcgactgcggacgatgcgcggccccaggccccgcgcgagcgggcgctgcccggggggctgaccgcggccggacggcgccccagcaccgggcgagggagcccgcgtcgcgcggaggtcagggagcctgagctggagccagggccccagtgggacctgacccaaagtctgaggtcaagctgggcccagagcctggcctggagctggagcccaaggcacagctggactacccttgtcatgcagaaggagctgggcattgtgccttcctgccctggcatgaagagccccaggccccacctcctgctaccattgctgctgctgctgctgctgctgctgggggctggggtgccaggtgcctggggtcaggctgggagcctggacttgcagattgatgaggagcagccagcgggtacactgattggcgacatcagtgcggggcttccggcaggcacggcagctcctctcatgtacttcatctctgcccaagagggcagcggcgtgggcacagacctggccattgacgaacacagtggggtcgtccgtacagcccgtgtcttggaccgtgagcagcgggaccgctaccgcttcactgcagtcactcctgatggtgccaccgtagaagttacagtgcgagtggctgacatcaacgaccatgctccagccttcccacaggctcgggctgccctgcaggtacctgagcatacagcttttggcacccgctacccactggagcctgctcgtgatgcagatgctgggcgtctgggaacccagggctatgcgctatctggtgatggggctggagagaccttccggctggagacacgccccggtccagatgggactccagtacctgagctggtagttactggggaactggaccgagagaaccgctcacactatatgctacagctggaggcctatgatggtggttcacccccccggagggcccaggccctgctggacgtgacactgctggacatcaatgaccatgccccggctttcaatcagagccgctaccatgctgtggtgtctgagagcctggcccctggcagtcctgtcttgcaggtgttcgcatctgatgccgatgctggtgtcaatggggctgtgacttacgagatcaaccggaggcagagcgagggtgatggacccttctccatcgacgcacacacggggctgctgcagttagagcggccactggactttgagcagcggcgggtccatgaactggtggtgcaagcacgagatggtggggctcaccctgagctgggctcggcctttgtgactgtgcatgtgcgagatgccaatgacaatcagccctccatgactgtcatctttctcagtgcagatggctccccccaagtgtctgaggccgccccacctggacagctcgttgctcgcatctctgtgtcagacccagatgatggtgactttgcccatgtcaatgtgtccctggaaggtggagagggccactttgccctaagcacccaagacagcgtcatctatctggtgtgtgtggctcggcggctggatcgagaggagagggatgcctataacttgagggttacagccacagactcaggctcacctccactgcgggctgaggctgcctttgtgctgcacgtcactgatgtcaacgacaatgcacctgcctttgaccgccagctctaccgacctgagcccctgcctgaggttgcgctgcctggcagctttgtagtgcgggtgactgctcgggatcctgaccaaggcaccaatggtcaggtcacttatagcctagcccctggcgcccacacccactggttctccattgaccccacctcaggcattatcactacggctgcctcactggactatgagttggaacctcagccacagctgattgtggtggccacagatggtggcctgccccctctagcctcctctgccacagttagcgtggccctgcaagatgtgaatgataatgagccccaattccagaggactttctacaatgcctcactgcctgagggcacccagcctggaacttgcttcctgcaggtgacagccacagacgcggatagtggcccatttggcctcctctcctattccttgggtgctggacttgggtcctccggatctcccccattccgcattgatgcccatagcggtgatgtgtgcacaacccggaccctggaccgtgaccaggggccctcaagctttgacttcacagtgacagctgtggatgggggaggcctcaagtccatggtatatgtgaaggtgtttctgtcagacgagaatgacaaccctcctcagttttatccacgggagtatgctgccagtataagtgcccagagtccaccaggcacagctgtgctgaggttgcgtgcccatgaccctgaccagggatcccatgggcgactctcctaccatatcctggctggcaacagccccccactttttaccttggatgagcaatcagggctgttgacagtagcctggcccttggccagacgggccaattctgtggtgcagctggagatcggggctgaggacggaggtggcctacaggcagaacccagtgcccgagtggacatcagcattgtgcctggaacccccacaccacccatatttgagcaactacagtatgttttttctgtgccagaggatgtggcaccaggcaccagtgtgggcatagtccaggcacacaacccaccaggtcgcttggcacctgtgaccctttccctatcaggtggggatccccgaggactcttctccctagatgcggtatcaggactgttgcaaacacttcgccctctggaccgggagctactgggaccagtgttggagctggaggtgcgagcaggcagtggagtgcccccagctttcgctgtagctcgggtgcgtgtgctgctggatgatgtgaatgacaactcccctgcctttcctgcacctgaagacacggtattgctaccaccaaacactgccccagggactcccatctatacactgcgggctcttgaccccgactcaggtgttaacagtcgagtcacctttaccctgcttgctgggggtggtggagccttcaccgtggaccccaccacaggccatgtacggcttatgaggccttggctccccgattcaacagccctacctaccgtgtggacctgccctcaggcaccactgctggaactcaggtcctgcaagtgcaggcccaagcaccagatgggggccctatcacctatcaccttgcagcagagggagcaagtagcccctttggcctggagccacagagtgggtggctatgggtgcgggcagcactagaccgtgaggcccaggaattgtacatactgaaggtaatggcagtgtctgggtccaaagctgagttggggcagcagacaggcacagccaccgtgagggtcagcatcctcaaccagaatgaacacagtccccgcttgtctgaggatcccaccttcctggctgtggctgagaaccagcccccagggaccagcgtgggccgagtctttgccactgaccgagactcaggacccaatggacgtctgacctacagcctgcaacagctgtctgaagacagcaaggccttccgcatccacccccagactggagaagtgaccacactccaaaccctggaccgtgagcagcagagcagctatcagctcctggtgcaggtgcaggatggagggagcccaccccgcagcaccacaggcactgtgcatgttgcagtgcttgacctcaacgacaacagccccacgttcctgcaggcttcaggagctgctggtgggggcctccctatacaggtaccagaccgcgtgcctccaggaacactggtgacgactctgcaggcgaaggatccagatgagggggagaatgggaccatcttgtacacgctaactggtcctggctcagagcttttctctctgcaccctcactcaggggagctgctcactgcagctcccctgatccgagcagagcggccccactatgtgctgacactgagtgctcatgaccaaggcagccctcctcgaagtgccagcctccagctgctggtgcaggtgcttccctcagctcgcttggccgagccgcccccagatctcgcagagcgggacccagcggcaccagtgcctgtcgtgctgacggtgacagcagctgagggactgcggcccggctctctgttgggctcggtggcagcgccagagcccgcgggtgtgggtgcactcacctacacactggtgggcggtgccgatcccgagggcaccttcgcgctggatgcggcctcagggcgcttgtacctggcgcggcccctggacttcgaagctggcccgccgtggcgcgcgctcacggtacgcgctgaggggccgggaggcgcgggcgcgcggctgctgcgagtgcaggtgcaagtgcaggacgagaatgagcatgcgcccgcctttgcgcgcgacccgctggcgctggcgctgccagagaacccggagcccggcgcagcgctgtacactttccgcgcgtcggacgccgacggccccggccccaatagcgacgtgcgctaccgcctgctgcgccaggagccgcccgtgccggcgcttcgcctggacgcgcgcaccggggcgctcagcgctccgcgcggcctggaccgagagaccactcccgcgctgctgctgctggtggaagccaccgaccggcccgccaacgccagccgccgtcgtgcagcgcgcgtttcagcgcgcgtcttcgtcacggatgagaatgacaacgcgcctgtcttcgcctcgccgtcacgcgtgcgcctcccagaggaccagccgcctgggcccgcggccctgcacgtggtagcccgggacccggatctgggcgaggctgcacgcgtgtcctatcggctggcatctggcggggacggccacttccggctgcactcaagcactggagcgctgtccgtggtgcggccgttggaccgcgaacaacgagctgagcacgtactgacagtggtggcctcagaccacggctccccgccgcgctcggccacgcaggtcctgaccgtcagtgtcgctgacgtcaacgacgaggcgcctactttccagcagcaggagtacagcgtcctcttgcgtgagaacaaccctcctggcacatctctgctcaccctgcgagcaaccgaccccgacgtgggggccaacgggcaagtgacttatggaggcgtctctagcgaaagcttttctctggatcctgacactggtgttctcacgactcttcgggccctggatcgagaggaacaggaggagatcaacctgacagtgtatgcccaggacaggggctcacctcctcagttaacgcatgtcactgttcgagtggctgtggaggatgagaatgaccatgcaccaacctttgggagtgcccatctctctctggaggtgcctgagggccaggacccccagacccttaccatgcttcgggcctctgatccagatgtgggagccaatgggcagttgcagtaccgcatcctagatggggacccatcaggagcctttgtcctagaccttgcttctggagagtttggcaccatgcggccactagacagagaagtggagccagctttccagctgaggatagaggcccgggatggaggccagccagctctcagtgccacgctgcttttgacagtgacagtgctggatgccaatgaccatgctccagcctttcctgtgcctgcctactcggtggaggtgccggaggatgtgcctgcagggaccctgctgctgcagctacaggctcatgaccctgatgctggagctaatggccatgtgacctactacctgggcgccggtacagcaggagccttcctgctggagcccagctctggagaactgcgcacagctgcagccttggacagagaacagtgtcccagctacaccttttctgtgagtgcagtggatggtgcagctgctgggcccctaagcaccacagtgtctgtcaccatcacggtgcgcgatgtcaatgaccatgcacccaccttccccaccagtcctctgcgcctacgtctgccccgcccaggccccagcttcagtaccccaaccctggctctggccacactgagagctgaagatcgtgatgctggtgccaatgcttccattctgtaccggctggcaggcacaccacctcctggcactactgtggactcttacactggtgaaatccgcgtggcccgctctcctgtagctctaggcccccgagatcgtgtcctcttcattgtggccactgatcttggccgtccagctcgctctgccactggtgtgatcattgttggactgcagggggaagctgagcgtggaccccgctttccccgggctagcagtgaggctacgattcgtgagaatgcgcccccagggactcctattgtctcccccagggccgtccatgcaggaggcacaaatggacccatcacctacagcattctcagtgggaatgagaaagggacattctccatccagcctagtacaggtgccatcacagttcgctcagcagaggggctagacttcgaggtgagtccacggctgcgactggtgctgcaggcagagagtggaggagcctttgccttcactgtgctgaccctgaccctgcaagatgccaacgacaatgctccccgtttcctgcggccccattatgtggccttccttcctgagtcccggcccttggaggggcccctgctgcaggtggaggcggatgacctggatcaaggctctggaggacagatttcctacagtctggctgcatcccagccggcacgtggattgttccacgtagacccaaccacaggcactatcactaccacagccatcctggaccgtgagatctgggctgaaacacggttggtgctgatggccacagacagagggagcccagccctggtgggctcagctaccttgacggtgatggtcatcgacaccaatgacaatcgccccaccatcccccaaccctgggagctccgagtgtcagaagatgcgttattgggctcagagattgcacaggtaacagggaatgatgtggactcaggacccgtgctgtggtatgtgctaagcccatctgggccccaggatcccttcagtgttggccgctatggaggccgtgtctccctcacggggcccctggactttgagcagtgtgaccgctaccagctgcagctgctggcacatgatgggcctcatgagggcngtgccaacctcacagtgcttgtggaggatgtcaatgacaatgcacctgccttctcacagagcctctaccaggtaatgctgcttgagcacacacccccaggcagtgccattctctccgtctctgccactgatcgggactcaggtgccaacggtcacatttcctaccacctggcttcccctgccgatggcttcagtgttgaccccaacaatgggaccctgttcacaatagtgggaacagtggccttgggccatgacgggtcaggagcagtggatgtggtgctggaagcacgagaccacggggctccaggccgggcagcacgagccacagtgcacgtgcagctgcaggaccagaacgaccacgccccgagcttcacattgtcacactaccgtgtggctgtgactgaagacctgccccctggctccactctgctcaccctggaggctacagatgctgatggaagccgcagccatgccgctgtggactacagcatcatcagtggcaactggggccgagtcttccagctggaacccaggctggctgaggctggggagagtgctggaccaggcccccgggcactgggctgcctggtgttgcttgaacctctagactttgaaagcctgacacagtacaatctaacagtggctgcagctgaccgtgggcagccaccccaaagctcagtcgtgccagtcactgtcactgtactagatgtcaatgacaacccacctgtctttacccgagcatcctaccgtgtgacagtacctgangacacacctgttggagctgagctgctgcatgtagaggcctctgacgctgaccctggccctcatggcctcgtgcgtttcactgtcagctcaggcgacccatcagggctctttgagctggatgagagctcaggcaccttgcgactggcccatgccctggactgtgagacccaggctcgacatcagcttgtagtacaggctgctgaccctgctggtgcacactttgctttggcaccagtgacaattgaggtccaggatgtgaatgatcatggcccagccttcccactgaacttactcagcaccagcgtggccgagaatcagcctccaggcactctcgtgaccactctgcatgcaatcgacggggatgctggggcttttgggaggctccgttacagcctgttggaggctgggccaggacctgagggccgtgaggcatttgcactgaacagctcaacaggggagttgcgtgcgcgagtgccctttgactatgagcacacagaaagcttccggctgctggtgggtgctgctgatgctgggaatctctcagcctctgtcactgtgtcggtgctagtgactggagaggatgagtatgaccctgtatttctggcaccagctttccacttccaagtgcccgaaggtgcccggcgtggccacagcttgggtcacgtgcaggccacagatgaggatgggggtgccgatggcctggttctgtattcccttgccacctcttccccctattttggtattaaccagactacaggagccctgtacctgcgggtggacagtcgggcaccaggcagcggaacagccacctctgggggtgggggccggacccggcgggaagcaccacgggagctgaggctggaggtgatagcacgggggcctctgcctggttcccggagtgccacagtgcctgtgaccgtggatatcacccacaccgcactgggcctggcacctgacctcaacctgctattagtaggggccgtggcagcctccttgggagttgtggtggtgcttgcactggcagccctggtcctaggacttgttcgggcccgtagccgcaaggctgaggcagcccctggcccaatgtcacaggcagcacccctagccagtgactcactgcagaaactgggccgggagccacctagtccaccaccctctgagcacctctatcaccagactcttcccagctatggtgggccaggagctggaggaccctacccccgtggtggctccttggacccttcacattcaagtggccgaggatcagcagaggctgcagaggatgatgagatccgcatgatcaatgagttcccccgtgtggccagtgtggcctcctctctggctgcccgtggccctgactcaggcatccagcaggatgcagatggtctgagtgacacatcctgcgaaccacctgcccctgacacctggtataagggccgaaaggcagggctgctgctgccaggtgcaggagccactctctacagagaggaggggcccccagccactgccacagccttcctggggggctgtggcctgagccctgcacccactggggactatggcttcccagcagatggcaagccatgtgtggcaggtgcgctgacagccattgtggccggcgaggaggagctccgtggcagctataactgggactacctgctgagctggtgccctcagttccaaccactggccagtgtcttcacagagatcgctcggctcaaggatgaagctcggccatgtcccccagctccccgtatcgacccaccacccctcatcactgccgtggcccacccaggagccaagtctgtgccccccaagccagcaaacacagctgcagcccgggccatcttcccaccagcttctcaccgctcccccatcagccatgaaggctccctgtcctcagctgccatgtcccccagcttctcaccctctctgtctcctctggctgctcgctcacccgttgtctcaccatttggggtggcccagggtccctcagcctcagcactcagcgcagagtctggcctggagccacctgatgacacggagctgcacatctagctgtggcccaggctgggccccgacctgggatgcgcacagtgtccccaacgcaggccccactctgagcctgccctgggcagcctcggactatgactggctacggggaggccaccaccaggccccagctctccaccctgaactccccagccccctcagagtactaggaccacagaagccctgttgctcactgacctgtgaccaggtccaatgtggggagaaatatgaaggaggtagcagccctgggttctcctcagtgagggatccctgccctgcaccagcaccctgagatggagctgagactttatttattgggtccaaacatgttggagggaccgtcgacgcggccgcgaat

SEQ ID NO: 72263 - DNA, 8648 bp, Homo sapiens
  misc_feature (7364)..(7364): n is a, c, g, or t
  misc_feature (8128)..(8128): n is a, c, g, or t
gcggggggaggggaggggaggggagggggcgcggggccgcggcagcggagctcgcatcctcggcggggcggctgtgcaggaggcggcgcccgggcgtcagcggacggaccgatcgacggccaagggcgcgcggaccgacggcggctgcccggaggggatcgcgggcctcggagacagcgactgcggacgatgcgcggccccaggccccgcgcgagcgggcgctgcccggggggctgaccgcggccggacggcgccccagcaccgggcgagggagcccgcgtcgcgcggaggtcagggagcctgagctggagccagggccccagtgggacctgacccaaagtctgaggtcaagctgggcccagagcctggcctggagctggagcccaaggcacagctggactacccttgtcatgcagaaggagctgggcattgtgccttcctgccctggcatgaagagccccaggccccacctcctgctaccattgctgctgctgctgctgctgctgctgggggctggggtgccaggtgcctggggtcaggctgggagcctggacttgcagattgatgaggagcagccagcgggtacactgattggcgacatcagtgcggggcttccggcaggcacggcagctcctctcatgtacttcatctctgcccaagagggcagcggcgtgggcacagacctggccattgacgaacacagtggggtcgtccgtacagcccgtgtcttggaccgtgagcagcgggaccgctaccgcttcactgcagtcactcctgatggtgccaccgtagaagttacagtgcgagtggctgacatcaacgaccatgctccagccttcccacaggctcgggctgccctgcaggtacctgagcatacagcttttggcacccgctacccactggagcctgctcgtgatgcagatgctgggcgtctgggaacccagggctatgcgctatctggtgatggggctggagagaccttccggctggagacacgccccggtccagatgggactccagtacctgagctggtagttactggggaactggaccgagagaaccgctcacactatatgctacagctggaggcctatgatggtggttcacccccccggagggcccaggccctgctggacgtgacactgctggacatcaatgaccatgccccggctttcaatcagagccgctaccatgctgtggtgtctgagagcctggcccctggcagtcctgtcttgcaggtgttcgcatctgatgccgatgctggtgtcaatggggctgtgacttacgagatcaaccggaggcagagcgagggtgatggacccttctccatcgacgcacacacggggctgctgcagttagagcggccactggactttgagcagcggcgggtccatgaactggtggtgcaagcacgagatggtggggctcaccctgagctgggctcggcctttgtgactgtgcatgtgcgagatgccaatgacaatcagccctccatgactgtcatctttctcagtgcagatggctccccccaagtgtctgaggccgccccacctggacagctcgttgctcgcatctctgtgtcagacccagatgatggtgactttgcccatgtcaatgtgtccctggaaggtggagagggccactttgccctaagcacccaagacagcgtcatctatctggtgtgtgtggctcggcggctggatcgagaggagagggatgcctataacttgagggttacagccacagactcaggctcacctccactgcgggctgaggctgcctttgtgctgcacgtcactgatgtcaacgacaatgcacctgcctttgaccgccagctctaccgacctgagcccctgcctgaggttgcgctgcctggcagctttgtagtgcgggtgactgctcgggatcctgaccaaggcaccaatggtcaggtcacttatagcctagcccctggcgcccacacccactggttctccattgaccccacctcaggcattatcactacggctgcctcactggactatgagttggaacctcagccacagctgattgtggtggccacagatggtggcctgccccctctagcctcctctgccacagttagcgtggccctgcaagatgtgaatgataatgagccccaattccagaggactttctacaatgcctcactgcctgagggcacccagcctggaacttgcttcctgcaggtgacagccacagacgcggatagtggcccatttggcctcctctcctattccttgggtgctggacttgggtcctccggatctcccccattccgcattgatgcccatagcggtgatgtgtgcacaacccggaccctggaccgtgaccaggggccctcaagctttgacttcacagtgacagctgtggatgggggaggcctcaagtccatggtatatgtgaaggtgtttctgtcagacgagaatgacaaccctcctcagttttatccacgggagtatgctgccagtataagtgcccagagtccaccaggcacagctgtgctgaggttgcgtgcccatgaccctgaccagggatcccatgggcgactctcctaccatatcctggctggcaacagccccccactttttaccttggatgagcaatcagggctgttgacagtagcctggcccttggccagacgggccaattctgtggtgcagctggagatcggggctgaggacggaggtggcctacaggcagaacccagtgcccgagtggacatcagcattgtgcctggaacccccacaccacccatatttgagcaactacagtatgttttttctgtgccagaggatgtggcaccaggcaccagtgtgggcatagtccaggcacacaacccaccaggtcgcttggcacctgtgaccctttccctatcaggtggggatccccgaggactcttctccctagatgcggtatcaggactgttgcaaacacttcgccctctggaccgggagctactgggaccagtgttggagctggaggtgcgagcaggcagtggagtgcccccagctttcgctgtagctcgggtgcgtgtgctgctggatgatgtgaatgacaactcccctgcctttcctgcacctgaagacacggtattgctaccaccaaacactgccccagggactcccatctatacactgcgggctcttgaccccgactcaggtgttaacagtcgagtcacctttaccctgcttgctgggggtggtggagccttcaccgtggaccccaccacaggccatgtacggcttatgaggccttggctccccgattcaacagccctacctaccgtgtggacctgccctcaggcaccactgctggaactcaggtcctgcaagtgcaggcccaagcaccagatgggggccctatcacctatcaccttgcagcagagggagcaagtagcccctttggcctggagccacagagtgggtggctatgggtgcgggcagcactagaccgtgaggcccaggaattgtacatactgaaggtaatggcagtgtctgggtccaaagctgagttggggcagcagacaggcacagccaccgtgagggtcagcatcctcaaccagaatgaacacagtccccgcttgtctgaggatcccaccttcctggctgtggctgagaaccagcccccagggaccagcgtgggccgagtctttgccactgaccgagactcaggacccaatggacgtctgacctacagcctgcaacagctgtctgaagacagcaaggccttccgcatccacccccagactggagaagtgaccacactccaaaccctggaccgtgagcagcagagcagctatcagctcctggtgcaggtgcaggatggagggagcccaccccgcagcaccacaggcactgtgcatgttgcagtgcttgacctcaacgacaacagccccacgttcctgcaggcttcaggagctgctggtgggggcctccctatacaggtaccagaccgcgtgcctccaggaacactggtgacgactctgcaggcgaaggatccagatgagggggagaatgggaccatcttgtacacgctaactggtcctggctcagagcttttctctctgcaccctcactcaggggagctgctcactgcagctcccctgatccgagcagagcggccccactatgtgctgacactgagtgctcatgaccaaggcagccctcctcgaagtgccagcctccagctgctggtgcaggtgcttccctcagctcgcttggccgagccgcccccagatctcgcagagcgggacccagcggcaccagtgcctgtcgtgctgacggtgacagcagctgagggactgcggcccggctctctgttgggctcggtggcagcgccagagcccgcgggtgtgggtgcactcacctacacactggtgggcggtgccgatcccgagggcaccttcgcgctggatgcggcctcagggcgcttgtacctggcgcggcccctggacttcgaagctggcccgccgtggcgcgcgctcacggtacgcgctgaggggccgggaggcgcgggcgcgcggctgctgcgagtgcaggtgcaagtgcaggacgagaatgagcatgcgcccgcctttgcgcgcgacccgctggcgctggcgctgccagagaacccggagcccggcgcagcgctgtacactttccgcgcgtcggacgccgacggccccggccccaatagcgacgtgcgctaccgcctgctgcgccaggagccgcccgtgccggcgcttcgcctggacgcgcgcaccggggcgctcagcgctccgcgcggcctggaccgagagaccactcccgcgctgctgctgctggtggaagccaccgaccggcccgccaacgccagccgccgtcgtgcagcgcgcgtttcagcgcgcgtcttcgtcacggatgagaatgacaacgcgcctgtcttcgcctcgccgtcacgcgtgcgcctcccagaggaccagccgcctgggcccgcggccctgcacgtggtagcccgggacccggatctgggcgaggctgcacgcgtgtcctatcggctggcatctggcggggacggccacttccggctgcactcaagcactggagcgctgtccgtggtgcggccgttggaccgcgaacaacgagctgagcacgtactgacagtggtggcctcagaccacggctccccgccgcgctcggccacgcaggtcctgaccgtcagtgtcgctgacgtcaacgacgaggcgcctactttccagcagcaggagtacagcgtcctcttgcgtgagaacaaccctcctggcacatctctgctcaccctgcgagcaaccgaccccgacgtgggggccaacgggcaagtgacttatggaggcgtctctagcgaaagcttttctctggatcctgacactggtgttctcacgactcttcgggccctggatcgagaggaacaggaggagatcaacctgacagtgtatgcccaggacaggggctcacctcctcagttaacgcatgtcactgttcgagtggctgtggaggatgagaatgaccatgcaccaacctttgggagtgcccatctctctctggaggtgcctgagggccaggacccccagacccttaccatgcttcgggcctctgatccagatgtgggagccaatgggcagttgcagtaccgcatcctagatggggacccatcaggagcctttgtcctagaccttgcttctggagagtttggcaccatgcggccactagacagagaagtggagccagctttccagctgaggatagaggcccgggatggaggccagccagctctcagtgccacgctgcttttgacagtgacagtgctggatgccaatgaccatgctccagcctttcctgtgcctgcctactcggtggaggtgccggaggatgtgcctgcagggaccctgctgctgcagctacaggctcatgaccctgatgctggagctaatggccatgtgacctactacctgggcgccggtacagcaggagccttcctgctggagcccagctctggagaactgcgcacagctgcagccttggacagagaacagtgtcccagctacaccttttctgtgagtgcagtggatggtgcagctgctgggcccctaagcaccacagtgtctgtcaccatcacggtgcgcgatgtcaatgaccatgcacccaccttccccaccagtcctctgcgcctacgtctgccccgcccaggccccagcttcagtaccccaaccctggctctggccacactgagagctgaagatcgtgatgctggtgccaatgcttccattctgtaccggctggcaggcacaccacctcctggcactactgtggactcttacactggtgaaatccgcgtggcccgctctcctgtagctctaggcccccgagatcgtgtcctcttcattgtggccactgatcttggccgtccagctcgctctgccactggtgtgatcattgttggactgcagggggaagctgagcgtggaccccgctttccccgggctagcagtgaggctacgattcgtgagaatgcgcccccagggactcctattgtctcccccagggccgtccatgcaggaggcacaaatggacccatcacctacagcattctcagtgggaatgagaaagggacattctccatccagcctagtacaggtgccatcacagttcgctcagcagaggggctagacttcgaggtgagtccacggctgcgactggtgctgcaggcagagagtggaggagcctttgccttcactgtgctgaccctgaccctgcaagatgccaacgacaatgctccccgtttcctgcggccccattatgtggccttccttcctgagtcccggcccttggaggggcccctgctgcaggtggaggcggatgacctggatcaaggctctggaggacagatttcctacagtctggctgcatcccagccggcacgtggattgttccacgtagacccaaccacaggcactatcactaccacagccatcctggaccgtgagatctgggctgaaacacggttggtgctgatggccacagacagagggagcccagccctggtgggctcagctaccttgacggtgatggtcatcgacaccaatgacaatcgccccaccatcccccaaccctgggagctccgagtgtcagaagatgcgttattgggctcagagattgcacaggtaacagggaatgatgtggactcaggacccgtgctgtggtatgtgctaagcccatctgggccccaggatcccttcagtgttggccgctatggaggccgtgtctccctcacggggcccctggactttgagcagtgtgaccgctaccagctgcagctgctggcacatgatgggcctcatgagggcngtgccaacctcacagtgcttgtggaggatgtcaatgacaatgcacctgccttctcacagagcctctaccaggtaatgctgcttgagcacacacccccaggcagtgccattctctccgtctctgccactgatcgggactcaggtgccaacggtcacatttcctaccacctggcttcccctgccgatggcttcagtgttgaccccaacaatgggaccctgttcacaatagtgggaacagtggccttgggccatgacgggtcaggagcagtggatgtggtgctggaagcacgagaccacggggctccaggccgggcagcacgagccacagtgcacgtgcagctgcaggaccagaacgaccacgccccgagcttcacattgtcacactaccgtgtggctgtgactgaagacctgccccctggctccactctgctcaccctggaggctacagatgctgatggaagccgcagccatgccgctgtggactacagcatcatcagtggcaactggggccgagtcttccagctggaacccaggctggctgaggctggggagagtgctggaccaggcccccgggcactgggctgcctggtgttgcttgaacctctagactttgaaagcctgacacagtacaatctaacagtggctgcagctgaccgtgggcagccaccccaaagctcagtcgtgccagtcactgtcactgtactagatgtcaatgacaacccacctgtctttacccgagcatcctaccgtgtgacagtacctgangacacacctgttggagctgagctgctgcatgtagaggcctctgacgctgaccctggccctcatggcctcgtgcgtttcactgtcagctcaggcgacccatcagggctctttgagctggatgagagctcaggcaccttgcgactggcccatgccctggactgtgagacccaggctcgacatcagcttgtagtacaggctgctgaccctgctggtgcacactttgctttggcaccagtgacaattgaggtccaggatgtgaatgatcatggcccagccttcccactgaacttactcagcaccagcgtggccgagaatcagcctccaggcactctcgtgaccactctgcatgcaatcgacggggatgctggggcttttgggaggctccgttacagcctgttggaggctgggccaggacctgagggccgtgaggcatttgcactgaacagctcaacaggggagttgcgtgcgcgagtgccctttgactatgagcacacattatggagggatcctcaatcaccca

SEQ ID NO: 72264 - DNA, 893 bp, Homo sapiens
  misc_feature (847)..(847): n is a, c, g, or t
  misc_feature (850)..(850): n is a, c, g, or t
  misc_feature (853)..(853): n is a, c, g, or t
  misc_feature (860)..(860): n is a, c, g, or t
  misc_feature (863)..(863): n is a, c, g, or t
gctccatccagcctagtacaggtgccatcacagttcgctcagcagaggggctagacttcgaggtgagtccacggctgcgactggtgctgcaggcagagagtggaggagcctttgccttcactgtgctgaccctgaccctgcaagatgctggggcttttgggaggctccgttacagcctgttggaggctgggccaggacctgagggccgtgaggcatttgcactgaacagctcaacaggggagttgcgtgcgcgagtgccctttgactatgagcacacagaaagcttccggctgctggtgggtgctgctgatgctgggaatctctcagcctctgtcactgtgtcggtgctagtgactggagaggatgagtatgaccctgtatttctggcaccagctttccacttccaagtgcccgaaggtgcccggcgtggccacagcttgggtcacgtgcaggccacagatgaggatgggggtgccgatggcctggttctgtattcccttgccacctcttccccctattttggtattaaccagactacaggagccctgtacctgcgggtggacagtcgggcaccaggcagcggaacagccacctctgggggtgggggccggacccggcgggaagcaccacgggagctgaggctggaggtgatagcacgggggcctctgcctggttcccggagtgccacagtgcctgtgaccgtggatatcacccacaccgcactgggcctggcacctgacctcaacctgctattagtaggggccgtggcagcctccttgggagttgtggtggtgcttgcactggcagccctggtcctaggacttgttcgggcccgtagcgaggttgnggnccnggccatngtnaggggccttgctgtggttcttgggaatttg

SEQ ID NO: 72265 - DNA, 2432 bp, Homo sapiens
gctccatccagcctagtacaggtgccatcacagttcgctcagcagaggggctagacttcgaggtgagtccacggctgcgactggtgctgcaggcagagagtggaggagcctttgccttcactgtgctgaccctgaccctgcaagatgctggggcttttgggaggctccgttacagcctgttggaggctgggccaggacctgagggccgtgaggcatttgcactgaacagctcaacaggggagttgcgtgcgcgagtgccctttgactatgagcacacagaaagcttccggctgctggtgggtgctgctgatgctgggaatctctcagcctctgtcactgtgtcggtgctagtgactggagaggatgagtatgaccctgtatttctggcaccagctttccacttccaagtgcccgaaggtgcccggcgtggccacagcttgggtcacgtgcaggccacagatgaggatgggggtgccgatggcctggttctgtattcccttgccacctcttccccctattttggtattaaccagactacaggagccctgtacctgcgggtggacagtcgggcaccaggcagcggaacagccacctctgggggtgggggccggacccggcgggaagcaccacgggagctgaggctggaggtgatagcacgggggcctctgcctggttcccggagtgccacagtgcctgtgaccgtggatatcacccacaccgcactgggcctggcacctgacctcaacctgctattagtaggggccgtggcagcctccttgggagttgtggtggtgcttgcactggcagccctggtcctaggacttgttcgggcccgtagccgcaaggctgaggcagcccctggcccaatgtcacaggcagcacccctagccagtgactcactgcagaaactgggccgggagccacctagtccaccaccctctgagcacctctatcaccagactcttcccagctatggtgggccaggagctggaggaccctacccccgtggtggctccttggacccttcacattcaagtggccgaggatcagcagaggctgcagaggatgatgagatccgcatgatcaatgagttcccccgtgtggccagtgtggcctcctctctggctgcccgtggccctgactcaggcatccagcaggatgcagatggtctgagtgacacatcctgcgaaccacctgcccctgacacctggtataagggccgaaaggcagggctgctgctgccaggtgcaggagccactctctacagagaggaggggcccccagccactgccacagccttcctggggggctgtggcctgagccctgcacccactggggactatggcttcccagcagatggcaagccatgtgtggcaggtgcgctgacagccattgtggccggcgaggaggagctccgtggcagctataactgggactacctgctgagctggtgccctcagttccaaccactggccagtgtcttcacagagatcgctcggctcaaggatgaagcgtggcccacccaggagccaagtctgtgccccccaagccagcaaacacagctgcagcccgggccatcttcccaccagcttctcaccgctcccccatcagccatgaaggctccctgtcctcagctgccatgtcccccagcttctcaccctctctgtctcctctggctgctcgctcacccgttgtctcaccatttggggtggcccagggtccctcagcctcagcactcagcgcagagtctggcctggagccacctgatgacacggagctgcacatctagctgtggcccaggctgggccccgacctgggatgcgcacagtgtccccaacgcaggccccactctgagcctgccctgggcagcctcggactatgactggctacggggaggccaccaccaggccccagctctccaccctgaactccccagccccctcagagtactaggaccacagaagccctgttgctcactgacctgtgaccaggtccaatgtggggagaaatatgaaggaggtagcagccctgggttctcctcagtgagggatccctgccctgcaccagcaccctgagatggagctgagactttatttattgggggtagggggatggaggaggtccctccaacatgtttggacccagctcctttgggttccactgacacccctgcccctgcccctgcccagaaccaagtgccatttctcactctggagccttaataaactgcaatttgtatccagtctccagctttgttctatagggatgactggaagacacctggcagagtattgtggatacctcaggaggcacagaggggtggtggggtggggatggcactgggagctcaggagcctagcctgaggctgatgatcacatctctctgcagctattcttttccctctaatatgggcaaagaggccagcagggcc

SEQ ID NO: 72266 - DNA, 10564 bp, Homo sapiens
  misc_feature (7364)..(7364): n is a, c, g, or t
  misc_feature (8128)..(8128): n is a, c, g, or t
gcggggggaggggaggggaggggagggggcgcggggccgcggcagcggagctcgcatcctcggcggggcggctgtgcaggaggcggcgcccgggcgtcagcggacggaccgatcgacggccaagggcgcgcggaccgacggcggctgcccggaggggatcgcgggcctcggagacagcgactgcggacgatgcgcggccccaggccccgcgcgagcgggcgctgcccggggggctgaccgcggccggacggcgccccagcaccgggcgagggagcccgcgtcgcgcggaggtcagggagcctgagctggagccagggccccagtgggacctgacccaaagtctgaggtcaagctgggcccagagcctggcctggagctggagcccaaggcacagctggactacccttgtcatgcagaaggagctgggcattgtgccttcctgccctggcatgaagagccccaggccccacctcctgctaccattgctgctgctgctgctgctgctgctgggggctggggtgccaggtgcctggggtcaggctgggagcctggacttgcagattgatgaggagcagccagcgggtacactgattggcgacatcagtgcggggcttccggcaggcacggcagctcctctcatgtacttcatctctgcccaagagggcagcggcgtgggcacagacctggccattgacgaacacagtggggtcgtccgtacagcccgtgtcttggaccgtgagcagcgggaccgctaccgcttcactgcagtcactcctgatggtgccaccgtagaagttacagtgcgagtggctgacatcaacgaccatgctccagccttcccacaggctcgggctgccctgcaggtacctgagcatacagcttttggcacccgctacccactggagcctgctcgtgatgcagatgctgggcgtctgggaacccagggctatgcgctatctggtgatggggctggagagaccttccggctggagacacgccccggtccagatgggactccagtacctgagctggtagttactggggaactggaccgagagaaccgctcacactatatgctacagctggaggcctatgatggtggttcacccccccggagggcccaggccctgctggacgtgacactgctggacatcaatgaccatgccccggctttcaatcagagccgctaccatgctgtggtgtctgagagcctggcccctggcagtcctgtcttgcaggtgttcgcatctgatgccgatgctggtgtcaatggggctgtgacttacgagatcaaccggaggcagagcgagggtgatggacccttctccatcgacgcacacacggggctgctgcagttagagcggccactggactttgagcagcggcgggtccatgaactggtggtgcaagcacgagatggtggggctcaccctgagctgggctcggcctttgtgactgtgcatgtgcgagatgccaatgacaatcagccctccatgactgtcatctttctcagtgcagatggctccccccaagtgtctgaggccgccccacctggacagctcgttgctcgcatctctgtgtcagacccagatgatggtgactttgcccatgtcaatgtgtccctggaaggtggagagggccactttgccctaagcacccaagacagcgtcatctatctggtgtgtgtggctcggcggctggatcgagaggagagggatgcctataacttgagggttacagccacagactcaggctcacctccactgcgggctgaggctgcctttgtgctgcacgtcactgatgtcaacgacaatgcacctgcctttgaccgccagctctaccgacctgagcccctgcctgaggttgcgctgcctggcagctttgtagtgcgggtgactgctcgggatcctgaccaaggcaccaatggtcaggtcacttatagcctagcccctggcgcccacacccactggttctccattgaccccacctcaggcattatcactacggctgcctcactggactatgagttggaacctcagccacagctgattgtggtggccacagatggtggcctgccccctctagcctcctctgccacagttagcgtggccctgcaagatgtgaatgataatgagccccaattccagaggactttctacaatgcctcactgcctgagggcacccagcctggaacttgcttcctgcaggtgacagccacagacgcggatagtggcccatttggcctcctctcctattccttgggtgctggacttgggtcctccggatctcccccattccgcattgatgcccatagcggtgatgtgtgcacaacccggaccctggaccgtgaccaggggccctcaagctttgacttcacagtgacagctgtggatgggggaggcctcaagtccatggtatatgtgaaggtgtttctgtcagacgagaatgacaaccctcctcagttttatccacgggagtatgctgccagtataagtgcccagagtccaccaggcacagctgtgctgaggttgcgtgcccatgaccctgaccagggatcccatgggcgactctcctaccatatcctggctggcaacagccccccactttttaccttggatgagcaatcagggctgttgacagtagcctggcccttggccagacgggccaattctgtggtgcagctggagatcggggctgaggacggaggtggcctacaggcagaacccagtgcccgagtggacatcagcattgtgcctggaacccccacaccacccatatttgagcaactacagtatgttttttctgtgccagaggatgtggcaccaggcaccagtgtgggcatagtccaggcacacaacccaccaggtcgcttggcacctgtgaccctttccctatcaggtggggatccccgaggactcttctccctagatgcggtatcaggactgttgcaaacacttcgccctctggaccgggagctactgggaccagtgttggagctggaggtgcgagcaggcagtggagtgcccccagctttcgctgtagctcgggtgcgtgtgctgctggatgatgtgaatgacaactcccctgcctttcctgcacctgaagacacggtattgctaccaccaaacactgccccagggactcccatctatacactgcgggctcttgaccccgactcaggtgttaacagtcgagtcacctttaccctgcttgctgggggtggtggagccttcaccgtggaccccaccacaggccatgtacggcttatgaggccttggctccccgattcaacagccctacctaccgtgtggacctgccctcaggcaccactgctggaactcaggtcctgcaagtgcaggcccaagcaccagatgggggccctatcacctatcaccttgcagcagagggagcaagtagcccctttggcctggagccacagagtgggtggctatgggtgcgggcagcactagaccgtgaggcccaggaattgtacatactgaaggtaatggcagtgtctgggtccaaagctgagttggggcagcagacaggcacagccaccgtgagggtcagcatcctcaaccagaatgaacacagtccccgcttgtctgaggatcccaccttcctggctgtggctgagaaccagcccccagggaccagcgtgggccgagtctttgccactgaccgagactcaggacccaatggacgtctgacctacagcctgcaacagctgtctgaagacagcaaggccttccgcatccacccccagactggagaagtgaccacactccaaaccctggaccgtgagcagcagagcagctatcagctcctggtgcaggtgcaggatggagggagcccaccccgcagcaccacaggcactgtgcatgttgcagtgcttgacctcaacgacaacagccccacgttcctgcaggcttcaggagctgctggtgggggcctccctatacaggtaccagaccgcgtgcctccaggaacactggtgacgactctgcaggcgaaggatccagatgagggggagaatgggaccatcttgtacacgctaactggtcctggctcagagcttttctctctgcaccctcactcaggggagctgctcactgcagctcccctgatccgagcagagcggccccactatgtgctgacactgagtgctcatgaccaaggcagccctcctcgaagtgccagcctccagctgctggtgcaggtgcttccctcagctcgcttggccgagccgcccccagatctcgcagagcgggacccagcggcaccagtgcctgtcgtgctgacggtgacagcagctgagggactgcggcccggctctctgttgggctcggtggcagcgccagagcccgcgggtgtgggtgcactcacctacacactggtgggcggtgccgatcccgagggcaccttcgcgctggatgcggcctcagggcgcttgtacctggcgcggcccctggacttcgaagctggcccgccgtggcgcgcgctcacggtacgcgctgaggggccgggaggcgcgggcgcgcggctgctgcgagtgcaggtgcaagtgcaggacgagaatgagcatgcgcccgcctttgcgcgcgacccgctggcgctggcgctgccagagaacccggagcccggcgcagcgctgtacactttccgcgcgtcggacgccgacggccccggccccaatagcgacgtgcgctaccgcctgctgcgccaggagccgcccgtgccggcgcttcgcctggacgcgcgcaccggggcgctcagcgctccgcgcggcctggaccgagagaccactcccgcgctgctgctgctggtggaagccaccgaccggcccgccaacgccagccgccgtcgtgcagcgcgcgtttcagcgcgcgtcttcgtcacggatgagaatgacaacgcgcctgtcttcgcctcgccgtcacgcgtgcgcctcccagaggaccagccgcctgggcccgcggccctgcacgtggtagcccgggacccggatctgggcgaggctgcacgcgtgtcctatcggctggcatctggcggggacggccacttccggctgcactcaagcactggagcgctgtccgtggtgcggccgttggaccgcgaacaacgagctgagcacgtactgacagtggtggcctcagaccacggctccccgccgcgctcggccacgcaggtcctgaccgtcagtgtcgctgacgtcaacgacgaggcgcctactttccagcagcaggagtacagcgtcctcttgcgtgagaacaaccctcctggcacatctctgctcaccctgcgagcaaccgaccccgacgtgggggccaacgggcaagtgacttatggaggcgtctctagcgaaagcttttctctggatcctgacactggtgttctcacgactcttcgggccctggatcgagaggaacaggaggagatcaacctgacagtgtatgcccaggacaggggctcacctcctcagttaacgcatgtcactgttcgagtggctgtggaggatgagaatgaccatgcaccaacctttgggagtgcccatctctctctggaggtgcctgagggccaggacccccagacccttaccatgcttcgggcctctgatccagatgtgggagccaatgggcagttgcagtaccgcatcctagatggggacccatcaggagcctttgtcctagaccttgcttctggagagtttggcaccatgcggccactagacagagaagtggagccagctttccagctgaggatagaggcccgggatggaggccagccagctctcagtgccacgctgcttttgacagtgacagtgctggatgccaatgaccatgctccagcctttcctgtgcctgcctactcggtggaggtgccggaggatgtgcctgcagggaccctgctgctgcagctacaggctcatgaccctgatgctggagctaatggccatgtgacctactacctgggcgccggtacagcaggagccttcctgctggagcccagctctggagaactgcgcacagctgcagccttggacagagaacagtgtcccagctacaccttttctgtgagtgcagtggatggtgcagctgctgggcccctaagcaccacagtgtctgtcaccatcacggtgcgcgatgtcaatgaccatgcacccaccttccccaccagtcctctgcgcctacgtctgccccgcccaggccccagcttcagtaccccaaccctggctctggccacactgagagctgaagatcgtgatgctggtgccaatgcttccattctgtaccggctggcaggcacaccacctcctggcactactgtggactcttacactggtgaaatccgcgtggcccgctctcctgtagctctaggcccccgagatcgtgtcctcttcattgtggccactgatcttggccgtccagctcgctctgccactggtgtgatcattgttggactgcagggggaagctgagcgtggaccccgctttccccgggctagcagtgaggctacgattcgtgagaatgcgcccccagggactcctattgtctcccccagggccgtccatgcaggaggcacaaatggacccatcacctacagcattctcagtgggaatgagaaagggacattctccatccagcctagtacaggtgccatcacagttcgctcagcagaggggctagacttcgaggtgagtccacggctgcgactggtgctgcaggcagagagtggaggagcctttgccttcactgtgctgaccctgaccctgcaagatgccaacgacaatgctccccgtttcctgcggccccattatgtggccttccttcctgagtcccggcccttggaggggcccctgctgcaggtggaggcggatgacctggatcaaggctctggaggacagatttcctacagtctggctgcatcccagccggcacgtggattgttccacgtagacccaaccacaggcactatcactaccacagccatcctggaccgtgagatctgggctgaaacacggttggtgctgatggccacagacagagggagcccagccctggtgggctcagctaccttgacggtgatggtcatcgacaccaatgacaatcgccccaccatcccccaaccctgggagctccgagtgtcagaagatgcgttattgggctcagagattgcacaggtaacagggaatgatgtggactcaggacccgtgctgtggtatgtgctaagcccatctgggccccaggatcccttcagtgttggccgctatggaggccgtgtctccctcacggggcccctggactttgagcagtgtgaccgctaccagctgcagctgctggcacatgatgggcctcatgagggcngtgccaacctcacagtgcttgtggaggatgtcaatgacaatgcacctgccttctcacagagcctctaccaggtaatgctgcttgagcacacacccccaggcagtgccattctctccgtctctgccactgatcgggactcaggtgccaacggtcacatttcctaccacctggcttcccctgccgatggcttcagtgttgaccccaacaatgggaccctgttcacaatagtgggaacagtggccttgggccatgacgggtcaggagcagtggatgtggtgctggaagcacgagaccacggggctccaggccgggcagcacgagccacagtgcacgtgcagctgcaggaccagaacgaccacgccccgagcttcacattgtcacactaccgtgtggctgtgactgaagacctgccccctggctccactctgctcaccctggaggctacagatgctgatggaagccgcagccatgccgctgtggactacagcatcatcagtggcaactggggccgagtcttccagctggaacccaggctggctgaggctggggagagtgctggaccaggcccccgggcactgggctgcctggtgttgcttgaacctctagactttgaaagcctgacacagtacaatctaacagtggctgcagctgaccgtgggcagccaccccaaagctcagtcgtgccagtcactgtcactgtactagatgtcaatgacaacccacctgtctttacccgagcatcctaccgtgtgacagtacctgangacacacctgttggagctgagctgctgcatgtagaggcctctgacgctgaccctggccctcatggcctcgtgcgtttcactgtcagctcaggcgacccatcagggctctttgagctggatgagagctcaggcaccttgcgactggcccatgccctggactgtgagacccaggctcgacatcagcttgtagtacaggctgctgaccctgctggtgcacactttgctttggcaccagtgacaattgaggtccaggatgtgaatgatcatggcccagccttcccactgaacttactcagcaccagcgtggccgagaatcagcctccaggcactctcgtgaccactctgcatgcaatcgacggggatgctggggcttttgggaggctccgttacagcctgttggaggctgggccaggacctgagggccgtgaggcatttgcactgaacagctcaacaggggagttgcgtgcgcgagtgccctttgactatgagcacacagaaagcttccggctgctggtgggtgctgctgatgctgggaatctctcagcctctgtcactgtgtcggtgctagtgactggagaggatgagtatgaccctgtatttctggcaccagctttccacttccaagtgcccgaaggtgcccggcgtggccacagcttgggtcacgtgcaggccacagatgaggatgggggtgccgatggcctggttctgtattcccttgccacctcttccccctattttggtattaaccagactacaggagccctgtacctgcgggtggacagtcgggcaccaggcagcggaacagccacctctgggggtgggggccggacccggcgggaagcaccacgggagctgaggctggaggtgatagcacgggggcctctgcctggttcccggagtgccacagtgcctgtgaccgtggatatcacccacaccgcactgggcctggcacctgacctcaacctgctattagtaggggccgtggcagcctccttgggagttgtggtggtgcttgcactggcagccctggtcctaggacttgttcgggcccgtagccgcaaggctgaggcagcccctggcccaatgtcacaggcagcacccctagccagtgactcactgcagaaactgggccgggagccacctagtccaccaccctctgagcacctctatcaccagactcttcccagctatggtgggccaggagctggaggaccctacccccgtggtggctccttggacccttcacattcaagtggccgaggatcagcagaggctgcagaggatgatgagatccgcatgatcaatgagttcccccgtgtggccagtgtggcctcctctctggctgcccgtggccctgactcaggcatccagcaggatgcagatggtctgagtgacacatcctgcgaaccacctgcccctgacacctggtataagggccgaaaggcagggctgctgctgccaggtgcaggagccactctctacagagaggaggggcccccagccactgccacagccttcctggggggctgtggcctgagccctgcacccactggggactatggcttcccagcagatggcaagccatgtgtggcaggtgcgctgacagccattgtggccggcgaggaggagctccgtggcagctataactgggactacctgctgagctggtgccctcagttccaaccactggccagtgtcttcacagagatcgctcggctcaaggatgaagctcggccatgtcccccagctccccgtatcgacccaccacccctcatcactgccgtggcccacccaggagccaagtctgtgccccccaagccagcaaacacagctgcagcccgggccatcttcccaccagcttctcaccgctcccccatcagccatgaaggctccctgtcctcagctgccatgtcccccactctccaccctgaactccccagccccctcagagtactaggaccacagaagccctgttgctcactgacctgtgaccaggtccaatgtggggagaaatatgaaggaggtagcagccctgggttctcctcagtgagggatccctgccctgcaccagcaccctgagatggagctgagactttatttattgggggtagggggatggaggaggtccctccaacatgtttggacccagctcctttgggttccactgacacccctgcccctgcccctgcccagaaccaagtgccatttctcactctggagccttaataaactgcaatttgtatccagtctccagctttgttctatagggatgactggaagacacctggcagagtattgtggatacctcaggaggcacagaggggtggtggggtggggatggcactgggagctcaggagcctagcctgaggctgatgatcacatctctctgcagctattcttttccctctaatatgggcaaagaggccagcagggcc

SEQ ID NO: 72267 - DNA, 3816 bp, Homo sapiens
gcggggggaggggaggggaggggagggggcgcggggccgcggcagcggagctcgcatcctcggcggggcggctgtgcaggaggcggcgcccgggcgtcagcggacggaccgatcgacggccaagggcgcgcggaccgacggcggctgcccggaggggatcgcgggcctcggagacagcgactgcggacgatgcgcggccccaggccccgcgcgagcgggcgctgcccggggggctgaccgcggccggacggcgccccagcaccgggcgagggagcccgcgtcgcgcggaggtcagggagcctgagctggagccagggccccagtgggacctgacccaaagtctgaggtcaagctgggcccagagcctggcctggagctggagcccaaggcacagctggactacccttgtcatgcagaaggagctgggcattgtgccttcctgccctggcatgaagagccccaggccccacctcctgctaccattgctgctgctgctgctgctgctgctgggggctggggtgccaggtgcctggggtcaggctgggagcctggacttgcagattgatgaggagcagccagcgggtacactgattggcgacatcagtgcggggcttccggcaggcacggcagctcctctcatgtacttcatctctgcccaagagggcagcggcgtgggcacagacctggccattgacgaacacagtggggtcgtccgtacagcccgtgtcttggaccgtgagcagcgggaccgctaccgcttcactgcagtcactcctgatggtgccaccgtagaagttacagtgcgagtggctgacatcaacgaccatgctccagccttcccacaggctcgggctgccctgcaggtacctgagcatacagcttttggcacccgctacccactggagcctgctcgtgatgcagatgctgggcgtctgggaacccagggctatgcgctatctggtgatggggctggagagaccttccggctggagacacgccccggtccagatgggactccagtacctgagctggtagttactggggaactggaccgagagaaccgctcacactatatgctacagctggaggcctatgatggtggttcacccccccggagggcccaggccctgctggacgtgacactgctggacatcaatgaccatgccccggctttcaatcagagccgctaccatgctgtggtgtctgagagcctggcccctggcagtcctgtcttgcaggtgttcgcatctgatgccgatgctggtgtcaatggggctgtgacttacgagatcaaccggaggcagagcgagggtgatggacccttctccatcgacgcacacacggggctgctgcagttagagcggccactggactttgagcagcggcgggtccatgaactggtggtgcaagcacgagatggtggggctcaccctgagctgggctcggcctttgtgactgtgcatgtgcgagatgccaatgacaatcagccctccatgactgtcatctttctcagtgcagatggctccccccaagtgtctgaggccgccccacctggacagctcgttgctcgcatctctgtgtcagacccagatgatggtgactttgcccatgtcaatgtgtccctggaaggtggagagggccactttgccctaagcacccaagacagcgtcatctatctggtgtgtgtggctcggcggctggatcgagaggagagggatgcctataacttgagggttacagccacagactcaggctcacctccactgcgggctgaggctgcctttgtgctgcacgtcactgatgtcaacgacaatgcacctgcctttgaccgccagctctaccgacctgagcccctgcctgaggttgcgctgcctggcagctttgtagtgcgggtgactgctcgggatcctgaccaaggcaccaatggtcaggtcacttatagcctagcccctggcgcccacacccactggttctccattgaccccacctcaggcattatcactacggctgcctcactggactatgagttggaacctcagccacagctgattgtggtggccacagatggtggcctgccccctctagcctcctctgccacagttagcgtggccctgcaagatgtgaatgataatgagccccaattccagaggactttctacaatgcctcactgcctgagggcacccagcctggaacttgcttcctgcaggtgacagccacagacgcggatagtggcccatttggcctcctctcctattccttgggtgctggacttgggtcctccggatctcccccattccgcattgatgcccatagcggtgatgtgtgcacaacccggaccctggaccgtgaccaggggccctcaagctttgacttcacagtgacagctgtggatgggggaggcctcaagtccatggtatatgtgaaggtgtttctgtcagacgagaatgacaaccctcctcagttttatccacgggagtatgctgccagtataagtgcccagagtccaccaggcacagctgtgctgaggttgcgtgcccatgaccctgaccagggatcccatgggcgactctcctaccatatcctggctggcaacagccccccactttttaccttggatgagcaatcagggctgttgacagtagcctggcccttggccagacgggccaattctgtggtgcagctggagatcggggctgaggacggaggtggcctacaggcagaacccagtgcccgagtggacatcagcattgtgcctggaacccccacaccacccatatttgagcaactacagtatgttttttctgtgccagaggatgtggcaccaggcaccagtgtgggcatagtccaggcacacaacccaccaggtcgcttggcacctgtgaccctttccctatcaggtggggatccccgaggactcttctccctagatgcggtatcaggactgttgcaaacacttcgccctctggaccgggagctactgggaccagtgttggagctggaggtgcgagcaggcagtggagtgcccccagctttcgctgtagctcgggtgcgtgtgctgctggatgatgtgaatgacaactcccctgcctttcctgcacctgaagacacggtattgctaccaccaaacactgccccagggactcccatctatacactgcgggctcttgaccccgactcaggtgttaacagtcgagtcacctttaccctgcttgctgggggtggtggagccttcaccgtggaccccaccacaggccatgtacggcttatgaggccttggctccccgattcaacagccctacctaccgtgtggacctgccctcaggcaccactgctggaactcaggtcctgcaagtgcaggcccaagcaccagatgggggccctatcacctatcaccttgcagcagagggagcaagtagcccctttggcctggagccacagagtgggtggctatgggtgcgggcagcactagaccgtgaggcccaggaattgtacatactgaaggtaatggcagtgtctgggtccaaagctgagttggggcagcagacaggcacagccaccgtgagggtcagcatcctcaaccagaatgaacacagtccccgcttgtctgaggatcccaccttcctggctgtggctgagaaccagcccccagggaccagcgtgggccgagtctttgccactgaccgagactcaggacccaatggacgtctgacctacagcctgcaacagctgtctgaagacagcaaggccttccgcatccacccccagactgtgggatcctcagacaagcgggactgtgttcattctggttgaggatg

SEQ ID NO: 72268 - DNA, 500 bp, Homo sapiens
tctcccacctagctgaaggtgtggggctctggccagccacttcattcctgagtcccttctggtctttccagggggtgtgttatcccatcacacactctcatggagcactcctagagccacctcctcactggttctggggtgggctggtaattaatactcatacttgctcccagaagcagagagtgtgagtatctcagattactccagggagaaggaagctccggaactgccagtggctcactcaaggctcacaggtggcagtgatatgagcagaacccagaaacctagcattccaggtgtatcgggagtcaccagcaccattctggggctgccatggagaagggcacagggatggccagccctcagccactgtattcttagacacagcagaatctacatggaaatgcagtgattgtgataggaggaaacggagctgggggaactcaatctccaaaaggataactggccaagtttgcgctgcggggactgctcagaaatga

SEQ ID NO: 72269 - DNA, 505 bp, Homo sapiens
aaaaaagaaaaggatggctaaaagatacaccaggcgaataataaccaggcgaataataaccagagtagctacactgacttttgataagatggactttcaaacagagatcattacacagataaaaaggattgcctaatgatggtagaaggttaatttcatcagcaagttaaattgtagaagagctcaaaatatgtaaaacaagcagatgaaactttacagagaaattcaaaacactacccttagtctggaagccctcttctctcaagagctaaacagaaaacgaatgaagatagagatttgaacacacttcttcatgtaagtatttgtttcctattgctgctgacacagtaccacatacttagtggcttaaaacaatgcaggctggtacactggctcacgcctcttatcccagcacttttagaggctgaggcaggagcatcacttgagtccagaagtttgagaccagcctgctcgacatagaaacaccctgcctctacaaaaaaaa

SEQ ID NO: 72270 - DNA, 243 bp, Homo sapiens
aactttctcatgcagtgtttgtggacctgatagtgttccctttcagagaggtgctctgcaccatgtcctcttgactatttcaatgttcaagtcaccatattcatttatccaatgagctcttttctatagtttttttgactcagagattgtggatgatataacatccttacagtttctcacagatgcaaatctctgcatttagcctgaaagtgactaagtgtactatgagtatgatatgaccta

SEQ ID NO: 72271 - DNA, 351 bp, Homo sapiens
tctttttctgcctggagctataaggtcataaacctgccactactggtcacaatcttcctcccataaaatgaaagtaagcctcagaataaagccagaacagaggcaggaaaaacagagacatcaggagagcagtggtcctgataacatcatttgagcccctgattccagatatacctgaagcctgtatatcccttggcttttagttctgttaagtaaaacttatggggatgccattggtttggactgagctcctgcgctgggccccaacagatcagaccaaaccagaatggagtcactcatgctagctgttacgtagtcaaactgaacttagaagtggatcagttttccaaa

SEQ ID NO: 72272 - DNA, 438 bp, Homo sapiens
aaaaaattttactagttccttaattataaatcatctgagagaaaattgcaacttggtatggacctcaccaaacccctcgccaattcaatcgggccctcctttgataatttaacaacaaattcctgtctggaatcatccattcaagtgcctttttaaatgaatcccatttcaattttttaataaagtgccaccagtagatctgcaagttgagaaaagcagctcaggtgacacacgtggcaccaaaaagattattgagtgggtcaaaaatcctgcctgggcacaaaatagaagaagagcctaagaaggtgactagacttagggacttcaagaagaacaagcactgaaaacagcagtttaactacctcggacagtaagcaacaagcctgcagtccccagataagcggcccagagggagctgaggggatggagttggaaagg

SEQ ID NO: 72273 - DNA, 697 bp, Homo sapiens
tccatcaatttgtaaagttttggctgggtgtagtggctccagcctgtaatcccagcactttaggaggccaaggtgggaggatcacttgaactcctgacctcaggtgatctgcccacttggcctcccaaagtgctgagattacaggtgtgagccaccacccctgctgtcacattttaaaaatatgcctgctatagaaaaatctacctgtgttataggttaccaaagtcacataggtgactttaaaggtttcaagtgagttactctaaaagagactatccactttttgaacagagagatgagattcctcaaagtacctcagtacacagtgagaattacattcccctttttccttctgtgcctgagcaacgagtcactttgagcctccatttctgttctcagccctaggttcagctggagagattcatgttttcccttgtgtttacagaccttaaatgcactgtcctttcaaaaatttttttttcctaagctgtagaaataaattcagtttcagtgatctccccagtcttaaaaaaacaaacaacatccctggaatcctcagaagtgatttcttggcatggtaatgtgtagttgattgtgctgggtccaacagtagactctgattaaggttgaaataaagaggaagtgagaacagggatgatttaattgctcacaagaaataaatctattggctagaaga

SEQ ID NO: 72274 - DNA, 337 bp, Homo sapiens
tgtgaggacatagggaaaagatgactgtctctaaaccaggaagtgagcgctcaccagatactgaatctgctggcaggctcctcaactacaagcaattcatttctgttgtttataagacactcagtctgtggtattttgttatagcagctcaaatagattaagaccttcaccttgtattttagaggccaaagtggataatgacttggggatatgatgggtaccactaagcctgtatcattgacgtcttcaagtatggtactaatctttgccattccccctagaagcagcattgttttttattttacaatcttccaaggatggtaagggaaatttaagg

SEQ ID NO: 72275 - DNA, 518 bp, Homo sapiens
aggccttaagaaacttacaatcatggtggaaggtgagagggaaggaaggaccttcttcacatggtgccaggagagagaggcagtgaaggggggaattatcacacacttttaaaccatcatatctcatgagagctcactcactattatgagaacagcaagggggaaatttccccccatgatccaatctcctcccaccagtctcctcctccaattcaacatgagatttgggtgggggcacaaatccaaatagattattgtaagtataatgaaatataagtgccatttatttatttaaaaaccattttttgagaacatactatgtactagacatggtactgtaactcttgttctgaggattgtatgaaaattatcatgttaaaattcatatgacaaaagaatgggtctacctcaagaagggtatgggaagctataaaaagaatggatatttgatctggaatttaaagatcaggtagaagaagcttgtcttaatggaaatagagataagacatgagagagtg

SEQ ID NO: 72276 - DNA, 4676 bp, Homo sapiens
ttctaatgcttttaaggttccttttcagcccttcctcctcgtaatccacaaatactgagaccaaggcattttttgggtcagtcctaatttcaagcattctatcctgccctccccaaatgaactcacacttattagaccatatgttcctatattagttcaggaagggggaaaaaatgttcatcacacttgtatataagagatcatagaaaaacagtttactaacctgtgaaaataccattcattctctgtttacctctggtccacagctaagcaatcagtaggatataaatgtaccctatgttcactattcagtattcataagtatactacttatgaattggaaatctgacacaacatttacatgacctaattttgaaaatttaaaatagtgtaaggcccctaggcttaattttacaggggaaagattaaaaggacacaagcaaacatatattctctctctgtgctgtgggacactggtaattttttgacttaaaatatttgatacttaaaatgccaaacttctacatttctgcagtaacaaggcagttatcatattgaataccatttctttctctccagtaagtaaatattagcacatgaactgaaaatattaagtgattataaaaaagtccaaataaattcattaaaatttagcttggcaaaatgttagtttcatgttcttggtagaagtccttttatatttatattcaaatgaaatgaacaatttacaagcaaaggaaatggcatcaaatatttgacaccctgcctcccaaggtgtattgattcatgctttttgctcagatctaggtttctccactcaggaaaagaggagaatgtacccatacttgggaaaacaagtttccgatggcacagctttgatcaaacagcaaaattctatccatctatgtattgccatctgacagtatgacaaatggtcccatgtgcgatattcacactgcattgtagtcaaacctgtaagtcaaaggatatgaaataatagtaactacacattaagcacagaagaaaatgaaacaaacaaaaaggttttaaaccaaccaaaaatatgtcttattttggatgttctatatgttcttacattctctcaggtcttttgtgtcgttatgaacacaattctaacaagcttgattattttatttccattcacatattacaggcaacaagctgaaaaagtagaacagggtgtagagagacaggacaaagtacagattagggcttgaagtgcccctgaccagtcgacagcaaccacatggaataatgactcatgtgcattaatgatcacactaaatgatatttgttttttacctagtccttcaactgacagcttaaagaacttcaggttgttctgattcttgagtctcctctacaacttcagagaggactttcattttattttggatcaaatgctccacaactagttgaaactggaattaaattttatatgaagttcctagatgatttaaagctgtaagaagaagaataatgaatcataagaaaacttgctgctacagatatcaaaaaggaatgttaccatccctcatgctaatccttttcattttaaataaacaggatctaaaaaaaataatgctgggaagtcctaaccacatcaagaatgcctcagatcagtgacccaaggaccttccagaatggatgaaatagacccaaagctgaattcacctaattttagggccaaaaacccaaaaaacaaaacaagaccaaaaaaatcttcagatactgggagaacaaatctcaattgctcaattgtatcttatgaaaacaatttttcaaaataaaacaagagatatttaagattcattaagttcttgtcatttcaaattttaagaaaaatattttctaatggaattacatatatttatatgattcttctagttatatccatggtaataaatactcttttcagttggaaataaaacccatttgtgctatattattagggaaaatatctacataaattagtttttaatttaactaaagtctatcttttgaattcataagcataaaattttaaccacttgcaaaatttataacacacttaaggtagtcagatgccttgtcaagtagtttaacaaaagtgattttcacctgtttgttttaataacagtgcatcgattttatgaaaatcaggcatgccctcgggtcctaacaaagtatacgaagctgaatggatctatgccaaatatgccagattttactttctgagtctgattttatacttctgtcctctttcttaccacatggcttccagtatcacttacagactaacccttcaaaaggagaaggctaagttactaacatttggaaggcttatgaaagtgaagcatagttatgagccagcaatgtttttatttagggaatgtgtgcaaaccacacacttaagcaagctctggggaatgagagttggggggaatcaactgttttatttgctaattggtatttcctttaaaagatagagttcttccagattttaactgtgttaatagttactctagaaaaattggagatttgtgtgcatatattttatgttgtaaacagacacatacccagagacactgagagagacagacagacagtaaacagaggagcactaaccacaaacggtttacaaatgacctctgtgctcattcacctgtctgttccccaccttgccttttatagcaactatagcaacagccatgagagtcattgtggaaagaaataaaataaaattaaaaaatcctggaagcttgtaaagaatgtgagcaaaggggaggaagttgtgaaaaaaatgaataaagggcaccgatccagagtattgaagaaggcagagtggagagcctagtaatgagtatctggtaccccagtatcctctcccacagaatctgtacagctctccgtttatgacagtttaaacttaatttaaattatcaaacagacactttcctcaaacatataaatgatgaggcagttcattcaggctgtatgtataaagttgttccagccacctttttctaacggcttctctatatcttttacatggagacaatgagagatttgcttaggacaatttgactgtaatttagaagtaggaaatgggaagtatttgtatcttctttgcctaactcacattagttactcaagtaagcatttcttccgttattgcattttcctgattacaagttttatgttttctctaaaacacatatcaaaagaaatgtcctaagcactatgcagggggaagccatgacatttatccaccactgtcagcaaaaacatgaacttagccctcaacagaatatttcacttcattctagtgtcacctctgcgtcacctgcactggagtcaccacttgcctgttgggtaagaccaggatgcaccgctgaaataaaaaggggtcagacaatacaagaaaagccagtagaaattgccaaatgtatcagaatacacacaggctttctaaggatatggcccaagaggaaggctctagagcccaccctgaaacaggatttttgacttcacagagaaattatttaattttcaataacacaattcaattaaagaaagggaaatacaaggctaaacaaataagaaatgaagacaaaaacccaacctttcaaatctaaagaaaataatctgttttaaagacacagatgaagatcaggaacccaaaacagaagaaaggaaaagcaattaacgctggcatctgataacaacgaaaagtatggagtctggagaatcgctagactctaaaaattataaaggtttagacttggactttgtacactgaagaaaagaaaactgcatgcatttatactgaccaatgtacactattgctgctttttaacttttgtgtatatgtagggtagatttttttttaagtgaaagcaagcttattaagaaagtaaaagaataaaaaggtgacttctccataggcagaaaactagcgtagtttttttattagaaattgttattcaataatagtacatgttacaaataaataccattttaaactgaaaaaattgtagactttcaaatcagttagggtggtcaccctaaaaaagggcatttttttccccttagtctccttgttcatgttgctcacaacaagaaatgggctaatgctatgaataataataacaaacactgccttctgtcaggccctgtgctgaataccgtctgcatatgtataggaaagggttaactcagcaggtcttgtttgcccagactctgtacatttccaagaaaggtctgcctttaggactggtccttggccagctcctggagaatgagctctcagcttttagaaaattctatctgctaagaatagttttgcatgtctcaggtcttgggccacaaaatatcagtttaatcagatggtttatgttaacaagtatgatttatggcaaacatagatctctaatctccatttctctctcatatatctatatttatctatccatatatatgtacctatatatatcaaatataaagatatgtttatagcaattgtatatacgtagagagataatatgtagtatgaagagagacatagatattattcttcattttagaatgttatcttggtatgtttaaaaggaaaaacttaagatgtgttgcaattgcagatgagttcaggttgtcctgtatgtgtgttatgtgtg

SEQ ID NO: 72277 - DNA, 3114 bp, Homo sapiens
ctgaggccctggcccagagggacaagatctaaaaaaaataatgctgggaagtcctaaccacatcaagaatgcctcagatcagtgacccaaggaccttccagaatggatgaaatagacccaaagctgaattcacctaattttagggccaaaaacccaaaaaacaaaacaagaccaaaaaaatcttcagatactgggagaacaaatctcaattgctcaattgtatcttatgaaaacaatttttcaaaataaaacaagagatatttaagattcattaagttcttgtcatttcaaattttaagaaaaatattttctaatggaattacatatatttatatgattcttctagttatatccatggtaataaatactcttttcagttggaaataaaacccatttgtgctatattattagggaaaatatctacataaattagtttttaatttaactaaagtctatcttttgaattcataagcataaaattttaaccacttgcaaaatttataacacacttaaggtagtcagatgccttgtcaagtagtttaacaaaagtgattttcacctgtttgttttaataacagtgcatcgattttatgaaaatcaggcatgccctcgggtcctaacaaagtatacgaagctgaatggatctatgccaaatatgccagattttactttctgagtctgattttatacttctgtcctctttcttaccacatggcttccagtatcacttacagactaacccttcaaaaggagaaggctaagttactaacatttggaaggcttatgaaagtgaagcatagttatgagccagcaatgtttttatttagggaatgtgtgcaaaccacacacttaagcaagctctggggaatgagagttggggggaatcaactgttttatttgctaattggtatttcctttaaaagatagagttcttccagattttaactgtgttaatagttactctagaaaaattggagatttgtgtgcatatattttatgttgtaaacagacacatacccagagacactgagagagacagacagacagtaaacagaggagcactaaccacaaacggtttacaaatgacctctgtgctcattcacctgtctgttccccaccttgccttttatagcaactatagcaacagccatgagagtcattgtggaaagaaataaaataaaattaaaaaatcctggaagcttgtaaagaatgtgagcaaaggggaggaagttgtgaaaaaaatgaataaagggcaccgatccagagtattgaagaaggcagagtggagagcctagtaatgagtatctggtaccccagtatcctctcccacagaatctgtacagctctccgtttatgacagtttaaacttaatttaaattatcaaacagacactttcctcaaacatataaatgatgaggcagttcattcaggctgtatgtataaagttgttccagccacctttttctaacggcttctctatatcttttacatggagacaatgagagatttgcttaggacaatttgactgtaatttagaagtaggaaatgggaagtatttgtatcttctttgcctaactcacattagttactcaagtaagcatttcttccgttattgcattttcctgattacaagttttatgttttctctaaaacacatatcaaaagaaatgtcctaagcactatgcagggggaagccatgacatttatccaccactgtcagcaaaaacatgaacttagccctcaacagaatatttcacttcattctagtgtcacctctgcgtcacctgcactggagtcaccacttgcctgttgggtaagaccaggatgcaccgctgaaataaaaaggggtcagacaatacaagaaaagccagtagaaattgccaaatgtatcagaatacacacaggctttctaaggatatggcccaagaggaaggctctagagcccaccctgaaacaggatttttgacttcacagagaaattatttaattttcaataacacaattcaattaaagaaagggaaatacaaggctaaacaaataagaaatgaagacaaaaacccaacctttcaaatctaaagaaaataatctgttttaaagacacagatgaagatcaggaacccaaaacagaagaaaggaaaagcaattaacgctggcatctgataacaacgaaaagtatggagtctggagaatcgctagactctaaaaattataaaggtttagacttggactttgtacactgaagaaaagaaaactgcatgcatttatactgaccaatgtacactattgctgctttttaacttttgtgtatatgtagggtagatttttttttaagtgaaagcaagcttattaagaaagtaaaagaataaaaaggtgacttctccataggcagaaaactagcgtagtttttttattagaaattgttattcaataatagtacatgttacaaataaataccattttaaactgaaaaaattgtagactttcaaatcagttagggtggtcaccctaaaaaagggcatttttttccccttagtctccttgttcatgttgctcacaacaagaaatgggctaatgctatgaataataataacaaacactgccttctgtcaggccctgtgctgaataccgtctgcatatgtataggaaagggttaactcagcaggtcttgtttgcccagactctgtacatttccaagaaaggtctgcctttaggactggtccttggccagctcctggagaatgagctctcagcttttagaaaattctatctgctaagaatagttttgcatgtctcaggtcttgggccacaaaatatcagtttaatcagatggtttatgttaacaagtatgatttatggcaaacatagatctctaatctccatttctctctcatatatctatatttatctatccatatatatgtacctatatatatcaaatataaagatatgtttatagcaattgtatatacgtagagagataatatgtagtatgaagagagacatagatattattcttcattttagaatgttatcttggtatgtttaaaaggaaaaacttaagatgtgttgcaattgcagatgagttcaggttgtcctgtatgtgtgttatgtgtg

SEQ ID NO: 72278 - DNA, 2283 bp, Homo sapiens
ttctaatgcttttaaggttccttttcagcccttcctcctcgtaatccacaaatactgagaccaaggcattttttgggtcagtcctaatttcaagcattctatcctgccctccccaaatgaactcacacttattagaccatatgttcctatattagttcaggaagggggaaaaaatgttcatcacacttgtatataagagatcatagaaaaacagtttactaacctgtgaaaataccattcattctctgtttacctctggtccacagctaagcaatcagtaggatataaatgtaccctatgttcactattcagtattcataagtatactacttatgaattggaaatctgacacaacatttacatgacctaattttgaaaatttaaaatagtgtaaggcccctaggcttaattttacaggggaaagattaaaaggacacaagcaaacatatattctctctctgtgctgtgggacactggtaattttttgacttaaaatatttgatacttaaaatgccaaacttctacatttctgcagtaacaaggcagttatcatattgaataccatttctttctctccagtaagtaaatattagcacatgaactgaaaatattaagtgattataaaaaagtccaaataaattcattaaaatttagcttggcaaaatgttagtttcatgttcttggtagaagtccttttatatttatattcaaatgaaatgaacaatttacaagcaaaggaaatggcatcaaatatttgacaccctgcctcccaaggtgtattgattcatgctttttgctcagatctaggtttctccactcaggaaaagaggagaatgtacccatacttgggaaaacaagtttccgatggcacagctttgatcaaacagcaaaattctatccatctatgtattgccatctgacagtatgacaaatggtcccatgtgcgatattcacactgcattgtagtcaaacctgtaagtcaaaggatatgaaataatagtaactacacattaagcacagaagaaaatgaaacaaacaaaaaggttttaaaccaaccaaaaatatgtcttattttggatgttctatatgttcttacattctctcaggtcttttgtgtcgttatgaacacaattctaacaagcttgattattttatttccattcacatattacaggcaacaagctgaaaaagtagaacagggtgtagagagacaggacaaagtacagattagggcttgaagtgcccctgaccagtcgacagcaaccacatggaataatgactcatgtgcattaatgatcacactaaatgatatttgttttttacctagtccttcaactgacagcttaaagaacttcaggttgttctgattcttgagtctcctctacaacttcagagaggactttcattttattttggatcaaatgctccacaactagttgaaactggaattaaattttatatgaagttcctagatgatttaaagctgtaagaagaagaataatgaatcataagaaaacttgctgctacagatatcaaaaaggaatgttaccatccctcatgctaatccttttcattttaaataaacaggatctaaaaaaaataatgctgggaagtcctaaccacatcaagaatgcctcagatcagtgacccaaggaccttccagaatggatgaaatagacccaaagctgaattcacctaattttagggccaaaaacccaaaaaacaaaacaagaccaaaaaaatcttcagatactgggagaacaaatctcaattgctcaattgtatcttatgaaaacaatttttcaaaataaaacaagagatatttaagattcattaagttcttgtcatttcaaattttaagaaaaatattttctaatggaattacatatatttatatgattcttctagttatatccatggtaataaatactcttttcagttggaaataaaacccatttgtgctatattattagggaaaatatctacataaattagtttttaatttaactaaagtctatcttttgaattcataagcataaaattttaaccacttgcaaaatttataacacacttaaggtagtcagatgccttgtcaagtagtttaacaaaagtgattttcacctgtttgttttaataacagtgcatcgattttatgaaaatcaggcatgccctcgggtcctaacaaagtatacgaagctgaatggatctatgccaaatatgccagattttactttctgagtctgattttatacttctggtgtgacaattgaccgggatcctcta

SEQ ID NO: 72279 - DNA, 1576 bp, Homo sapiens
  misc_feature (16)..(16): n is a, c, g, or t
  misc_feature (123)..(123): n is a, c, g, or t
  misc_feature (674)..(674): n is a, c, g, or t
  misc_feature (1127)..(1127): n is a, c, g, or t
  misc_feature (1174)..(1174): n is a, c, g, or t
ggctcgctgacctacngggtgccagagaggctgcggcagggtttctgtggcgtgggtcgggcagcacaggccttggtgtgtgcgagtgccaaggagggcaccgccttcaggatggaggctgtncaggagggggcggccggggtggagagtgagcaggcggctttgggggaggaggcggtgctgctgttggatgacataatggcggaggtggaggtggtggcggaggaggagggcctcgtggagcggcgggaggaggcccagcgcacagcaggctgtgctggccctgggccatgaccccagagtctgcactggaggagctgctggccgttcaggtggagctggagccggttaatgcccaagccaggaaggccttttctcggcagcgggaaaagatggagcggaggcgcaagccccacctagaccgcagaggcgccgtcatccagagcgtccctggcttctgggccaatgttgtatccttctcagtgtttcttcggcctttctagtggagaggtgctctcggggaagtgtaagtgaccgatgggcagctcggcgtcgatgtgactctttggggaacaaaggggagttgccacggaccaatgtggctgtggaaagccggagcaggctgggtactattgtcctgcatgcggcagagaaacccttggtgatgccgagcngcagacgtttggggcatctttttgaagagcagaagcgagttcagagcggaagaggtttttcagtgaatgaagctatttttaagggagtgtgattgctgccccttgctagtccgatctgggactgggcgtcttcggctataagcagattctgccactcctcagacaccagcaagtctctgcaaatcgcgcctccccatgtcagtgcagtcagcctcagaatcatacaccctctgtgaacacaggaggccttagtttacggggacggggaggcgaaaggagatcatacatggaagcagatctgagaatccctacccagcctctggtgctcttaggccttcttccctgttgctcctcgctttcccttccatcgtgtgtaaagtctctttgacctaaatcagattgcaaaccacccccagatgtcagccctgatcactgacgaagatgaagacatgntgagctacatggtcagcctggaggtgaggccaggaagactggggctngagggtttagcgggggagggtaagggaaataattcattcctgtaagcaagagtgagcacctcacccgaaaacctatctaagctttctccaccttgtcctgacaggtggaagaagagaagcatcctgttcatctctgcaagatcatgttgttctttcggagtaacccctacttccagaataaagtgattaccaaggaatatctggtgaacatcacaggtgacaggtggctcccaggatgggtagtggaaggaagatgggtagtggaaggaagatggtgggtggatcattgccaacgggatccagcccccttcccacaaaaactcctgtctctgtagaatacagggcttctcattccactccaattgagtggtatccggattatgaagtggaggcctatcgccg

SEQ ID NO: 72280 - DNA, 408 bp, Homo sapiens
tgtagataacattgttggattttggaacagatggaccaagaacttaaaataagcatgataatatgtttaagaaacttaggaattcagaatggtatattttatctggtttttgtccatctttgatacagttgtatgtactctttgagtgattaattattttggttcatgagtttgtttttcctggggttttcagctactctgtttggttatgtatattggggaaataatggaaatccaagttcgattcaagttcttgtctgcttctgagaggagggtgatccccaggcaacacaaaatcagcattgatcattcctgattgctgtcattttaccatgtaacaacactggacacagttgtactttgaaactcctagacagtagtggaaggagaccttcttttaaaattata

SEQ ID NO: 72281 - DNA, 367 bp, Homo sapiens
tcattttcatttttttccctcattttattctcagtctatgccatccactgatcttgaccacatttaaaagaagaagaaagtgagatagggaaaataggcagctttgtttggctgaaagagaagagctcaatttgaatgcctactgtgtgtccctatttttatagattaggcaactgatactagaagaggtgaggtaatttaccatggttgcatagcacattaggacagggtgcatatcaacatttttgtacagcaaagtctattctctgtgctaaaagcttgctgcttctgtaattccaaatttcattgaccctaagagactgcttattgtaaattgtgtctttaagtgctgtaaagaaagaaagga

SEQ ID NO: 72282 - DNA, 493 bp, Homo sapiens
atgatcagcctggaagggttgggctagggggtagtgatgaaacatggctggatggaagtgttctgggtatgtggtcttctgctgtccctggcatctctaacttaccaggcccttgtattctttttctgacctcagcaccctttgaccaacagcctagggggagatgccgtgctgcttgctgtttggaagaagtgagaggaaggggtccacctgaccattctccatgtggttcatgaagctgcccaagatccctacagctgccacttcttatcctgagtacttctataaccactgccatttttcccaaacagggtttggcctgtaattttctccatcaatcagatttttatgtcatctttcccttaggatttctgaactatcaatgaatgatacacattcttgtttcccaatatgctgatgtagacttcagtatctttctctctcagtatttggacaggaggaggcggcacacccatatgcccaggctatcatc

SEQ ID NO: 72283 - DNA, 324 bp, Homo sapiens
  misc_feature (250)..(250): n is a, c, g, or t
  misc_feature (277)..(277): n is a, c, g, or t
  misc_feature (311)..(311): n is a, c, g, or t
cagcctggatctcgctgcttcttatcacgaccactgctgccacaccacccagccaccagtcccagcctggtgtgcagcaacccccagagaccaccggactcagcggccagtgtgagccccactgtcggagcagtccctgtggcactagtccagaagcacttctgttcagggtgcccatctagctgggtattgaagagcttggcaggaacagcgggctcaccactcctcaaggttaacaatagatgaaatnagatctgatgacttaagtgggcttttnttgtccttccagattttcacaaaagccgtctttngtggggtttttat

SEQ ID NO: 72284 - DNA, 1321 bp, Homo sapiens
atgttgtgaggaagcctaggccacatggagaggccacatagatgtgttccaggcagcagccccagcaaaggtctcaatcaaccaccatatgtgtgagtgaaggaaccttcagataattttgcttcccagacttcaagtctttcagctggggtccaagacatcacaaggcagagacaagccctcctggaattccccacccaccgtgagcataagaaaacttgaaagcggtgtaaatggctcttatctgaaccacaatgaattcacatattcaagttggcttcttcggaaatttcaggccacaaatggcagtgatgcgaccaggagcagtaacacgattacaagtcgcaatttaggaagggtgctccatcatcatttcatgattctcactacagcccagacagggctgagctgtagatccacggccaccatgatgagctaagagtttctggattcagtgcctgctgttgctcctggagatttgtatcctgattgaaggctggttccatatctgttcacccagtcacctttaaaattaagtcctgggcacaaatcattagtctggcaagttacatcactgtgccacttccatccggacagaaggaacccaggtcaaggctgacaggaggagcaggagccgtcaatgagagcagacctcagaagccaacggaggtgagaagagcaccatccacagccccatcctctgaatgctgtgggaagaagtccacaaaataccaccccttggagtcagtcagtagtagagcccttgctgctggctgcaaataccccatcagaacatgtttggggtgattcttggacctggtttcaatttcttttctgccagtcagcagttgtgcttgactcacaatttgttgccatctcttgaattaaactcaggaaacaggataaagatcagaaccacattgtaaaagcttccttatggttcattttttgctgagataaataatgagcagctctgatccatgtctctggagagctcagagcacactaccaggagctcctagccacagggtgagcacaggtggctggtgttctcttgatgaggaaagacagcagtgtccaatctaccctgccttacacggagccccaggtgctctcccggactgtgttgctacctaaagcacatggcaattgcatgatgctaaccagagcagcccctcactcattagaaacatctgctttgcattatttacacaggcaaagttttcctttttactgagcctacccagttcaaacttaagtgggatttgccagctatctggctaattttatgagcaataataaagattggtgaacacttggt

SEQ ID NO: 72285 - DNA, 1630 bp, Homo sapiens
agcattacatgttattcttaacacctgccacttctctcttcccacctctatctgccttattgaacttcatctttccttcattctcttcaacttccacttcttcttgtatggtcctgttgatgccatcttgtttccgtccccagactcatcatctttaccctctgtcaactgagttcccaccctggttctctctcaagatcttcctctcatagctttcacccttggtaaacaatgaggacacatctcaaaaagaatgatgtaatttaattgccttgagttggctgggccatcatctattataaagtgctcttaaaattaaagctaatttaattctgaagaactaaggattaagaagttaagagctggggttcttacaatatggcttgcagactacaagtgtgaactgaggaggtccccaaagtcacttcttactaagtgaaagcggtgtaaatggctcttatctgaaccacaatgaattcacatattcaagttggcttcttcggaaatttcaggccacaaatggcagtgatgcgaccaggagcagtaacacgattacaagtcgcaatttaggaagggtgctccatcatcatttcatgattctcactacagcccagacaggtgggcagagcagtgttctttcccctttaatgaatgaagaagctgagcctcaaacagatgagggggcttcctgggttcacagagctctaaagggctgagctgtagatccacggccaccatgatgagctaagagtttctggattcagtgcctgctgttgctcctggagatttgtatcctgattgaaggctggttccatatctgttcacccagtcacctttaaaattaagtcctgggcacaaatcattagtctggcaagttacatcactgtgccacttccatccggacagaaggaacccaggtcaaggctgacaggaggagcaggagccgtcaatgagagcagacctcagaagccaacggaggtgagaagagcaccatccacagccccatcctctgaatgctgtgggaagaagtccacaaaataccaccccttggagtcagtcagtagtagagcccttgctgctggctgcaaataccccatcagaacatgtttggggtgattcttggacctggtttcaatttcttttctgccagtcagcagttgtgcttgactcacaatttgttgccatctcttgaattaaactcaggaaacaggataaagatcagaaccacattgtaaaagcttccttatggttcattttttgctgagataaataatgagcagctctgatccatgtctctggagagctcagagcacactaccaggagctcctagccacagggtgagcacaggtggctggtgttctcttgatgaggaaagacagcagtgtccaatctaccctgccttacacggagccccaggtgctctcccggactgtgttgctacctaaagcacatggcaattgcatgatgctaaccagagcagcccctcactcattagaaacatctgctttgcattatttacacaggcaaagttttcctttttactgagcctacccagttcaaacttaagtgggatttgccagctatctggctaattttatgagcaataataaagattggtgaacacttggt

SEQ ID NO: 72286 - DNA, 1078 bp, Homo sapiens
atgttgtgaggaagcctaggccacatggagaggccacatagatgtgttccaggcagcagccccagcaaaggtctcaatcaaccaccatatgtgtgagtgaaggaaccttcagataattttgcttcccagacttcaagtctttcagctggggtccaagacatcacaaggcagagacaagccctcctggaattccccacccaccgtgagcataagaaaacttgaaagcggtgtaaatggctcttatctgaaccacaatgaattcacatattcaagttggcttcttcggaaatttcaggccacaaatggcagtgatgcgaccaggagcagtaacacgtgccacttccatccggacagaaggaacccaggtcaaggctgacaggaggagcaggagccgtcaatgagagcagacctcagaagccaacggaggtgagaagagcaccatccacagccccatcctctgaatgctgtgggaagaagtccacaaaataccaccccttggagtcagtcagtagtagagcccttgctgctggctgcaaataccccatcagaacatgtttggggtgattcttggacctggtttcaatttcttttctgccagtcagcagttgtgcttgactcacaatttgttgccatctcttgaattaaactcaggaaacaggataaagatcagaaccacattgtaaaagcttccttatggttcattttttgctgagataaataatgagcagctctgatccatgtctctggagagctcagagcacactaccaggagctcctagccacagggtgagcacaggtggctggtgttctcttgatgaggaaagacagcagtgtccaatctaccctgccttacacggagccccaggtgctctcccggactgtgttgctacctaaagcacatggcaattgcatgatgctaaccagagcagcccctcactcattagaaacatctgctttgcattatttacacaggcaaagttttcctttttactgagcctacccagttcaaacttaagtgggatttgccagctatctggctaattttatgagcaataataaagattggtgaacacttggt

SEQ ID NO: 72287 - DNA, 1835 bp, Homo sapiens
agcattacatgttattcttaacacctgccacttctctcttcccacctctatctgccttattgaacttcatctttccttcattctcttcaacttccacttcttcttgtatggtcctgttgatgccatcttgtttccgtccccagactcatcatctttaccctctgtcaactgagttcccaccctggttctctctcaagatcttcctctcatagctttcacccttggtaaacaatgaggacacatctcaaaaagaatgatgtaatttaattgccttgagttggctgggccatcatctattataaagtgctcttaaaattaaagctaatttaattctgaagaactaaggattaagaagttaagagctggggttcttacaatatggcttgcagactacaagtgtgaactgaggaggtccccaaagtcacttcttactaagttcagataggtgatggattgaaaataatcccaatattccacaagcaacatcaacatcccccacacacccagcaccgaggaataccctcctctctagaatgtgaggccactgtgtggaggaagacaccacggtgctctactgagccatgaaagtcacgcctgacctaaacagaagactacgtcccctggctaaaagaggaaatagttgaaagcggtgtaaatggctcttatctgaaccacaatgaattcacatattcaagttggcttcttcggaaatttcaggccacaaatggcagtgatgcgaccaggagcagtaacacgattacaagtcgcaatttaggaagggtgctccatcatcatttcatgattctcactacagcccagacaggtgggcagagcagtgttctttcccctttaatgaatgaagaagctgagcctcaaacagatgagggggcttcctgggttcacagagctctaaagggctgagctgtagatccacggccaccatgatgagctaagagtttctggattcagtgcctgctgttgctcctggagatttgtatcctgattgaaggctggttccatatctgttcacccagtcacctttaaaattaagtcctgggcacaaatcattagtctggcaagttacatcactgtgccacttccatccggacagaaggaacccaggtcaaggctgacaggaggagcaggagccgtcaatgagagcagacctcagaagccaacggaggtgagaagagcaccatccacagccccatcctctgaatgctgtgggaagaagtccacaaaataccaccccttggagtcagtcagtagtagagcccttgctgctggctgcaaataccccatcagaacatgtttggggtgattcttggacctggtttcaatttcttttctgccagtcagcagttgtgcttgactcacaatttgttgccatctcttgaattaaactcaggaaacaggataaagatcagaaccacattgtaaaagcttccttatggttcattttttgctgagataaataatgagcagctctgatccatgtctctggagagctcagagcacactaccaggagctcctagccacagggtgagcacaggtggctggtgttctcttgatgaggaaagacagcagtgtccaatctaccctgccttacacggagccccaggtgctctcccggactgtgttgctacctaaagcacatggcaattgcatgatgctaaccagagcagcccctcactcattagaaacatctgctttgcattatttacacaggcaaagttttcctttttactgagcctacccagttcaaacttaagtgggatttgccagctatctggctaattttatgagcaataataaagattggtgaacacttggt

SEQ ID NO: 72288 - DNA, 1151 bp, Homo sapiens
agcattacatgttattcttaacacctgccacttctctcttcccacctctatctgccttattgaacttcatctttccttcattctcttcaacttccacttcttcttgtatggtcctgttgatgccatcttgtttccgtccccagactcatcatctttaccctctgtcaactgagttcccaccctggttctctctcaagatcttcctctcatagctttcacccttggtaaacaatgaggacacatctcaaaaagaatgatgtaatttaattgccttgagttggctgggccatcatctattataaagtgctcttaaaattaaagctaatttaattctgaagaactaaggattaagaagttaagagctggggttcttacaatatggcttgcagactacaagtgtgaactgaggaggtccccaaagtcacttcttactaagttcagataggtgatggattgaaaataatcccaatattccacaagcaacatcaacatcccccacacacccagcaccgaggaataccctcctctctagaatgtgaggccactgtgtggaggaagacaccacggtgctctactgagccatgaaagtcacgcctgacctaaacagaagactacgtcccctggctaaaagaggaaatagttgaaagcggtgtaaatggctcttatctgaaccacaatgaattcacatattcaagttggcttcttcggaaatttcaggccacaaatggcagtgatgcgaccaggagcagtaacacgattacaagtcgcaatttaggaagggtgctccatcatcatttcatgattctcactacagcccagacaggtgggcagagcagtgttctttcccctttaatgaatgaagaagctgagcctcaaacagatgagggggcttcctgggttcacagagctctaaaggtgggaacctagctttttcagtgacattagctagatgtggtgggcacttctcactagaaaaacaagaattaaatcaacgtgaggtccagaactggtgtcccctgttggaaaaataaattgaaactaatgttctggcaataggtagcaaaaactttaaacctatggtaccatctgtcttgacaatcttacctctagaaattgaccccttaataaattaaaactgtgtctttattagc

SEQ ID NO: 72289 - DNA, 360 bp, Homo sapiens
aaccaacctgtaggtaactttgtttccttaaccttggtgtctgtcttagttgatacagcggtgtttattttgatctttcagattacaagtcgcaatttaggaagggtgctccatcatcatttcatgattctcactacagcccagacaggtgggcagagcagtgttctttcccctttaatgaatgaagaagctgagcctcaaacagatgagggggcttcctgggttcacagagctctaaaggtgggaacctagctttttcagtgacattagctagatgtggtgggcacttctcactagaaaaacaagaattaaatcaacgtgaggtccagaactggtgtcccctgttggaaaaataaattg

SEQ ID NO: 72290 - DNA, 757 bp, Homo sapiens
ttattgctctcagcacctctgcaacattgggaaattagagagtatttttttacagatgagaaaactcaggcccaaagaggttaagaaacttggccaaggttatacaataagttaggaggaaaggagtacttaaatttgcattttctttctccagatccagtgctcactttgggactccgctgctgccaatattatttcagacgtttcccattaacaatacacatcaggtgaccagaaatcctggtttgcccaggaatgtgctggcttactcctgttttcctggcttaattattaaaagcacccgccttgactctcagaagtgtcttggtttgggtgataagtgatatggtcccccgagctgtatggcaagcccagagttggttttcagtaaatgcttgactgaatcactgtttggagattctcacacctgattttgatatgatcccatttcttttgcttgtgtgtgggttggcagctctatgacctgatgaccatggctttcaaatatcaagtattgctgtgtccccgacccaaggatgtgctgctggtcactttcaatcacttggataccatcaagggattcatccgagactccccaaccatcctgcagcaagtggacgagactttgcggcagctgacagaagtaagagtgccatcagtgtctcgcctctcagccccagtactttttctcatccctctgttaagaacaggtagatctatgacagagagaacaggatgaggaatggcaaagcctgcc

SEQ ID NO: 72291 - DNA, 1488 bp, Homo sapiens
actattgggacgctgcggcctggccttcaggccactggctaccgaaccccggggctcttcaccagtccagctcgtttccagcaccatgtcggtgcggacgctaccgctgctcttcttgaacttgggcggggagatgctttacatcctcgaccaacggctgcgggcccagaacatcccgggagacaaggcccgcaaagttctgaatgacatcatctccaccatgttcaatagaaagtttatggaggaattattcaagcctcaagagctctactccaagaaggccctgaggactgtctatgagcgcctggctcatgcctccattatgaaactgaaccaggccagcatggataagctctatgacctgatgaccatggctttcaaatatcaagtattgctgtgtccccgacccaaggatgtgctgctggtcactttcaatcacttggataccatcaagggattcatccgagactccccaaccatcctgcagcaagtggacgagactttgcggcagctgacagaaatatatggtggtctctctgcaggggagttccagctgatccggcagacactcctcatcttcttccaagacctgcacatccgagtatccatgtttctaaaggacaaagttcagaataataacggtcgctttgtgttgccggtgtccgggcctgttccttggggaactgaagttccaggactcatcagaatgttcaacaacaaaggtgaagaagtgaagaggatagaattcaagcatggtggaaactatgtccctgcacccaaagaaggttcttttgaactttatggagaccgagtcctgaaactgggaactaacatgtacagcgtgaatcagcctgtggaaactcatgtgtctggatcatcaaagaacttagcctcatggacccaggaaagcattgctccaaaccctcttgctaaagaagagctgaatttcttggccaggctgatgggagggatggagattaagaaacccagtggccctgagcccggattccggttgaatctctttaccaccgatgaagaagaggaacaagcagcgctaaccaggccagaagagttatcctatgaagttatcaacatacaagccacccaggaccagcaacggagcgaggagctggctcgaatcatgggggagtttgagatcacggagcagccaaggctgagcaccagcaaaggggacgatttgctcgccatgatggatgagttatagctgttctgaccaggcgtcctctgcccccagggagaggctgctggatggtgacccctggggaatgccccatggcccagaatgatgctgctagttttctactgagtgaagccattacgtctatttcttatttatgttgtaaggaactgtgtgagtctcccttgaggagcactcactcttgaaggcacacacatacacatattttcagtgaaatatattctgacttttaaacttgaaaaaaaaaataaataaaacataaaaaaggg

SEQ ID NO: 72292 - DNA, 2057 bp, Homo sapiens
actattgggacgctgcggcctggccttcaggccactggctaccgaaccccggggctcttcaccagtccagctcgtttccagcaccatgtcggtgcggacgctaccgctgctcttcttgaacttgggcggggagatgctttacatcctcgaccaacggctgcgggcccagaacatcccgggagacaaggcccgcaaagttctgaatgacatcatctccaccatgttcaatagaaagtttatggaggaattattcaagcctcaagagctctactccaagaaggccctgaggactgtctatgagcgcctggctcatgcctccattatgaaactgaaccaggccagcatggataagctctatgacctgatgaccatggctttcaaatatcaagtattgctgtgtccccgacccaaggatgtgctgctggtcactttcaatcacttggataccatcaagggattcatccgagactccccaaccatcctgcagcaagtggacgagactttgcggcagctgacagaaatatatggtggtctctctgcaggggagttccagctgatccggcagacactcctcatcttcttccaagacctgcacatccgagtatccatgtttctaaaggacaaagttcagaataataacggtcgctttgtgttgccggtgtccgggcctgttccttggggaactgaagttccaggactcatcagaatgttcaacaacaaaggtgaagaagtgaagaggatagaattcaagcatggtggaaactatgtccctgcacccaaagaaggttcttttgaactttatggagaccgagtcctgaaactgggaactaacatgtacagcgtgaatcagcctgtggaaactcatgtgtctggatcatcaaagaacttagcctcatggacccaggaaagcattgctccaaaccctcttgctaaagaagagctgaatttcttggccaggctgatgggagggatggagattaagaaacccagtggccctgagcccggattccggttgaatctctttaccaccgatgaagaagaggaacaagcagcgctaaccaggccagaagagttatcctatgaagttatcaacatacaagccacccaggaccagcaacggagcgaggagctggctcgaatcatgggggagtttgagatcacggagcagccaaggctgagcaccagcaaaggggacgatttgctcgccatgatggatgagttatagctgttctgaccaggcgtcctctgcccccagggagaggctgctggatggtgacccctggggaatgccccatggcccagaatgatgctgctagttttctactgagtgaagccattacgtctatttcttatttatgttgtaaggaactgtgtgagtctcccttgaggagcactcactcttgaaggcacacacatacacatattttcagtgaaatatattctgacttttaaacttgacctttcccattttattcttaattgctgaggcaggagaatcgcttgaacccaggaggtagaggttgcagtgagccaagatcatgccattgcactccagcctgggcaacaagagcgaaactctgtctcaattaaaaaaaaaaaaaagaatataaatcaccaaataaatgttaattgctccctacccattaaagttacacttccttacctataaagacaccctccccctccacatactcacgaaaagtctgttggggaggagaagcatattgtgctataaaacacctgttgcatcagatgtacaaagtgcctttcgttttagtctcttttcagcaatctggccaccattcaggggggcctgactgggtgacagatgaatgggaaggttctgacctgttttgagtccggctcccaccttgctgtcacatatcagaatgtcactgctctgagtgtgtcccagggccttggaggtgggccgtgaggtgccgagaagcagccgcagcctcctccctccacctatcccagagcgatgctggtgatttcaaacgtatctgtcctatcagtaaataaacaagatgcagatctctggtatgacagctcca

SEQ ID NO: 72293 - DNA, 1388 bp, Homo sapiens
actattgggacgctgcggcctggccttcaggccactggctaccgaaccccggggctcttcaccagtccagctcgtttccagcaccatgtcggtgcggacgctaccgctgctcttcttgaacttgggcggggagatgctttacatcctcgaccaacggctgcgggcccagaacatcccgggagacaaggcccgcaaagttctgaatgacatcatctccaccatgttcaatagaaagtttatggaggaattattcaagcctcaagagctctactccaagaaggccctgaggactgtctatgagcgcctggctcatgcctccattatgaaactgaaccaggccagcatggataagctctatgacctgatgaccatggctttcaaatatcaagtattgctgtgtccccgacccaaggatgtgctgctggtcactttcaatcacttggataccatcaagggattcatccgagactccccaaccatcctgcagcaagtggacgagactttgcggcagctgacagaaatatatggtggtctctctgcaggggagttccagctgatccggcagacactcctcatcttcttccaagacctgcacatccgagtatccatgtttctaaaggacaaagttcagaataataacggtcgctttgtgttgccggtgtccgggcctgttccttggggaactgaagttccaggactcatcagaatgttcaacaacaaaggtgaagaagtgaagaggatagaattcaagcatggtggaaactatgtccctgcacccaaagaaggttcttttgaactttatggagaccgagtcctgaaactgggaactaacatgtacagcgtgaatcagcctgtggaaactcatgtgtctggatcatcaaagaacttagcctcatggacccaggaaagcattgctccaaaccctcttgctaaagaagagctgaatttcttggccaggctgatgggagggatggagattaagaaacccagtggccctgagcccggattccggttgaatctctttaccaccgatgaagaagaggaacaagcagcgctaaccaggccagaagagttatcctatgaagttatcaacatacaagccacccagtctcttttcagcaatctggccaccattcaggggggcctgactgggtgacagatgaatgggaaggttctgacctgttttgagtccggctcccaccttgctgtcacatatcagaatgtcactgctctgagtgtgtcccagggccttggaggtgggccgtgaggtgccgagaagcagccgcagcctcctccctccacctatcccagagcgatgctggtgatttcaaacgtatctgtcctatcagtaaataaacaagatgcagatctctggtatgacagctcca

SEQ ID NO: 72294 - DNA, 1114 bp, Homo sapiens
actattgggacgctgcggcctggccttcaggccactggctaccgaaccccggggctcttcaccagtccagctcgtttccagcaccatgtcggtgcggacgctaccgctgctcttcttgaacttgggcggggagatgctttacatcctcgaccaacggctgcgggcccagaacatcccgggagacaaggcccgcaaagatgaatggacagaggtggacagaaaacgagttctgaatgacatcatctccaccatgttcaatagaaagtttatggaggaattattcaagcctcaagagctctactccaagaaggccctgaggactgtctatgagcgcctggctcatgcctccattatgaaactgaaccaggccagcatggataagctctatgacctgatgaccatggctttcaaatatcaagtattgctgtgtccccgacccaaggatgtgctgctggtcactttcaatcacttggataccatcaagggattcatccgagactccccaaccatcctgcagcaagtggacgagactttgcggcagctgacagaaatatatggtggtctctctgcaggggagttccagctgatccggcagacactcctcatcttcttccaagacctgcacatccgaagagagtgcttctggaagcatatgcaagaaactgttcacagtgcacagtgttgccttccaggagtggggaactatatggaggacaggagaaggagactgactttccatcatgtatacccttttgagaactttgagttttgtacctgggcaaaataaaattttaaaaaggggaagaaaaaaaaaaaaaaaaaaaaaaaaaaaaaaaaaaaaaaaaaaaaaaaaaaaaaaaaaaaaaataaagggggggaaaaataaaaaaaaaaaccttataatgagaagtattacaacaatactgctcgcctgtttacaaaaactcagattcgtaaaaaactttcgtaccccacctaataaactcttgtaggatattcttccttttacccgcctgttggtataatctataagacttccccaaatctcgctttttacaaactgtccgatccttaatagttacatgtaacacttttggcatcattaatccgctaa

SEQ ID NO: 72295 - DNA, 1316 bp, Homo sapiens
actattgggacgctgcggcctggccttcaggccactggctaccgaaccccggggctcttcaccagtccagctcgtttccagcaccatgtcggtgcggacgctaccgctgctcttcttgaacttgggcggggagatgctttacatcctcgaccaacggctgcgggcccagaacatcccgggagacaaggcccgcaaagttctgaatgacatcatctccaccatgttcaatagaaagtttatggaggaattattcaagcctcaagagctctactccaagaaggccctgaggactgtctatgagcgcctggctcatgcctccattatgaaactgaaccaggccagcatggataagctctatgacctgatgaccatggctttcaaatatcaagtattgctgtgtccccgacccaaggatgtgctgctggtcactttcaatcacttggataccatcaagggattcatccgagactccccaaccatcctgcagcaagtggacgagactttgcggcagctgacagaaatatatggtggtctctctgcaggggagttccagctgatccggcagacactcctcatcttcttccaagacctgcacatccgagtatccatgtttctaaaggacaaagttcagaataataacggtcgctttgtgttgccggtgtccgggcctgttccttggggaactgaagttccaggactcatcagaatgttcaacaacaaaggtgaagaagtgaagaggatagaattcaagcatggtggaaactatgtccctgcacccaaagaaggttcttttgaactttatggagaccgagtcctgaaactgggaactaacatgtaagcaaattcttctctgagtgaattcaagtccaagggaggtcacttcatttaaaaaaaaaaaaagagaaacagccagacttctgctatgaaaatccctgccgacaataggagtaatttccccttaggtacactgcatacagaggcctgacatttcaaagggcacccaggaacgccaaacataaggcaactcaacagaatgaaaagatacatgatgttcaatagccatgcaagagaactagccaaaatctgtgttgcagtggaaatccagaaagacttatccgttctgtaaagctgcatatattttcagtgatgcgtgttactcttcacaagaggaggcattgccacccagcctccccaggtgtttttctttaggaagaagtgaaatgtgaatggttaacacacactcagttgcattctgtacccacagcacctttctggatgctatttaatgtctcagaataaaagctacaaactatgct

SEQ ID NO: 72296 - DNA, 1049 bp, Homo sapiens
actattgggacgctgcggcctggccttcaggccactggctaccgaaccccggggctcttcaccagtccagctcgtttccagcaccatgtcggtgcggacgctaccgctgctcttcttgaacttgggcggggagatgctttacatcctcgaccaacggctgcgggcccagaacatcccgggagacaaggcccgcaaagttctgaatgacatcatctccaccatgttcaatagaaagtttatggaggaattattcaagcctcaagagctctactccaagaaggccctgaggactgtctatgagcgcctggctcatgcctccattatgaaactgaaccaggccagcatggataagctctatgacctgatgaccatggctttcaaatatcaagtattgctgtgtccccgacccaaggatgtgctgctggtcactttcaatcacttggataccatcaagggattcatccgagactccccaaccatcctgcagcaagtggacgagactttgcggcagctgacagaaatatatggtggtctctctgcaggggagttccagctgatccggcagacactcctcatcttcttccaagacctgcacatccgagtatccatgtttctaaaggacaaagttcagaataataacggtcgctttgtgttgccggtgtccgggcctgttccttggggaactgaagttccaggactcatcagaatgttcaacaacaaaggtgaagaagtgaagaggatagaattcaagcatggtggaaactatgtccctgcacccaaagaaggttcttttgaactttatggagaccgagtcctgaaactgggaactaacatgtaagcaaattcttctctgagtgaattcaagtccaagggaggtcacttcatttaaaaaaaaaaaaagagaaacagccagacttctgctatgaaaatccctgccgacaataggagtaatttccccttaggtacactgcatacagaggcctgacatttcaaagggcactgtttggactctgcgcactgtttggactctgggcactgtttggactctg

SEQ ID NO: 72297 - DNA, 1266 bp, Homo sapiens
acccggcaggatgcactgtgacatcggtctcctctgcatcaccgtgagtcaccaaacagcaccctagattgggtgcatgggaggcacgtgtggtatgcacctttcccttctgcattctagctgagccgcttccctgggcgggagcagactttgcaggatgcagcaggaggccaagtctcactggaatccatgtaaaatgtctccagccagggctgcccttactgcttcagaaaggcgcagcagccctctgccataggctccttcccaggactgagtaactggcaggttcagacccattcaatcctatggaaggaatatccagaatggcagagggctggagagaaactaagttgagctggacattgcctgagattgggccaactacaggaacctctccatcccctcacacctgggacggaccaaggtgaacatcattctagaatgtaatggaagctgccctttggcttttccaaaggcaaagggtttagatacagaatgtaaatcaccaagggctgggcatggtggctcatgcctgtaatccccagcactttgggaggccgaggcgggcagatcagttgaggtcaggagttcgagaccagcctgaccaacatagagaaaccctgtctctactaaaaatacaaaattagccaggcctggtagcgcatgcctgtaatcccagctactcaggaggctgaggcaggagaatcgcttgaacccaggaggtagaggttgcagtgagccaagatcatgccattgcactccagcctgggcaacaagagcgaaactctgtctcaattaaaaaaaaaaaaaagaatataaatcaccaaataaatgttaattgctccctacccattaaagttacacttccttacctataaagacaccctccccctccacatactcacgaaaagtctgttggggaggagaagcatattgtgctataaaacacctgttgcatcagatgtacaaagtgcctttcgttttagtctcttttcagcaatctggccaccattcaggggggcctgactgggtgacagatgaatgggaaggttctgacctgttttgagtccggctcccaccttgctgtcacatatcagaatgtcactgctctgagtgtgtcccagggccttggaggtgggccgtgaggtgccgagaagcagccgcagcctcctccctccacctatcccagagcgatgctggtgatttcaaacgtatctgtcctatcagtaaataaacaagatgcagatctctggtatgacagctcca

SEQ ID NO: 72298 - DNA, 385 bp, Homo sapiens
ctcttcatgcccttttacctctcatttccctcataggaccagcaacggagcgaggagctggctcgaatcatgggggagtttgagatcacggagcagccaaggctgagcaccagcaaaggggacgatttgctcgccatgatggatgagttatagctgttctgaccaggcgtcctctgcccccagggagaggctgctggatggtgacccctggggaatgccccatggcccagaatgatgctgctagttttctactgagtgaagccattacgtctatttcttatttatgttgtaaggaactgtgtgagtctcccttgaggagcactcactcttgaaggcacacacatacacatattttcagtgaaatatattctgacttttaaacttg

SEQ ID NO: 72299 - DNA, 1458 bp, Homo sapiens
actattgggacgctgcggcctggccttcaggccactggctaccgaaccccggggctcttcaccagtccagctcgtttccagcaccatgtcggtgcggacgctaccgctgctcttcttgaacttgggcggggagatgctttacatcctcgaccaacggctgcgggcccagaacatcccgggagacaaggcccgcaaagttctgaatgacatcatctccaccatgttcaatagaaagtttatggaggaattattcaagcctcaagagctctactccaagaaggccctgaggactgtctatgagcgcctggctcatgcctccattatgaaactgaaccaggccagcatggataagctctatgacctgatgaccatggctttcaaatatcaagtattgctgtgtccccgacccaaggatgtgctgctggtcactttcaatcacttggataccatcaagggattcatccgagactccccaaccatcctgcagcaagtggacgagactttgcggcagctgacagaaatatatggtggtctctctgcaggggagttccagctgatccggcagacactcctcatcttcttccaagacctgcacatccgagtatccatgtttctaaaggacaaagttcagaataataacggtcgctttgtgttgccggtgtccgggcctgttccttggggaactgaagttccaggactcatcagaatgttcaacaacaaaggtgaagaagtgaagaggatagaattcaagcatggtggaaactatgtccctgcacccaaagaaggttcttttgaactttatggagaccgagtcctgaaactgggaactaacatgtacagcgtgaatcagcctgtggaaactcatgtgtctggatcatcaaagaacttagcctcatggacccaggaaagcattgctccaaaccctcttgctaaagaagagctgaatttcttggccaggctgatgggagggatggagattaagaaacccagtggccctgagcccggattccggttgaatctctttaccaccgatgaagaagaggaacaagcagcgctaaccaggccagaagagttatcctatgaagttatcaacatacaagccacccaggaccagcaacggagcgaggagctggctcgaatcatgggggagtttgagatcacggagcagccaaggctgagcaccagcaaaggggacgatttgctcgccatgatggatgagttatagctgttctgaccaggcgtcctctgcccccagggagaggctgctggatggtgacccctggggaatgccccatggcccagaatgatgctgctagttttctactgagtgaagccattacgtctatttcttatttatgttgtaaggaactgtgtgagtctcccttgaggagcactcactcttgaaggcacacacatacacatattttcagtgaaatatattctgacttttaaacttga

SEQ ID NO: 72300 - DNA, 1611 bp, Homo sapiens
ttattgctctcagcacctctgcaacattgggaaattagagagtatttttttacagatgagaaaactcaggcccaaagaggttaagaaacttggccaaggttatacaataagttaggaggaaaggagtacttaaatttgcattttctttctccagatccagtgctcactttgggactccgctgctgccaatattatttcagacgtttcccattaacaatacacatcaggtgaccagaaatcctggtttgcccaggaatgtgctggcttactcctgttttcctggcttaattattaaaagcacccgccttgactctcagaagtgtcttggtttgggtgataagtgatatggtcccccgagctgtatggcaagcccagagttggttttcagtaaatgcttgactgaatcactgtttggagattctcacacctgattttgatatgatcccatttcttttgcttgtgtgtgggttggcagctctatgacctgatgaccatggctttcaaatatcaagtattgctgtgtccccgacccaaggatgtgctgctggtcactttcaatcacttggataccatcaagggattcatccgagactccccaaccatcctgcagcaagtggacgagactttgcggcagctgacagaaatatatggtggtctctctgcaggggagttccagctgatccggcagacactcctcatcttcttccaagacctgcacatccgagtatccatgtttctaaaggacaaagttcagaataataacggtcgctttgtgttgccggtgtccgggcctgttccttggggaactgaagttccaggactcatcagaatgttcaacaacaaaggtgaagaagtgaagaggatagaattcaagcatggtggaaactatgtccctgcacccaaagaaggttcttttgaactttatggagaccgagtcctgaaactgggaactaacatgtacagcgtgaatcagcctgtggaaactcatgtgtctggatcatcaaagaacttagcctcatggacccaggaaagcattgctccaaaccctcttgctaaagaagagctgaatttcttggccaggctgatgggagggatggagattaagaaacccagtggccctgagcccggattccggttgaatctctttaccaccgatgaagaagaggaacaagcagcgctaaccaggccagaagagttatcctatgaagttatcaacatacaagccacccaggaccagcaacggagcgaggagctggctcgaatcatgggggagtttgagatcacggagcagccaaggctgagcaccagcaaaggggacgatttgctcgccatgatggatgagttatagctgttctgaccaggcgtcctctgcccccagggagaggctgctggatggtgacccctggggaatgccccatggcccagaatgatgctgctagttttctactgagtgaagccattacgtctatttcttatttatgttgtaaggaactgtgtgagtctcccttgaggagcactcactcttgaaggcacacacatacacatattttcagtgaaatatattctgacttttaaacttgaaaaaaaaaataaataaaacataaaaaaggg

SEQ ID NO: 72301 - DNA, 1189 bp, Homo sapiens
actattgggacgctgcggcctggccttcaggccactggctaccgaaccccggggctcttcaccagtccagctcgtttccagcaccatgtcggtgcggacgctaccgctgctcttcttgaacttgggcggggagatgctttacatcctcgaccaacggctgcgggcccagaacatcccgggagacaaggcccgcaaagttctgaatgacatcatctccaccatgttcaatagaaagtttatggaggaattattcaagcctcaagagctctactccaagaaggccctgaggactgtctatgagcgcctggctcatgcctccattatgaaactgaaccaggccagcatggataagctctatgacctgatgaccatggctttcaaatatcaagtattgctgtgtccccgacccaaggatgtgctgctggtcactttcaatcacttggataccatcaagggattcatccgagactccccaaccatcctgcagcaagtggacgagactttgcggcagctgacagaaatatatggtggtctctctgcaggggagttccagctgatccggcagacactcctcatcttcttccaagacctgcacatccgagtatccatgtttctaaaggacaaagttcagaataataacggtcgctttgtgttgccggtgtccgggcctgttccttggggaactgaagttccaggactcatcagaatgttcaacaacaaaggtgaagaagtgaagaggatagaattcaagcatggtggaaactatgtccctgcacccaaagaaggttcttttgaactttatggagaccgagtcctgaaactgggaactaacatgtacagcgtgaatcagcctgtggaaactcatgtgtctggatcatcaaagaacttagcctcatggacccaggaaagcattgctccaaaccctcttgctaaagaagagctgaatttcttggccaggctgatgggagggatggagattaagaaacccagtggccctgagcccggattccggttgaatctctttaccaccgatgaagaagaggagtatgttttaaacctgtttcgttaaagacatataaaaatcccaagcatgacaagaacacaaaatgactattacaaaccagtggcacttataaatatttgtgtaaatatcacaaataaaataccaacaaatttaataatctaaata

SEQ ID NO: 72302 - DNA, 1064 bp, Homo sapiens
actattgggacgctgcggcctggccttcaggccactggctaccgaaccccggggctcttcaccagtccagctcgtttccagcaccatgtcggtgcggacgctaccgctgctcttcttgaacttgggcggggagatgctttacatcctcgaccaacggctgcgggcccagaacatcccgggagacaaggcccgcaaagttctgaatgacatcatctccaccatgttcaatagaaagtttatggaggaattattcaagcctcaagagctctactccaagaaggccctgaggactgtctatgagcgcctggctcatgcctccattatgaaactgaaccaggccagcatggataagctctatgacctgatgaccatggctttcaaatatcaagtattgctgtgtccccgacccaaggatgtgctgctggtcactttcaatcacttggataccatcaagggattcatccgagactccccaaccatcctgcagcaagtggacgagactttgcggcagctgacagaaatatatggtggtctctctgcaggggagttccagctgatccggcagacactcctcatcttcttccaagacctgcacatccgagtatccatgtttctaaaggacaaagttcagaataataacggtcgctttgtgttgccggtgtccgggcctgttccttggggaactgaagttccaggactcatcagaatgttcaacaacaaaggtgaagaagtgaagaggatagaattcaagcatggtggaaactatgtccctgcacccaaagaaggttcttttgaactttatggagaccgagtcctgaaactgggaactaacatgtacagcgtgaatcagcctgtggaaactcatgtgtctggatcatcaaagaacttagcctcatggacccaggtgagcttctgccttccttgcctaccctcacagcttctctctagatacggaagtctacataaagagaggtgagaacgctttagatttcggatctagccaacatttcccctgttgtgtgcaatcttctccattccaccttacgagtacaacgtgccggtgg

SEQ ID NO: 72303 - DNA, 744 bp, Homo sapiens
ggggaccacttctctgggacacattgccttctgttttctccagcatgcgcttgctccagctcctgttcagggccagccctgccaccctgctcctggttctctgcctgcagttgggggccaacaaagctcaggacaacactcggaagatcataataaagaattttgacattcccaagtcagtacgtccaaatgacgaagtcactgcagtgcttgcagttcaaacagaattgaaagaatgcatggtggttaaaacttacctcattagcagcatccctctacaaggtgcatttaactataagtatactgcctgcctatgtgacgacaatccaaaaaccttctactgggacttttacaccaacagaactgtgcaaattgcagccgtcgttgatgttattcgggaattaggcatctgccctgatgatgctgctgtaatccccatcaaaaacaaccggttttatactattgaaatcctaaaggtagaataatggaagccctgtctgtttgccacacccaggtgatttcctctaaagaaacttggctggaatttctgctgtggtctataaaataaacttcttaacatgcttaagcttaagtgaacagcgaccccacacatctctttttccgacgcccctgcccccctagaaagtttttagacacaccttgggccgggtccccaaaggttgtcaacttggctcattttccaacacctcccgaccacgcccggggcattcccctctaaaaccg

SEQ ID NO: 72304 - DNA, 577 bp, Homo sapiens
ccgggctgcaggaattcggcacgaggttttctccagcatgcgcttgctccagctcctgttcagggccagccctgccaccctgctcctggttctctgcctgcagttgggggccaacaaagctcaggacaacactcggaagatcataataaagaattttgacattcccaagtcagtacgtccaaatgacgaagtcactgcagtgcttgcagttcaaacagaattgaaagaatgcatggtggttaaaacttacctcattagcagcatccctctacaaggtgcatttaactataagtatactgcctgcctatgtgacgacaatccaaaaaccttctactgggacttttacaccaacagaactgtgcaaattgcagccgtcgttgatgttattcgggaattaggcatctgccctgatgatgctgctgtaatccccatcaaaaacaaccggttttatactattgaaatcctaaaggtagaataatggaagccctgtctgtttgccacacccaggtgatttcctctaaagaaacttggctggaatttctgctgtggtctataaaataaacttcttaacatgctt

SEQ ID NO: 72305 - DNA, 507 bp, Homo sapiens
gacctcaagcttttctcttaagactttcaactgatccaatgagtctgacccatattatggagtcggaagatcataataaagaattttgacattcccaagtcagtacgtccaaatgacgaagtcactgcagtgcttgcagttcaaacagaattgaaagaatgcatggtggttaaaacttacctcattagcagcatccctctacaaggtgcatttaactataagtatactgcctgcctatgtgacgacaatccaaaaaccttctactgggacttttacaccaacagaactgtgcaaattgcagccgtcgttgatgttattcgggaattaggcatctgccctgatgatgctgctgtaatccccatcaaaaacaaccggttttatactattgaaatcctaaaggtagaataatggaagccctgtctgtttgccacacccaggtgatttcctctaaagaaacttggctggaatttctgctgtggtctataaaataaacttcttaacatgctt

SEQ ID NO: 72306 - DNA, 595 bp, Homo sapiens
tccaggggattccaatgctgaacaattgatccaagccccataatttccctcccttgcccatcctgtgccccttgccctgttcatggctcccccctcactcaaagattggtctctgatcctggtgttctgattctctcttcccacaatcagtcggaagatcataataaagaattttgacattcccaagtcagtacgtccaaatgacgaagtcactgcagtgcttgcagttcaaacagaattgaaagaatgcatggtggttaaaacttacctcattagcagcatccctctacaaggtgcatttaactataagtatactgcctgcctatgtgacgacaatccaaaaaccttctactgggacttttacaccaacagaactgtgcaaattgcagccgtcgttgatgttattcgggaattaggcatctgccctgatgatgctgctgtaatccccatcaaaaacaaccggttttatactattgaaatcctaaaggtagaataatggaagccctgtctgtttgccacacccaggtgatttcctctaaagaaacttggctggaatttctgctgtggtctataaaataaacttcttaacatgctt

SEQ ID NO: 72307 - DNA, 584 bp, Homo sapiens
ggggaccacttctctgggacacattgccttctgttttctccagcatgcgcttgctccagctcctgttcagggccagccctgccaccctgctcctggttctctgcctgcagttgggggccaacaaagctcaggacaacactcggaagatcataataaagaattttgacattcccaagtcagtacgtccaaatgacgaagtcactgcagtgcttgcagttcaaacagaattgaaagaatgcatggtggttaaaacttacctcattagcagcatccctctacaaggtgcatttaactataagtatactgcctgcctatgtgacgacaatccaaaaaccttctactgggacttttacaccaacagaactgtgcaaattgcagccgtcgttgatgttattcgggaattaggcatctgccctgatgatgctgctgtaatccccatcaaaaacaaccggttttatactattgaaatcctaaaggtagaataatggaagccctgtctgtttgccacacccaggtgatttcctctaaagaaacttggctggaatttctgctgtggtctataaaataaacttcttaacatgctt

SEQ ID NO: 72308 - DNA, 737 bp, Homo sapiens
ccgggctgcaggaattcggcacgaggttttctccagcatgcgcttgctccagctcctgttcagggccagccctgccaccctgctcctggttctctgcctgcagttgggggccaacaaagctcaggacaacactcggaagatcataataaagaattttgacattcccaagtcagtacgtccaaatgacgaagtcactgcagtgcttgcagttcaaacagaattgaaagaatgcatggtggttaaaacttacctcattagcagcatccctctacaaggtgcatttaactataagtatactgcctgcctatgtgacgacaatccaaaaaccttctactgggacttttacaccaacagaactgtgcaaattgcagccgtcgttgatgttattcgggaattaggcatctgccctgatgatgctgctgtaatccccatcaaaaacaaccggttttatactattgaaatcctaaaggtagaataatggaagccctgtctgtttgccacacccaggtgatttcctctaaagaaacttggctggaatttctgctgtggtctataaaataaacttcttaacatgcttaagcttaagtgaacagcgaccccacacatctctttttccgacgcccctgcccccctagaaagtttttagacacaccttgggccgggtccccaaaggttgtcaacttggctcattttccaacacctcccgaccacgcccggggcattcccctctaaaaccg

SEQ ID NO: 72309 - DNA, 1677 bp, Homo sapiens
catggcattcctaaagttctctttgtttgctaatacaccacattatcctcaatgctacctctgaaatcacactatcaaatagcccctactatgtaattctgtaactttttttcctgaatgtttaggtctattttggcatgcagggattaagaaaatagctatctgagcatatattttatagttcactaatgaaccctactttgaccctgtgggttaatgaatgaaaagtatctgctattatggtgtggtttcatcttatcaattacatatttttgttttgaaatttgtcacctttgtcttcaccattcttttctcttggacagactgttagccccttaactcatgtacttgccttgacttaagttaccagtctgtccaagagaaaagaattacattcatggcaaatgcccccagtcaggcacaacataccatatacataatattcttgatgagcttaaagtagccacacagcactcagggcagcctccactaactgattggaaataagcctatttgccatatctccctgaaactttctattaacaaagccacaaaacgcttaaacaaagaaaaattagataatatcaatagcccatcttctaacacattgcctagctcattactttcaatacatattttccaaactaaaaattaaaatctcaactctttaagagaagtttcgtaattttgtagtataagagattatcctggcaatatagttttaatgccaatatattgaaacttacatgacatttcagtggttttgcagtgttttcccaagtatggtacctttaccactgaaggtacacagtgatttctgggtgttaaacagatgaacattttttattttaatagctatacaatataaccagcaaataaaatccatgttttcatggatattattgcttagagttagttaagttttaaaatgtgatttaaaggaaaatattaagtactagtacaagagatacccagtatgacagaaatgatagtagaaggcaaaagacaagtttaagaaatgctggtttgtgtcagcagtgggcagaaaattggggactcggggctgccatgagaatgataggtgtttgatcaccacagctataggagttctttgaaagtagatctggacattttgaaatagtcaaggggaggtgtcctcagggatgtcataactgttgacctcaagaccaatgcatcagttagaaaaacattttaaggatgctcagcactgctatgtatcacagggtccctccataggacatacatacttgatctgctagcgtttttgtcatacgttagaatgaatgaatatgtgttggaatgtcttgacacagttaacctgaacacatacagctggaatccccctgttgcagttgttattatatgtaatataatagcaattgcagacagcttggattctttctcacagatattccttttgttcaattagaaattctacataattctggccgagcacagtggatcacttgaggtcaggaattcaagaccagcctggccaacatggtgaaaccccgtctttacttaaaatacaaaaattagccaggcgtggtggcgggcacctgtaatcccagctactcgggaggcagaggttgcagtgatccaagatcacgccattgcactctagcctgggcgacaagaaagaaattccatctcaaa

SEQ ID NO: 72310 - DNA, 1590 bp, Homo sapiens
catggcattcctaaagttctctttgtttgctaatacaccacattatcctcaatgctacctctgaaatcacactatcaaatagcccctactatgtaattctgtaactttttttcctgaatgtttaggtctattttggcatgcagggattaagaaaatagctatctgagcatatattttatagttcactaatgaaccctactttgaccctgtgggttaatgaatgaaaagtatctgctattatggtgtggtttcatcttatcaattacatatttttgttttgaaatttgtcacctttgtcttcaccattcttttctcttggacagactgttagccccttaactcatgtacttgccttgacttaagttaccagtctgtccaagagaaaagaattacattcatggcaaatgcccccagtcaggcacaacataccatatacataatattcttgatgagcttaaagtagccacacagcactcagggcagcctccactaactgattggaaataagcctatttgccatatctccctgaaactttctattaacaaagccacaaaacgcttaaacaaagaaaaattagataatatcaatagcccatcttctaacacattgcctagctcattactttcaatacatattttccaaactaaaaattaaaatctcaactctttaagagaagtttcgtaattttgtagtataagagattatcctggcaatatagttttaatgccaatatattgaaacttacatgacatttcagtggttttgcagtgttttcccaagtatggtacctttaccactgaaggtacacagtgatttctgggtgttaaacagatgaacattttttattttaatagctatacaatataaccagcaaataaaatccatgttttcatggatattattgcttagagttagttaagttttaaaatgtgatttaaaggaaaatattaagtactagtacaagagatacccagtatgacagaaatgatagtagaaggcaaaagacaagtttaagaaatgctggtttgtgtcagcagtgggcagaaaattggggactcggggctgccatgagaatgataggtgtttgatcaccacagctataggagttctttgaaagtagatctggacattttgaaatagtcaaggggaggtgtcctcagggatgtcataactgttgacctcaagaccaatgcatcagttagaaaaacattttaaggatgctcagcactgctatgtatcacagggtccctccataggacatacatacttgatctgctagcgtttttgtcatacgttagaatgaatgaatatgtgttggaatgtcttgacacagttaacctgaacacatacagctggaatccccctgttgcagttgttattatatgtaatataatagcaattgcagacagcttggattctttctcacagatattccttttgttcaattagaaattctacataattctggccgagcacagtggatcacttgaggtcaggaattcaagaccagcctggccaacatggtgaaaccccgtcaagggtacatgcaagcccggtacatgcaagaccggtaccccgttacatgcaag

SEQ ID NO: 72311 - DNA, 1667 bp, Homo sapiens
ggcacgaggatacctcctcatcaactctgacatagtgtgcgaacaggacatctacgagtggactaagatcaatggccggcggcgggtgccgcgcggggggcgggcggcgcggagtaggtggcggcggccatggccgaggcgtcgccgcatcccggacggtacttctgccactgctgctccgtggagatcgtcccgcgcctgccggattatatctgtccaagatgcgagtctggttttatcgaggagcttccggaagagaccaggagcacagaaaatggttctgccccctccacagctcccacagaccagagccggccaccgttggagcacgtggaccagcacctgttcacgctgccgcagggctacggacagtttgctttcggcatcttcgatgacagcttcgagatccccacgttccctcctggggcgcaggctgacgacggcagggaccctgagagccggcgggagagagaccatccgtcccggcaccggtacggcgcccgacagccccgcgcccgcctcaccacgcggcgggccaccggccggcacgaaggcgtccccacgctggaagggatcatccagcagctcgtcaacggcatcatcacgcccgccaccatccccagcctgggcccctggggagtcctgcactcaaaccctatggactacgcctggggggccaacggcctggatgccatcatcacacagctcctcaatcagtttgaaaacacaggccccccaccggcagataaagagaaaatccaggccctccccaccgtccccgtcactgaggagcacgtaggctccgggctcgagtgccctgtgtgcaaggacgactacgcgctgggtgagcgtgtgcggcagctgccctgcaaccacctgttccacgacggctgcatcgtgccctggctggagcagcacgacagctgccccgtctgccgaaaaagcctcacgggacagaacacggccacgaacccccctggcctcactggggtgagcttctcctcctcgtcgtcatcgtcctcctccagctcgcccagcaacgagaacgccacaagcaactcgtgagcccacgtcggccgtcgggaaagcacggggcctttcccacccaccctcagccagcgccacacggcacccacagactgggtgccccggcggcgccacgcttggctggtcagcgctgcaggtcccgcctgttccagggcaggacccgggcccggcccaccggccccctggcttgggaaggcgtgggccacatggtcccctctggggcgtccccagcctccccgtcctctgtctaacctcaccctctaaacgttcagcggtggaaagatttttataattttaaattattactgctttgaaataaacggacgtttgagctcacgtggcggccatgcatggtttgtggcggaagacggggcccagcggctcccccagcgctgaagcacggggttcagcggctcccccagtgctgcaggtgccgccaggacgggccacgtgggcccccagcctccccctcggccgcctccacgacccggagtaggggggctcgggaccatgaggatgaccagcaaaattcaagaacaaaactgctccaacagacttttttaaaggaaaaaatatgtgtatcttgaaagctatttaaaatacactacttacaaagagaa

SEQ ID NO: 72312 - DNA, 2096 bp, Homo sapiens
  misc_feature (696)..(696): n is a, c, g, or t
aaaaaaaaaagtagccgagagtggtggacctcttctgtggtcccagctacttgggaggctgaggcgggaggatcgcttaagcccagcaggttggggctgcagtgaaccaagatcaagctgcttctctcctgcctcggcattagagtgagaccctggctcatagtaaaataaataaatagaagctaatctagaagctgatgctggccctgcccttggtgctcaccacggacctggcaggcctggcgcctctcctgtgcgtggggcggcctcaccccgtgactggcgctctcttttccaggatcatccagcagctcgtcaacggcatcatcacgcccgccaccatccccagcctgggcccctggggagtcctgcactcaaaccctatggactacgcctggggggccaacggcctggatgccatcatcacacaggtacagcgtggccacggcccagagtgcctgctgggggagggctgggctgcccacccctgggagctgccccactgcctggacccacgaagccccacaaaggtcaaaggggatgcgggcacagcctccacgctctggcgggcacagggggcagctccggccttcctcctgccatttctgagtcttggcaactttgggggttctcctgtgttcacgcggaacgttgtagcaaaaccgcggggaggactcgcccacagtcacatggtcnggaggccacgcggtccctcttcccgagaggtcgcgccctgacctgcttccaagtgccacccgtctcagccttgctgaggagcccttggagcattttgtcactggcaggacccgaccctcacagtagcccaccagccggagcacggcccccccattccgccgtcagggcactcaggagcgcggcccccccccccattccgctgtcagggacccaggagcgcgggcctccgcccattcccccattccaccgtcaggggacccaggagcgggggggccgcgtgggctccacagtgatctccgaccccgggcgggctccaaggggcccagggcccaggacaaacgcggcctcggtgcttttgcaggtcctgcagcctcgcgtttcagagccccgggccgggcccccgaggagctcccggcactctcgcctcttgtctttcagctcctcaatcagtttgaaaacacaggccccccaccggcagataaagagaaaatccaggccctccccaccgtccccgtcactgaggagcacgtaggctccgggctcgagtgccctgtgtgcaaggacgactacgcgctgggtgagcgtgtgcggcagctgccctgcaaccacctgttccacgacggctgcatcgtgccctggctggagcagcacgacagctgccccgtctgccgaaaaagcctcacgggacagaacacggccacgaacccccctggcctcactggggtgagcttctcctcctcgtcgtcatcgtcctcctccagctcgcccagcaacgagaacgccacaagcaactcgtgagcccacgtcggccgtcgggaaagcacggggcctttcccacccaccctcagccagcgccacacggcacccacagactgggtgccccggcggcgccacgcttggctggtcagcgctgcaggtcccgcctgttccagggcaggacccgggcccggcccaccggccccctggcttgggaaggcgtgggccacatggtcccctctggggcgtccccagcctccccgtcctctgtctaacctcaccctctaaacgttcagcggtggaaagatttttataattttaaattattactgctttgaaataaacggacgtttgagctcacgtggcggccatgcatggtttgtggcggaagacggggcccagcggctcccccagcgctgaagcacggggttcagcggctcccccagtgctgcaggtgccgccaggacgggccacgtgggcccccagcctccccctcggccgcctccacgacccggagtaggggggctcgggaccatgaggatgaccagcaaaattcaagaacaaaactgctccaacagacttttttaaaggaaaaaatatgtgtatcttgaaagctatttaaaatacactacttacaaagagaa

SEQ ID NO: 72313 - DNA, 548 bp, Homo sapiens
aaagccagggctggtaaccggctcctgggaaagttccccggggaatattggtcgaacccccactggccgtatcagcaacgcacgacagctgccccgtctgccgaaaaagcctcacgggacagaacacggccacgaacccccctggcctcactggggtgagcttctcctcctcgtcgtcatcgtcctcctccagctcgcccagcaacgagaacgccacaagcaactcgtgagcccacgtcggccgtcgggaaagcacggggcctttcccacccaccctcagccagcgccacacggcacccacagactgggtgccccggcggcgccacgcttggctggtcagcgctgcaggtcccgcctgttccagggcaggacccgggcccggcccaccggccccctggcttgggaaggcgtgggccacatggtcccctctggggcgtccccagcctccccgtcctctgtctaacctcaccctctaaacgttcagcggtggaaagatttttataattttaaattattactgctttgaaataaacggacgtttgagctca

SEQ ID NO: 72314 - DNA, 1433 bp, Homo sapiens
gtgcgtgagcgtgcgcgggcgcgtcggccggcgagggagcagcaaacggccggcggcgggtgccgcgcggggggcgggcggcgcggagtaggtggcggcggccatggccgaggcgtcgccgcatcccggacggtacttctgccactgctgctccgtggagatcgtcccgcgcctgccggattatatctgtccaagatgcgagtctggttttatcgaggagcttccggaagagaccaggagcacagaaaatggttctgccccctccacagctcccacagaccagagccggccaccgttggagcacgtggaccagcacctgttcacgctgccgcagggctacggacagtttgctttcggcatcttcgatgacagcttcgagatccccacgttccctcctggggcgcaggctgacgacggcagggaccctgagagccggcgggagagagaccatccgtcccggcaccggtacggcgcccgacagccccgcgcccgcctcaccacgcggcgggccaccggccggcacgaaggcgtccccacgctggaagggatcatccagcagctcgtcaacggcatcatcacgcccgccaccatccccagcctgggcccctggggagtcctgcactcaaaccctatggactacgcctggggggccaacggcctggatgccatcatcacacagctcctcaatcagtttgaaaacacaggccccccaccggcagataaagagaaaatccaggccctccccaccgtccccgtcactgaggagcacgtaggctccgggctcgagtgccctgtgtgcaaggacgactacgcgctgggtgagcgtgtgcggcagctgccctgcaaccacctgttccacgacggctgcatcgtgccctggctggagcagcacgacagctgccccgtctgccgaaaaagcctcacgggacagaacacggccacgaacccccctggcctcactggggtgagcttctcctcctcgtcgtcatcgtcctcctccagctcgcccagcaacgagaacgccacaagcaactcgtgagcccacgtcggccgtcgggaaagcacggggcctttcccacccaccctcagccagcgccacacggcacccacagactgggtgccccggcggcgccacgcttggctggtcagcgctgcaggtcccgcctgttccagggcaggacccgggcccggcccaccggccccctggcttgggaaggcgtgggccacatggccagtgctgcaggtgccgccaggacgggccacgtgggcccccagcctccccctcggccgcctccacgacccggagtaggggggctcgggaccatgaggatgaccagcaaaattcaagaacaaaactgctccaacagacttttttaaaggaaaaaatatgtgtatcttgaaagctatttaaaatacactacttacaaagagaa

SEQ ID NO: 72315 - DNA, 1701 bp, Homo sapiens
gtgcgtgagcgtgcgcgggcgcgtcggccggcgagggagcagcaaacggccggcggcgggtgccgcgcggggggcgggcggcgcggagtaggtggcggcggccatggccgaggcgtcgccgcatcccggacggtacttctgccactgctgctccgtggagatcgtcccgcgcctgccggattatatctgtccaagatgcgagtctggttttatcgaggagcttccggaagagaccaggagcacagaaaatggttctgccccctccacagctcccacagaccagagccggccaccgttggagcgcccccagcagactgcacgggcctgagcccccgaggtcacgcccccctcctctccccagcacgtggaccagcacctgttcacgctgccgcagggctacggacagtttgctttcggcatcttcgatgacagcttcgagatccccacgttccctcctggggcgcaggctgacgacggcagggaccctgagagccggcgggagagagaccatccgtcccggcaccggtacggcgcccgacagccccgcgcccgcctcaccacgcggcgggccaccggccggcacgaaggcgtccccacgctggaagggatcatccagcagctcgtcaacggcatcatcacgcccgccaccatccccagcctgggcccctggggagtcctgcactcaaaccctatggactacgcctggggggccaacggcctggatgccatcatcacacagctcctcaatcagtttgaaaacacaggccccccaccggcagataaagagaaaatccaggccctccccaccgtccccgtcactgaggagcacgtaggctccgggctcgagtgccctgtgtgcaaggacgactacgcgctgggtgagcgtgtgcggcagctgccctgcaaccacctgttccacgacggctgcatcgtgccctggctggagcagcacgacagctgccccgtctgccgaaaaagcctcacgggacagaacacggccacgaacccccctggcctcactggggtgagcttctcctcctcgtcgtcatcgtcctcctccagctcgcccagcaacgagaacgccacaagcaactcgtgagcccacgtcggccgtcgggaaagcacggggcctttcccacccaccctcagccagcgccacacggcacccacagactgggtgccccggcggcgccacgcttggctggtcagcgctgcaggtcccgcctgttccagggcaggacccgggcccggcccaccggccccctggcttgggaaggcgtgggccacatggtcccctctggggcgtccccagcctccccgtcctctgtctaacctcaccctctaaacgttcagcggtggaaagatttttataattttaaattattactgctttgaaataaacggacgtttgagctcacgtggcggccatgcatggtttgtggcggaagacggggcccagcggctcccccagcgctgaagcacggggttcagcggctcccccagtgctgcaggtgccgccaggacgggccacgtgggcccccagcctccccctcggccgcctccacgacccggagtaggggggctcgggaccatgaggatgaccagcaaaattcaagaacaaaactgctccaacagacttttttaaaggaaaaaatatgtgtatcttgaaagctatttaaaatacactacttacaaagagaa

SEQ ID NO: 72316 - DNA, 1560 bp, Homo sapiens
gtgcgtgagcgtgcgcgggcgcgtcggccggcgagggagcagcaaacggccggcggcgggtgccgcgcggggggcgggcggcgcggagtaggtggcggcggccatggccgaggcgtcgccgcatcccggacggtacttctgccactgctgctccgtggagatcgtcccgcgcctgccggattatatctgtccaagatgcgagtctggttttatcgaggagcttccggaagagaccaggagcacagaaaatggttctgccccctccacagctcccacagaccagagccggccaccgttggagcacgtggaccagcacctgttcacgctgccgcagggctacggacagtttgctttcggcatcttcgatgacagcttcgagatccccacgttccctcctggggcgcaggctgacgacggcagggaccctgagagccggcgggagagagaccatccgtcccggcaccggatcatccagcagctcgtcaacggcatcatcacgcccgccaccatccccagcctgggcccctggggagtcctgcactcaaaccctatggactacgcctggggggccaacggcctggatgccatcatcacacagctcctcaatcagtttgaaaacacaggccccccaccggcagataaagagaaaatccaggccctccccaccgtccccgtcactgaggagcacgtaggctccgggctcgagtgccctgtgtgcaaggacgactacgcgctgggtgagcgtgtgcggcagctgccctgcaaccacctgttccacgacggctgcatcgtgccctggctggagcagcacgacagctgccccgtctgccgaaaaagcctcacgggacagaacacggccacgaacccccctggcctcactggggtgagcttctcctcctcgtcgtcatcgtcctcctccagctcgcccagcaacgagaacgccacaagcaactcgtgagcccacgtcggccgtcgggaaagcacggggcctttcccacccaccctcagccagcgccacacggcacccacagactgggtgccccggcggcgccacgcttggctggtcagcgctgcaggtcccgcctgttccagggcaggacccgggcccggcccaccggccccctggcttgggaaggcgtgggccacatggtcccctctggggcgtccccagcctccccgtcctctgtctaacctcaccctctaaacgttcagcggtggaaagatttttataattttaaattattactgctttgaaataaacggacgtttgagctcacgtggcggccatgcatggtttgtggcggaagacggggcccagcggctcccccagcgctgaagcacggggttcagcggctcccccagtgctgcaggtgccgccaggacgggccacgtgggcccccagcctccccctcggccgcctccacgacccggagtaggggggctcgggaccatgaggatgaccagcaaaattcaagaacaaaactgctccaacagacttttttaaaggaaaaaatatgtgtatcttgaaagctatttaaaatacactacttacaaagagaa

SEQ ID NO: 72317 - DNA, 1439 bp, Homo sapiens
ctggccgtggcaggagaggctggttgcctgacagcccgccagcctgggattatatctgtccaagatgcgagtctggttttatcgaggagcttccggaagagaccaggagcacagaaaatggttctgccccctccacagctcccacagaccagagccggccaccgttggagcttcgagatccccacgttccctcctggggcgcaggctgacgacggcagggaccctgagagccggcgggagagagaccatccgtcccggcaccggtacggcgcccgacagccccgcgcccgcctcaccacgcggcgggccaccggccggcacgaaggcgtccccacgctggaagggatcatccagcagctcgtcaacggcatcatcacgcccgccaccatccccagcctgggcccctggggagtcctgcactcaaaccctatggactacgcctggggggccaacggcctggatgccatcatcacacagctcctcaatcagtttgaaaacacaggccccccaccggcagataaagagaaaatccaggccctccccaccgtccccgtcactgaggagcacgtaggctccgggctcgagtgccctgtgtgcaaggacgactacgcgctgggtgagcgtgtgcggcagctgccctgcaaccacctgttccacgacggctgcatcgtgccctggctggagcagcacgacagctgccccgtctgccgaaaaagcctcacgggacagaacacggccacgaacccccctggcctcactggggtgagcttctcctcctcgtcgtcatcgtcctcctccagctcgcccagcaacgagaacgccacaagcaactcgtgagcccacgtcggccgtcgggaaagcacggggcctttcccacccaccctcagccagcgccacacggcacccacagactgggtgccccggcggcgccacgcttggctggtcagcgctgcaggtcccgcctgttccagggcaggacccgggcccggcccaccggccccctggcttgggaaggcgtgggccacatggtcccctctggggcgtccccagcctccccgtcctctgtctaacctcaccctctaaacgttcagcggtggaaagatttttataattttaaattattactgctttgaaataaacggacgtttgagctcacgtggcggccatgcatggtttgtggcggaagacggggcccagcggctcccccagcgctgaagcacggggttcagcggctcccccagtgctgcaggtgccgccaggacgggccacgtgggcccccagcctccccctcggccgcctccacgacccggagtaggggggctcgggaccatgaggatgaccagcaaaattcaagaacaaaactgctccaacagacttttttaaaggaaaaaatatgtgtatcttgaaagctatttaaaatacactacttacaaagagaa

SEQ ID NO: 72318 - DNA, 1761 bp, Homo sapiens
  misc_feature (725)..(725): n is a, c, g, or t
  misc_feature (746)..(746): n is a, c, g, or t
  misc_feature (799)..(799): n is a, c, g, or t
  misc_feature (877)..(877): n is a, c, g, or t
gtgcgtgagcgtgcgcgggcgcgtcggccggcgagggagcagcaaacggccggcggcgggtgccgcgcggggggcgggcggcgcggagtaggtggcggcggccatggccgaggcgtcgccgcatcccggacggtacttctgccactgctgctccgtggagatcgtcccgcgcctgccggattatatctgtccaagatgcgagtctggttttatcgaggagcttccggaagagaccaggagcacagaaaatggttctgccccctccacagctcccacagaccagagccggccaccgttggagcacgtggaccagcacctgttcacgctgccgcagggctacggacagtttgctttcggcatcttcgatgacagcttcgagatccccacgttccctcctggggcgcaggctgacgacggcagggaccctgagagccggcgggagagagaccatccgtcccggcaccggtacggcgcccgacagccccgcgcccgcctcaccacgcggcgggccaccggccggcacgaaggcgtccccacgctggaaggtgtatctagtccgagtcagttcagtcgaacaggatcatcatccaggccgcaggcatcgatcaccctagctcatggtgccgcgcatgcgaggagttccatgcaacatctgaatccgcgtatgaggagctcacagccatggatcgggcaccaacagtgacttggcatgaccaatcaatgcnaccacggacgcctcgcatccntagatcgcagattgtgtggaacacacatacccaggcaccgcggccagcgggcnatcattagcagcaggaacaatcacaagggtcgcttcactcgcgaccagtgccccagatgcggtagcaggagcacagtnaggcatcctggggtacgcagttgtcctcgtcgtagcaacaggtacaagagtcacgcgctgggtgagcgtgtgcggcagctgccctgcaaccacctgttccacgacggctgcatcgtgccctggctggagcagcacgacagctgccccgtctgccgaaaaagcctcacgggacagaacacggccacgaacccccctggcctcactggggtgagcttctcctcctcgtcgtcatcgtcctcctccagctcgcccagcaacgagaacgccacaagcaactcgtgagcccacgtcggccgtcgggaaagcacggggcctttcccacccaccctcagccagcgccacacggcacccacagactgggtgccccggcggcgccacgcttggctggtcagcgctgcaggtcccgcctgttccagggcaggacccgggcccggcccaccggccccctggcttgggaaggcgtgggccacatggtcccctctggggcgtccccagcctccccgtcctctgtctaacctcaccctctaaacgttcagcggtggaaagatttttataattttaaattattactgctttgaaataaacggacgtttgagctcacgtggcggccatgcatggtttgtggcggaagacggggcccagcggctcccccagcgctgaagcacggggttcagcggctcccccagtgctgcaggtgccgccaggacgggccacgtgggcccccagcctccccctcggccgcctccacgacccggagtaggggggctcgggaccatgaggatgaccagcaaaattcaagaacaaaactgctccaacagacttttttaaaggaaaaaatatgtgtatcttgaaagctatttaaaatacactacttacaaagagaa

SEQ ID NO: 72319 - DNA, 773 bp, Homo sapiens
gtgcgtgagcgtgcgcgggcgcgtcggccggcgagggagcagcaaacggccggcggcgggtgccgcgcggggggcgggcggcgcggagtaggtggcggcggccatggccgaggcgtcgccgcatcccggacggtacttctgccactgctgctccgtggagatcgtcccgcgcctgccggattatatctgtccaagatgcgagtctggttttatcgaggagcttccggaagagaccaggagcacagaaaatggttctgccccctccacagctcccacagaccagagccggccaccgttggagcacgtggaccagcacctgttcacgctgccgcagggctacggacagtttgctttcggcatcttcgatgacagcttcgagatccccacgttccctcctggggcgcaggctgacgacggcagggaccctgagagccggcgggagagagaccatccgtcccggcaccggtacggcgcccgacagccccgcgcccgcctcaccacgcggcgggccaccggccggcacgaaggcgtccccacgctggaaggggtgagggggccccgggggtggccgcgagggccccacgccttgaggtcggaagttctggcgcttagaatccagcacgggttccacggaaacgtggcatcatccataggctctctggagaggccgcccggccaggccctccagccccctgtgactccccacacggcccttcggagacagaagtatgccggttcagggtgtgtgggttgaccacagagtggggcaccgt

SEQ ID NO: 72320 - DNA, 285 bp, Homo sapiens
cctcaatcagtttgaaaacacaggccccccaccggcagataaagagaaaatccaggccctccccaccgtccccgtcactgaggagcacgtaggtatgagagctcagcctcccgagtagtgggaattacaggcacccgccgccacgcctggctcatacttgtattttcagtagagacagggtttcaccatgttggtcaggcaggtctcgaactcctgacctcaggtgatcctcctgcctcggcctcccaaagtgctgggatgacaggcgtgagccaccgcacccgg

SEQ ID NO: 72321 - DNA, 1357 bp, Homo sapiens
gtgcgtgagcgtgcgcgggcgcgtcggccggcgagggagcagcaaacggccggcggcgggtgccgcgcggggggcgggcggcgcggagtaggtggcggcggccatggccgaggcgtcgccgcatcccggacggtacttctgccactgctgctccgtggagatcgtcccgcgcctgccggattatatctgtccaagatgcgagtctggttttatcgaggagcttccggaagagaccaggagcacagaaaatggttctgccccctccacagctcccacagaccagagccggccaccgttggagcacgtggaccagcacctgttcacgctgccgcagggctacggacagtttgctttcggcatcttcgatgacagcttcgagatccccacgttccctcctggggcgcaggctgacgacggcagggaccctgagagccggcgggagagagaccatccgtcccggcaccggtacggcgcccgacagccccgcgcccgcctcaccacgcggcgggccaccggccggcacgaaggcgtccccacgctggaagggatcatccagcagctcgtcaacggcatcatcacgcccgccaccatccccagcctgggcccctggggagtcctgcactcaaaccctatggactacgcctggggggccaacggcctggatgccatcatcacacagctcctcaatcagtttgaaaacacaggccccccaccggcagataaagagaaaatccaggccctccccaccgtccccgtcactgaggagcacgtaggctccgggctcgagtgccctgtgtgcaaggacgactacgcgctgggtgagcgtgtgcggcagctgccctgcaaccacctgttccacgacggctgcatcgtgccctggctggagcagcacgacagctgccccgtctgccgaaaaagcctcacgggacagaacacggccacgaacccccctggcctcactggggtgagcttctcctcctcgtcgtcatcgtcctcctccagctcgcccagcaacgagaacgccacaagcaactcgtgagcccacgtcggccgtcgggaaagcacggggcctttcccacccaccctcagccagcgccacacggcacccacagactgggtgccccggcggcgccacgcttggctggtcagcgctgcaggtcccgcctgttccagggcaggacccgggcccggcccaccggccccctggcttgggaaggcgtgggccacatggtcccctctggggcgtccccagcctccccgtcctctgtctaacctcaccctctaaacgttcagcggtggaaagatttttataattttaaattattactgctttgaaataaacggacgtttgagctca

SEQ ID NO: 72322 - DNA, 1436 bp, Homo sapiens
gtgcgtgagcgtgcgcgggcgcgtcggccggcgagggagcagcaaacggccggcggcgggtgccgcgcggggggcgggcggcgcggagtaggtggcggcggccatggccgaggcgtcgccgcatcccggacggtacttctgccactgctgctccgtggagatcgtcccgcgcctgccggattatatctgtccaagatgcgagtctggttttatcgaggagcttccggaagagaccaggagcacagaaaatggttctgccccctccacagctcccacagaccagagccggccaccgttggagcacgtggaccagcacctgttcacgctgccgcagggctacggacagtttgctttcggcatcttcgatgacagcttcgagatccccacgttccctcctggggcgcaggctgacgacggcagggaccctgagagccggcgggagagagaccatccgtcccggcaccggtacggcgcccgacagccccgcgcccgcctcaccacgcggcgggccaccggccggcacgaaggcgtccccacgctggaagggatcatccagcagctcgtcaacggcatcatcacgcccgccaccatccccagcctgggcccctggggagtcctgcactcaaaccctatggactacgcctggggggccaacggcctggatgccatcatcacacagctcctcaatcagtttgaaaacacaggccccccaccggcagataaagagaaaatccaggccctccccaccgtccccgtcactgaggagcacgtaggctccgggctcgagtgccctgtgtgcaaggacgactacgcgctgggtgagcgtgtgcggcagctgccctgcaaccacctgttccacgacggctgcatcgtgccctggctggagcagcacgacagctgccccgtctgccgaaaaagcctcacgggacagaacacggccacgaacccccctggcctcactggggtgagcttctcctcctcgtcgtcatcgtcctcctccagctcgcccagcaacgagaacgccactcccctctggggcgtccccagcctccccgtcctctgtctaacctcaccctctaaacgttcagcggtggaaagatttttataattttaaattattactgctttgaaataaacggacgtttgagctcacgtggcggccatgcatggtttgtggcggaagacggggcccagcggctcccccagcgctgaagcacggggttcagcggctcccccagtgctgcaggtgccgccaggacgggccacgtgggcccccagcctccccctcggccgcctccacgacccggagtaggggggctcgggaccatgaggatgaccagcaaaattcaagaacaaaactgctccaacagacttttttaaaggaaaaaatatgtgtatcttgaaagctatttaaaatacactacttacaaagagaa

SEQ ID NO: 72323 - DNA, 1641 bp, Homo sapiens
gtgcgtgagcgtgcgcgggcgcgtcggccggcgagggagcagcaaacggccggcggcgggtgccgcgcggggggcgggcggcgcggagtaggtggcggcggccatggccgaggcgtcgccgcatcccggacggtacttctgccactgctgctccgtggagatcgtcccgcgcctgccggattatatctgtccaagatgcgagtctggttttatcgaggagcttccggaagagaccaggagcacagaaaatggttctgccccctccacagctcccacagaccagagccggccaccgttggagcacgtggaccagcacctgttcacgctgccgcagggctacggacagtttgctttcggcatcttcgatgacagcttcgagatccccacgttccctcctggggcgcaggctgacgacggcagggaccctgagagccggcgggagagagaccatccgtcccggcaccggtacggcgcccgacagccccgcgcccgcctcaccacgcggcgggccaccggccggcacgaaggcgtccccacgctggaagggatcatccagcagctcgtcaacggcatcatcacgcccgccaccatccccagcctgggcccctggggagtcctgcactcaaaccctatggactacgcctggggggccaacggcctggatgccatcatcacacagctcctcaatcagtttgaaaacacaggccccccaccggcagataaagagaaaatccaggccctccccaccgtccccgtcactgaggagcacgtaggctccgggctcgagtgccctgtgtgcaaggacgactacgcgctgggtgagcgtgtgcggcagctgccctgcaaccacctgttccacgacggctgcatcgtgccctggctggagcagcacgacagctgccccgtctgccgaaaaagcctcacgggacagaacacggccacgaacccccctggcctcactggggtgagcttctcctcctcgtcgtcatcgtcctcctccagctcgcccagcaacgagaacgccacaagcaactcgtgagcccacgtcggccgtcgggaaagcacggggcctttcccacccaccctcagccagcgccacacggcacccacagactgggtgccccggcggcgccacgcttggctggtcagcgctgcaggtcccgcctgttccagggcaggacccgggcccggcccaccggccccctggcttgggaaggcgtgggccacatggtcccctctggggcgtccccagcctccccgtcctctgtctaacctcaccctctaaacgttcagcggtggaaagatttttataattttaaattattactgctttgaaataaacggacgtttgagctcacgtggcggccatgcatggtttgtggcggaagacggggcccagcggctcccccagcgctgaagcacggggttcagcggctcccccagtgctgcaggtgccgccaggacgggccacgtgggcccccagcctccccctcggccgcctccacgacccggagtaggggggctcgggaccatgaggatgaccagcaaaattcaagaacaaaactgctccaacagacttttttaaaggaaaaaatatgtgtatcttgaaagctatttaaaatacactacttacaaagagaa

SEQ ID NO: 72324 - DNA, 1152 bp, Homo sapiens
gtgcgtgagcgtgcgcgggcgcgtcggccggcgagggagcagcaaacggccggcggcgggtgccgcgcggggggcgggcggcgcggagtaggtggcggcggccatggccgaggcgtcgccgcatcccggacggtacttctgccactgctgctccgtggagatcgtcccgcgcctgccggattatatctgtccaagatgcgagtctggttttatcgaggagcttccggaagagaccaggagcacagaaaatggttctgccccctccacagctcccacagaccagagccggccaccgttggagcacgtggaccagcacctgttcacgctgccgcagggctacggacagtttgctttcggcatcttcgatgacagcttcgagatccccacgttccctcctggggcgcaggctgacgacggcagggaccctgagagccggcgggagagagaccatccgtcccggcaccggtacggcgcccgacagccccgcgcccgcctcaccacgcggcgggccaccggccggcacgaaggcgtccccacgctggaagggatcatccagcagctcgtcaacggcatcatcacgcccgccaccatccccagcctgggcccctggggagtcctgcactcaaaccctatggactacgcctggggggccaacggcctggatgccatcatcacacagctcctcaatcagtttgaaaacacaggccccccaccggcagataaagagaaaatccaggccctccccaccgtccccgtcactgaggagcacgtaggctccgggctcgagtgccctgtgtgcaaggacgactacgcgctgggtgagcgtgtgcggcagctgccctgcaaccacctgttccacgacggctgcatcgtgccctggctggagcagcacgacagctgccccgtctgccgaaaaagcctcacgggacagaacacggccacgaacccccctggcctcactggggtgagcttctcctcctcgtcgtcatcgtcctcctccagctcgcccagcaacgagaacgccactcccctctggggcgtccccagcctccccgtcctctgtctaacctcaccctctaaacgttcagcggtggaaagatttttataattttaaattattactgctttgaaataaacggacgtttgagctca

SEQ ID NO: 72325 - DNA, 1718 bp, Homo sapiens
gtgcgtgagcgtgcgcgggcgcgtcggccggcgagggagcagcaaacggccggcggcgggtgccgcgcggggggcgggcggcgcggagtaggtggcggcggccatggccgaggcgtcgccgcatcccggacggtacttctgccactgctgctccgtggagatcgtcccgcgcctgccggattatatctgtccaagatgcgagtctggttttatcgaggagcttccggaagagaccaggagcacagaaaatggttctgccccctccacagctcccacagaccagagccggccaccgttggagcacgtggaccagcacctgttcacgctgccgcagggctacggacagtttgctttcggcatcttcgatgacagcttcgagatccccacgttccctcctggggcgcaggctgacgacggcagggaccctgagagccggcgggagagagaccatccgtcccggcaccggtacggcgcccgacagccccgcgcccgcctcaccacgcggcgggccaccggccggcacgaaggcgtccccacgctggaagggatcatccagcagctcgtcaacggcatcatcacgcccgccaccatccccagcctgggcccctggggagtcctgcactcaaaccctatggactacgcctggggggccaacggcctggatgccatcatcacacaggtcctgcagcctcgcgtttcagagccccgggccgggcccccgaggagctcccggcactctcgcctcttgtctttcagctcctcaatcagtttgaaaacacaggccccccaccggcagataaagagaaaatccaggccctccccaccgtccccgtcactgaggagcacgtaggctccgggctcgagtgccctgtgtgcaaggacgactacgcgctgggtgagcgtgtgcggcagctgccctgcaaccacctgttccacgacggctgcatcgtgccctggctggagcagcacgacagctgccccgtctgccgaaaaagcctcacgggacagaacacggccacgaacccccctggcctcactggggtgagcttctcctcctcgtcgtcatcgtcctcctccagctcgcccagcaacgagaacgccacaagcaactcgtgagcccacgtcggccgtcgggaaagcacggggcctttcccacccaccctcagccagcgccacacggcacccacagactgggtgccccggcggcgccacgcttggctggtcagcgctgcaggtcccgcctgttccagggcaggacccgggcccggcccaccggccccctggcttgggaaggcgtgggccacatggtcccctctggggcgtccccagcctccccgtcctctgtctaacctcaccctctaaacgttcagcggtggaaagatttttataattttaaattattactgctttgaaataaacggacgtttgagctcacgtggcggccatgcatggtttgtggcggaagacggggcccagcggctcccccagcgctgaagcacggggttcagcggctcccccagtgctgcaggtgccgccaggacgggccacgtgggcccccagcctccccctcggccgcctccacgacccggagtaggggggctcgggaccatgaggatgaccagcaaaattcaagaacaaaactgctccaacagacttttttaaaggaaaaaatatgtgtatcttgaaagctatttaaaatacactacttacaaagagaa

SEQ ID NO: 72326 - DNA, 1466 bp, Homo sapiens
aatgttggttcgccagggagtatgatatcgtcgacccacgcgctccggagaccaggagcacagaaaatggttctgccccctccacagctcccacagaccagagccggccaccgttggagcacgtggaccagcacctgttcacgctgccgcagggctacggacagtttgctttcggcatcttcgatgacagcttcgagatccccacgttccctcctggggcgcaggctgacgacggcagggaccctgagagccggcgggagagagaccatccgtcccggcaccggtacggcgcccgacagccccgcgcccgcctcaccacgcggcgggccaccggccggcacgaaggcgtccccacgctggaagggatcatccagcagctcgtcaacggcatcatcacgcccgccaccatccccagcctgggcccctgcctgcactcaacacccgtatgtgacatacgcctgagagaagcccaacggtctggactgaccatcgatagccgaaaggctcctcaatcagtttgaaaacacaggccccccaccggcagataaagagaaaatccaggccctccccaccgtccccgtcactgaggagcacgtaggctccgggctcgagtgccctgtgtgcaaggacgactacgcgctgggtgagcgtgtgcggcagctgccctgcaaccacctgttccacgacggctgcatcgtgccctggctggagcagcacgacagctgccccgtctgccgaaaaagcctcacgggacagaacacggccacgaacccccctggcctcactggggtgagcttctcctcctcgtcgtcatcgtcctcctccagctcgcccagcaacgagaacgccacaagcaactcgtgagcccacgtcggccgtcgggaaagcacggggcctttcccacccaccctcagccagcgccacacggcacccacagactgggtgccccggcggcgccacgcttggctggtcagcgctgcaggtcccgcctgttccagggcaggacccgggcccggcccaccggccccctggcttgggaaggcgtgggccacatggtcccctctggggcgtccccagcctccccgtcctctgtctaacctcaccctctaaacgttcagcggtggaaagatttttataattttaaattattactgctttgaaataaacggacgtttgagctcacgtggcggccatgcatggtttgtggcggaagacggggcccagcggctcccccagcgctgaagcacggggttcagcggctcccccagtgctgcaggtgccgccaggacgggccacgtgggcccccagcctccccctcggccgcctccacgacccggagtaggggggctcgggaccatgaggatgaccagcaaaattcaagaacaaaactgctccaacagacttttttaaaggaaaaaatatgtgtatcttgaaagctatttaaaatacactacttacaaagagaa

SEQ ID NO: 72327 - DNA, 837 bp, Homo sapiens
taaccatagtgtgaaacgtagatgatagcagtattgtattagacaatgagacccagagcccctgtggactgacatgtttggagtagggaatcacaaagtgaatgccgagactgctaaaaggaaaagcatccggcaggccgcggacgatctccacggagcagcagtggcagaagtaccgtcgtcatcgtcctcctccagctcgcccagcaacgagaacgccacaagcaactcgtgagcccacgtcggccgtcgggaaagcacggggcctttcccacccaccctcagccagcgccacacggcacccacagactgggtgccccggcggcgccacgcttggctggtcagcgctgcaggtcccgcctgttccagggcaggacccgggcccggcccaccggccccctggcttgggaaggcgtgggccacatggtcccctctggggcgtccccagcctccccgtcctctgtctaacctcaccctctaaacgttcagcggtggaaagatttttataattttaaattattactgctttgaaataaacggacgtttgagctcacgtggcggccatgcatggtttgtggcggaagacggggcccagcggctcccccagcgctgaagcacggggttcagcggctcccccagtgctgcaggtgccgccaggacgggccacgtgggcccccagcctccccctcggccgcctccacgacccggagtaggggggctcgggaccatgaggatgaccagcaaaattcaagaacaaaactgctccaacagacttttttaaaggaaaaaatatgtgtatcttgaaagctatttaaaatacactacttacaaagagaa

SEQ ID NO: 72328 - DNA, 529 bp, Homo sapiens
atatttttttggcttttatgaattgtgccactgtgctccagcctgggtgacagagcgagagactgtctaaaaaacaacaaaaaaccaccccccacacaccattgtggcattattagttattttgagcagaagtcacttgagaaacggcagttgcaggaagggttccctgacctgctgtctccctaaaagcaggtaatacaatttcccatgagaaagtgccccttctgttccagaagagaagaacatccttactggagactgggagtagatgacgaaatggatctgtacaaacaaatctactgaaatactccttatcttccactcatatccaccatctatttcttagtcatgccacaatttactgcccttagcctaaagctctttatttgatcaattttccacaaatgtatcatttctttaaaaagtaaataagctcttgatcccaactgttctttgggtctctattctccatatgagggttcccttgattcaaataaaagattaaataaaatgtgtatgcttctctcct

SEQ ID NO: 72329 - DNA, 316 bp, Homo sapiens
ttgtggcacctaatgcgttcatattggtaggaacacagtaataggaaaggaagtttatctttctagttgggatttaagaaaactcttaaagatggaagaatattacctttttttgtttccttatctctttgtggaataaatgagtaaatactgtgactgcagtcacatgagataggtattagccatcagtctaactagaggatctaaggaaacacttcagaagtccaggagaacgaggcagcagtattgacagcagatagaggaagaagcagcagagtagatctggaagtggggagtgtttaaacaagagggctgg

SEQ ID NO: 72330 - DNA, 1627 bp, Homo sapiens
cagggacccaggcgctcagctgctggggccgcggagggcgttcgcggggcgccggggaaggctagggccgcggggtccccggggcgccgtcctccgaccgcctgaggctgggctgccggcaagccgcggcagcatatgacagcacttgaaagaaagtccctggaaagaatgtggatcattgcagaactccctcaagaaagcgccagaggaggaccccattcagcaccccgcagaactcctcaaactcctgcgtccacactcccccagcgtggtggctgcttctatctccccaggcttagctggcctgggtcttgaaggcctctcctcctgctgtccccacgcagcatcctctctgccactgcacagctggatgcagtgaaggccaggcggctgtggctgcttgggcaacaggagctgcttgaccctgttctgctggccttgttggcctcactcccgtagagagccaaggttacccacgtctctgaagctaaggctttctttctaggcctgggggagtcacatcttgcattcgtactcactgagctccacgtctatggccctggtgtgtgatgttgcccgcactgtgtccaagtgttctcattgttcaattcccacctgtgccaactcctgggatcttatcgggaagtggctcatcatcagctttaggtgttttctatctattgggagcctgcctttctctggcaccagctgcaaccaataattattttagacagtttaacaacagcttgaccatcacctgatgatcacctgacatttctgttggggcgcgggcccatctcctgccccgctcatgtggggctcagtctgcccaacctttccccaagggcctgtctttacttcatttgtggtaagccccaagcagaatggactcttgttatgatcccaggaactgctcacggccacctctgtggatgaacacctagcggctgctctaaatacatgctgtgaaagttgtcagaatcaaaatggagtcactaatgttaagaaagccctgacaaagagttggtggggaaggccacgaagagaggacacttatgcttgcatgcctgataccagaaaggactacaaaaaccacagcccggcacagaggccatcacacccttacacaaaaaatatttctgcaaggacaactgcccagcaattgcctgtccaacctcagactggaatgacctttgttattgatgtttgtagccaaggagaattatctcaaaaccactgtgatcctgctcgcttttcctttaaagacctttgtcttccttgacctccctgaataggcatatggtttactatggcgtgtgtactctccttgtaatgttctgttctcaagctaacatctattcttctagagaacctctctcttaggctgacaacgctgtggatctgggctcccaggaactggggctgacatcagaggggtggaaagagaacagcagctctccctgaggggatgcttgccaaggataaggagacgatggttctctaaggattattttatattcatctaaaagggtatttttgttgttacccctagccttttttcccttttaattttctgatgaataatttatataaagaaaacccattctaagtgtgcaaaaaaaaaaaa

SEQ ID NO: 72331 - DNA, 417 bp, Homo sapiens
tggtgcctcaggaagtctttgtcggcaaatctgagtatgctggaaagataggagcacataagactggttggcttgtatttgggggagaccgattgtgtcagatatgtatgtggaacgtagctgtccttgccgagtctgacctgtatgaaatgcatatccatggctatattattttggatttatggaggaagcagagcatttctgacacttaaggttgtatgcgtgagggagaaggctttcacagcttaacttgtaccagagcagctgcatgggtgctgacagcttaacttgaaatctgtgggaggaaggatcctttttcactcattcaacaaatataaccattcaatgaatggtccatgccttgaggtgaggatcatcaaggtgtctctgtaaatagcctggatgcaatctgagggg

SEQ ID NO: 72332 - DNA, 534 bp, Homo sapiens
  misc_feature (398)..(398): n is a, c, g, or t
  misc_feature (444)..(444): n is a, c, g, or t
  misc_feature (459)..(459): n is a, c, g, or t
  misc_feature (495)..(495): n is a, c, g, or t
  misc_feature (513)..(513): n is a, c, g, or t
  misc_feature (524)..(524): n is a, c, g, or t
tggtgcctcaggaagtctttgtcggcaaatctgagtatgctggaaagataggagcacataagactggttggcttgtatttgggggagaccgattgtgtcagatatgtatgtggaacgtagctgtccttgccgagtctgacctgtatgaaatgcatatccatggctatattattttggatttatggaggaagcagagcatttctgacacttaaggttgtatgcgtgagggagaaggctttcacagcttaacttgtaccagagcagctgcatgggtgctgacagcttaacttgaaatctgtgggaggaaggatcctttttcactcattcaacaaatataaccattcaatgaatggtccatgccttgaggtgaggatcatcaaggtgtctctaaacaactntttcccctggggattttaggagggaagttgttcaagatgggaaccncgaaggtgctacagngggatttcagtggggttttcttttgagctagggggnattaagggtcttggagantgggagccttnaattcgggcc

SEQ ID NO: 72333 - DNA, 464 bp, Homo sapiens
ttgtcttatttttaattttgatttttaaaataaaatttaccatctttactatgtttaagtgttagttgaatagtgttaagtatagtcacataagtcagtatacagttttaaacaatgtatataacaatatatattaaacataggaattttggactgaatgtttttatccctccctcccaatttctgtgttgaaatcctaacccccttatgatggtattaagaggtcggggctttgaaaggtcattaggtcatggaggtggagacttcatgaatgggattagtgcccttataaaaggaaccccatagagctctctagctctccttctgccatataaaggtacaatgagaagtcagctgtctgtggcccagaagagtcctcatcagaccctgaccaggctggcatcctaatctcagacttccagcctttagaattgtaggaaataaatttctgttgtttatgagcc

SEQ ID NO: 72334 - DNA, 1286 bp, Homo sapiens
gtacacatgagcacaaagacaccaacaggaggaagggaaagaggaaaggaggaaagggctgaaaagcttcctttcaggtactctgctcagtacctagctgacaggattaatagaagcccaagcctcagcatcatgcaatatatccttgtaacaaacctgtatgtgtaccccctgaatctaaaattaaaatgaaaggagaatattttacttttcttaagtaaaattgtgttttaacacaaatagaatcttttcaaacacaatatatcttaaagctctttcctcattttatttaataactatggaaatttttttgtttaactgtttgctgttgatgaatatgtttctagtttgaagatatatcaagcaatgccatggtgatcatccctatgtatattttgacatacttttgtgattgcttagaaaagataaattcctagcattgaagttgttaggtcaaaggacatgtgcactttttagtgttaatagattttatccagtttttttcagtttatcccttttttcttggtaacatataagtactcataagattaattcttcagtttatcatcttttaaaaacttgtatttttacgtgctcacagccggacctgaaggaagcagttgtttagtctactttgagaacacattgccattctagttttctgatacccagggacatgctgtggttttacaaccagcctagtggtagttctcacccatccatttctacttttatccttcatctgagcatctgtgaaagcctcttcagggctttctttattttgtctcttgactctcctaaatccactgttgccacagcagccaaagtgatccatttaaaatgtaaatcatattaattcactcactcaacacactcattgagagcttactgtgtgccaggcactgttccagcctttaggagatggctgtttaaagccaagtccctgctcacagtatattgggtaggacagggcagctatcaagagaacaaagatatggccgagcatggtgccttacgtctgtaatctcagtatttcaggaggccagggcaatctcttaatgccaggaattcaagactagcctaggcagcatagcaagacaccatccctccaaaaataaataaatataagttagcggggcatggtggtacacatctgtagtcccagctacttgggaggctgaggcaggagaatcacttgaacccaggagttcgaggctgcggtgagctatatgattgcaccaccacactctagccctagcaacagagtgagatgctgtgtctaaaaa

SEQ ID NO: 72335 - DNA, 1282 bp, Homo sapiens
gtacacatgagcacaaagacaccaacaggaggaagggaaagaggaaaggaggaaagggctgaaaagcttcctttcaggtactctgctcagtacctagctgacaggattaatagaagcccaagcctcagcatcatgcaatatatccttgtaacaaacctgtatgtgtaccccctgaatctaaaattaaaatgaaaggagaatattttacttttcttaagtaaaattgtgttttaacacaaatagaatcttttcaaacacaatatatcttaaagctctttcctcattttatttaataactatggaaatttttttgtttaactgtttgctgttgatgaatatgtttctagtttgaagatatatcaagcaatgccatggtgatcatccctatgtatattttgacatacttttgtgattgcttagaaaagataaattcctagcattgaagttgttaggtcaaaggacatgtgcactttttagtgttaatagattttatccagtttttttcagtttatcccttttttcttggtaacatataagtactcataagattaattcttcagtttatcatcttttaaaaacttgtatttttacgtgctcacagccggacctgaaggaagcagttgtttagtctactttgagaacacattgccattctagttttctgatacccagggacatgctgtggttttacaaccagcctagtggtagttctcacccatccatttctacttttatccttcatctgagcatctgtgaaagcctcttcagggctttctttattttgtctcttgactctcctaaatccactgttgccacagcagccaaagtgatccatttaaaatgtaaatcatattaattcactcactcaacacactcattgagagcttactgtgtgccaggcactgttccagcctttaggagatggctgtttaaagccaagtccctgctcacagtatattgggtaggacagggcagctatcaagagaacaaagatatggccgagcatggtgccttacgtctgtaatctcagtatttcaggaggccagggcaatctcttaatgccaggaattcaagactagcctaggcagcatagcaagacaccatccctccaaaaataaataaatataagttagcggggcatggtggtacacatctgtagtcccagctacttgggaggctgaggcaggagaatcacttgaacccaggagttccacgctccccatgacctcccctcccgtgctgcaggggttttggagaaaaacaataaagagattctcactca

SEQ ID NO: 72336 - DNA, 664 bp, Homo sapiens
agcggacttttcaggggacattcagaggcatcagccccttcctcctcaccagctcccagagttcccatctccatccccaatcctaaagaaggaaatcgatgccacggtcctcaaggagccctggggacccaggcgccctactcgaagatgtggcccacaatcccagaccccggaggattgcccagcgaggccggaacaccagcaggatggcagaggacacctccccaaacatgaatgacaacatcctgttgcctgtccgcaacaatgaccaagccctaggcctgactcagtgcatgctgggatgtgtgtcctggttcacctgttttgcctgctccctgagaactcaggcccagcaggttctgtttaacacgtgcagatgcaagctgctgtgccagaagctcatggagaagacaggcattctgctcctctgtgctttcggtgtgtcccagggccctgcccagtcccaggtggaggtatccctgggccctggcactgattataggacactgggcaagacactgcactgccacgtgactcagtttccccatctgcctgatgggtgttgctgtgagaattatgaaatgaaatgatgaccatgaaaatattgtagaagccaagaaatgcttcagaagttataaagctctccccaaaccgtgttaaacat

SEQ ID NO: 72337 - DNA, 597 bp, Homo sapiens
agcggacttttcaggggacattcagaggcatcagccccttcctcctcaccagctcccagagttcccatctccatccccaatcctaaagaaggaaatcgatgccacggtcctcaaggagccctggggacccaggcgccctactcgaagatgtggcccacaatcccagaccccggaggattgcccagcgaggccggaacaccagcaggatggcagaggacacctccccaaacatgaatgacaacatcctgttgcctgtccgcaacaatgaccaagccctaggcctgactcagtgcatgctgggatgtgtgtatgcaagctgctgtgccagaagctcatggagaagacaggcattctgctcctctgtgctttcggtgtgtcccagggccctgcccagtcccaggtggaggtatccctgggccctggcactgattataggacactgggcaagacactgcactgccacgtgactcagtttccccatctgcctgatgggtgttgctgtgagaattatgaaatgaaatgatgaccatgaaaatattgtagaagccaagaaatgcttcagaagttataaagctctccccaaaccgtgttaaacat

SEQ ID NO: 72338 - DNA, 779 bp, Homo sapiens
agcggacttttcaggggacattcagaggcatcagccccttcctcctcaccagctcccagagttcccatctccatccccaatcctaaagaaggaaatcgatgccacggtcctcaaggagccctggggacccaggcgccctactcgaagatgtggcccacaatcccagaccccggaggattgcccagcgaggccggaacaccagcaggatggcagaggacacctccccaaacatgaatgacaacatcctgttgcctgtccgcaacaatgaccaagccctaggcctgactcagtgcatgctgggatgtgtgtcctggttcacctgttttgcctgctccctgagaactcaggcccagcaggttctgtttaacacgtgcagatgcaagctgctgtgccagaagctcatggagaagacaggcattctgctcctctgtgctttcggattctggatgttttctattcacttaccatcgaaaatgaaagtctggcaggatgacagcataaatggtccactgcagagcttgaggttgtaccaggagaaggtgcgacatcacagtggggaaatccaggacctccgaggtagcatgaaccagctcattgccaagctccaggagatggaagccatgtccgatgagcaaaaaatggcccagaaaataatgaagatgatacacggagattacatcgaaaagccagactttgccctgaagtctatagaggggccagcattgactttgagcacacgtcagtcacctataaccatgagaaggcccactcctactgga

SEQ ID NO: 72339 - DNA, 281 bp, Homo sapiens
taaacccggccgaaggggtgcccctgagaccactggcagtccaggcagttgttcattcctagtaaatgtacctgtttattttgtccttatctttccttcctcttccattgtgccacccatctagtttctcctggcctgtacctgaggcctgcttccaaggatgtgcctggcccactccccaaggtcctcagcagtcctgtatttcgggccctgcttgcagtgggaacccaaatggtacactatcctcctctttactgaacatcattaaaattctattttga

SEQ ID NO: 72340 - DNA, 471 bp, Homo sapiens
acttctttttattgtaatgtatttgaaatgtacagaacatgtggtgagtaatatagtaaactccatacacctactagccagatcaatagaactaaacattttaccatcttcagtctaatgttattgctgagaaagtaaaacataggatggagttgaagctctctgtgtaaccatcccttgatctcactgccttggtctttcccttagagatcaacactgtcctgaatttggtgtttgctacttccatgcatattatcctacgattatttcatatctatgtatagacacacacacacacacacacacacacacttacaatacataccctattttaaaatttcatgtaagtgattttctattgtaaataatgtcctgcaacttattttcatttcattttattttcttaggaaggatgagatagagggagcattgtctgcattaaatttataataaaaatctattggattctct

SEQ ID NO: 72341 - DNA, 539 bp, Homo sapiens
  misc_feature (482)..(482): n is a, c, g, or t
  misc_feature (530)..(530): n is a, c, g, or t
gttcgtgctgaaggcctgtatcctaggctacacactgaggactctgttcctcccctttccgcctaggggaaagtccccggacctcgggcagagagtgccacgtgcatacgcacgtagacattccccgcttcccactccaaagtccgccaagaagcgtatcccgctgagcggcgtggcgcgggggcgtcatccgtcagctccctctagttacgcaggcagtgcgtgtccgcgcaccaaccacacggggctcattctcagcgcgcccgcctacagccgcgcgcttcagccggaaactcagcagcggggtctcggagatccggcacactgcggaccgctgggcgcgtgtccctggatgtcaacacttgccccggacgagctgacggtcaagaccaaggatggcgtggtggagatcaccggcaagcacgaggaagcggcaggaacgagcatggctacatctcccggtgcttcacgcggaaatacangctgcccccccggtgtggaccccaaccaagttttcctccttccctgtncccctgaag

SEQ ID NO: 72342 - DNA, 812 bp, Homo sapiens
  misc_feature (3)..(4): n is a, c, g, or t
  misc_feature (11)..(11): n is a, c, g, or t
  misc_feature (17)..(17): n is a, c, g, or t
  misc_feature (22)..(22): n is a, c, g, or t
  misc_feature (24)..(24): n is a, c, g, or t
  misc_feature (26)..(26): n is a, c, g, or t
  misc_feature (28)..(28): n is a, c, g, or t
  misc_feature (35)..(37): n is a, c, g, or t
ggnncgggccnagccgnagccncncngnccgcgcnnnccgccggccccacccatccgggtcgaggaggccgaggccatggctgagacggaggagcggagcctggacaacttctttgccaagagggacaagaagaagaagaaggagcggagcaaccgggcggcgagtgccgcgggcgcagcgggcagcgccggcggaagcagtggagccgcgggtgcggcgggcggcggggcgggcgcggggacccggccgggtgacggcgggaccgccagcgcgggggctgcgggcccaggggccgccaccaaggctgtgacgaaggacgaagatgaatggaaagaattggagcaaaaagaggttgattacagcggcctcagggttcaggcaatgcaaataagcagtgaaaaggaagaagacgataatgaaaagagacaagatccaggtgataactgggaagaaggtggaggtggtggtggaggtatggaaaaatcttcaggtccctggaataaaacagctccagtacaagcacctcctgctccagtaattgttacagaaaccccagaaccagcgatgactagtggtgtgtataggcctcctggggccaggttaaccacaacaaggaaaacaccacaaggaccaccagaaatctacagtgatacacagttcccatccctgcagtcaactgccaagcatgtagaaagccggaacaggtacttaaaatgaatgctacctggaattaaatgactacatatggcacatctacatcttactttagggacatgaattttttaaaataaataaaatgggaagaaatgta

SEQ ID NO: 72343 - DNA, 356 bp, Homo sapiens
  misc_feature (327)..(327): n is a, c, g, or t
  misc_feature (333)..(333): n is a, c, g, or t
gtacccttccaacatctcatttctgatttaatcatcgacctgccactcgcatctgggcaatgttgacatttgaggtggcaggcaggatgcctgccttctaatatatttgggtgagtaactgagccagccaagggaaggttgaatgattaaatcagaaatgggattcttggtaaactgaagacttttatttgggaatgaaaaaccttaaaaaaatctcttcatcgttgaactgtgcattttccctgcattttttcccaacaaaattttgttgggggttatgttactgaagaatgaacagatgagaaatgagatgtggaagggggatgntctagngtcaaatggggcatcaaaatgca

SEQ ID NO: 72344 - DNA, 3334 bp, Homo sapiens
ggcacgagctggctcgcgcgtgccttttcccctcaggttgtggggagagcggaatcctgctccgccgtcgcagcagcagcggcagccccggcagcctcgggcgacagcggcggcgcgcgagcccccgggcggaccgtaccaccgctcgccagcacgcagggggagccgcccgtctcgccgcgcacgcctcggcgaccccgcggggctgaggcgtcgccgcgcccggcagcgtgagcgcagagccggcctcgaccccgagctcggagccccgcgggccgcgcccgccgccggccccacccatccgggtcgaggaggccgaggccatggctgagacggaggagcggagcctggacaacttctttgccaagagggacaagaagaagaagaaggagcggagcaaccgggcggcgagtgccgcgggcgcagcgggcagcgccggcggaagcagtggagccgcgggtgcggcgggcggcggggcgggcgcggggacccggccgggtgacggcgggaccgccagcgcgggggctgcgggcccaggggccgccaccaaggctgtgacgaaggacgaagatgaatggaaagaattggagcaaaaagaggttgattacagcggcctcagggttcaggcaatgcaaataagcagtgaaaaggaagaagacgataatgaaaagagacaagatccaggtgataactgggaagaaggtggaggtggtggtggaggtatggaaaaatcttcaggtccctggaataaaacagctccagtacaagcacctcctgctccagtaattgttacagaaaccccagaaccagcgatgactagtggtgtgtataggcctcctggggccaggttaaccacaacaaggaaaacaccacaaggaccaccagaaatctacagtgatacacagttcccatccctgcagtcaactgccaagcatgtagaaagccggaaggataaagaaatggagaagagctttgaagtagtaagacacaaaaatagaggtagggatgaggtttcaaaaaaccaggcccttaaacttcagctagacaaccaatatgctgtgcttgaaaatcagaaaagcagccactcacaatacaattaaggaatgggctttgctaacccttctgaggtaactagactgcagctaaccaccaccaacagccattcatcatctgatctctgctggatctacagacaccgatgcagaccactcgatttcatgaccggccctattgcactatggaagttaaagtgtcacgactgctctatgcatattggatttaggggaattttcattgttacataaatgtgtgaactagtttcaacagtgttctttcatatttactctgcaaatacaaaaaaccaaaacctgcagccagtggtcatttcaaaatctttttatgttcagatactgagccttcataagggttgactacctcagatttgctgcactcattgtggacttcatgtggatcacaacttctggataagaagattacaactattaagtgtcgatgtgaaccttgcaaccagctctactggattcttatcagaaatcctgcataaaaagtcagccatctgggttctgatctgctgtaaaagatgaagatttaagtgaccttaattaacctgtcctgtgccctacccttaaggaatactctctgtagtaggctgttgttatattagacttcctggaacacaccgctgaaaagaactgatgtgttcagatcatctgtgtagggctgtgatttgtaatttaaactaattgtattctgaggtaaccacaaaataaattcaaccaaactggggtccaccaagtgggggaaggggaagggagagaataatcttgggggtttttttttttggtaatttttttatttggatagtgcttttttgttttgtttttgttctgcattaaggccttttttgctttgacttgaaataagttctttgacagagcatattgcttggttaattaagtaacctaaagtatgcattaggattgtgaaatgtctcgtgagtatgccaatcctgagggtggaaccaaatagcctttgatgaaaagggcagtggattctggaggctctacttcaggtgctgctataatgcctcatctaatcaggactaaattgtgtaggaaactgcagtgggaagaatatgctttctgctcaggctaagagggtcactgatctgtccttagaaattcagagtaacatgagcaaaacctcagctaaaacccatttaagtggcatggattgtgcatgatctttgataagaattcctcatgtacttgtgcctagtttttcaaggtattggctgttctatagatgcagtgattgtcccagctagctctgttaccagccttttggtgtgtctttatgttcatttggagagtcagggcgaaagacaggtgatgtagcacttctgtttttaataattattgcttaaaatacctattaatagttttgggtcatttaaagggacttgaggaagctacccaggattacagaagagtgtccacctaacaagatggtctggcagtttcctagttttgtatctggttcaatagaaatatgtgaaagtggtaatgtcatcatttgatgcagagtccgggtttctctataataaatccctttgccaaatgcatgagttgcagacttgctactggcaagagtgaagcaagtgggtgagtaaaactattttgacgtgggagcgttttcagataggagtttagtcttgacgaaagtgtccgtgcaggaattggactccgaggagggttacagtatctcctgacgggacctgccactcgcatctgggcaatgttgacatttgaggtggcaggcaggatgcctgccttctaatatatttgggtgagtaactgagccagccaagggaaggttgaatgattaaatcagaaatgggattcttggtaaactgaagacttttatttgggaatgaaaaaccttaaaaaaatctcttcatcgttgaactgtgcattttccctgcattttttcccaacaaaattttgttgggggttatgttactgaagaatgaacagatgagtaagtggaggtgttatgtaaaggcatattgtactcgaaatctgaagacctgcagcagatttaaattacaactcttgttataactttttaaaagattgtgaaaatatcaaaatataaatgaatcaagttttaatatactgtatgatgggtggatgaggctgtccattgtaccatttgtttgaattctcaggcatggtttggcagtgcaagaattctgtaacattaacaaattcaataaaaagtaaatatatggattttggactgtaaaaaaaaa

SEQ ID NO: 72345 - DNA, 2894 bp, Homo sapiens
acctcgggctgggctcgccagggccgggaccccttccgatatccgcggtggagccgcccttcccaccccgcgtcgctcggcgttagccaaggcccgggcggcgccaccctccgggggcactaggacgaagatgaatggaaagaattggagcaaaaagaggttgattacagcggcctcagggttcaggcaatgcaaataagcagtgaaaaggaagaagacgataatgaaaagagacaagatccaggtgataactgggaagaaggtggaggtggtggtggaggtatggaaaaatcttcaggtccctggaataaaacagctccagtacaagcacctcctgctccagtaattgttacagaaaccccagaaccagcgatgactagtggtgtgtataggcctcctggggccaggttaaccacaacaaggaaaacaccacaaggaccaccagaaatctacagtgatacacagttcccatccctgcagtcaactgccaagcatgtagaaagccggaaggataaagaaatggagaagagctttgaagtagtaagacacaaaaatagaggtagggatgaggtttcaaaaaaccaggcccttaaacttcagctagacaaccaatatgctgtgcttgaaaatcagaaaagcagccactcacaatacaattaaggaatgggctttgctaacccttctgaggtaactagactgcagctaaccaccaccaacagccattcatcatctgatctctgctggatctacagacaccgatgcagaccactcgatttcatgaccggccctattgcactatggaagttaaagtgtcacgactgctctatgcatattggatttaggggaattttcattgttacataaatgtgtgaactagtttcaacagtgttctttcatatttactctgcaaatacaaaaaaccaaaacctgcagccagtggtcatttcaaaatctttttatgttcagatactgagccttcataagggttgactacctcagatttgctgcactcattgtggacttcatgtggatcacaacttctggataagaagattacaactattaagtgtcgatgtgaaccttgcaaccagctctactggattcttatcagaaatcctgcataaaaagtcagccatctgggttctgatctgctgtaaaagatgaagatttaagtgaccttaattaacctgtcctgtgccctacccttaaggaatactctctgtagtaggctgttgttatattagacttcctggaacacaccgctgaaaagaactgatgtgttcagatcatctgtgtagggctgtgatttgtaatttaaactaattgtattctgaggtaaccacaaaataaattcaaccaaactggggtccaccaagtgggggaaggggaagggagagaataatcttgggggtttttttttttggtaatttttttatttggatagtgcttttttgttttgtttttgttctgcattaaggccttttttgctttgacttgaaataagttctttgacagagcatattgcttggttaattaagtaacctaaagtatgcattaggattgtgaaatgtctcgtgagtatgccaatcctgagggtggaaccaaatagcctttgatgaaaagggcagtggattctggaggctctacttcaggtgctgctataatgcctcatctaatcaggactaaattgtgtaggaaactgcagtgggaagaatatgctttctgctcaggctaagagggtcactgatctgtccttagaaattcagagtaacatgagcaaaacctcagctaaaacccatttaagtggcatggattgtgcatgatctttgataagaattcctcatgtacttgtgcctagtttttcaaggtattggctgttctatagatgcagtgattgtcccagctagctctgttaccagccttttggtgtgtctttatgttcatttggagagtcagggcgaaagacaggtgatgtagcacttctgtttttaataattattgcttaaaatacctattaatagttttgggtcatttaaagggacttgaggaagctacccaggattacagaagagtgtccacctaacaagatggtctggcagtttcctagttttgtatctggttcaatagaaatatgtgaaagtggtaatgtcatcatttgatgcagagtccgggtttctctataataaatccctttgccaaatgcatgagttgcagacttgctactggcaagagtgaagcaagtgggtgagtaaaactattttgacgtgggagcgttttcagataggagtttagtcttgacgaaagtgtccgtgcaggaattggactccgaggagggttacagtatctcctgacgggacctgccactcgcatctgggcaatgttgacatttgaggtggcaggcaggatgcctgccttctaatatatttgggtgagtaactgagccagccaagggaaggttgaatgattaaatcagaaatgggattcttggtaaactgaagacttttatttgggaatgaaaaaccttaaaaaaatctcttcatcgttgaactgtgcattttccctgcattttttcccaacaaaattttgttgggggttatgttactgaagaatgaacagatgagtaagtggaggtgttatgtaaaggcatattgtactcgaaatctgaagacctgcagcagatttaaattacaactcttgttataactttttaaaagattgtgaaaatatcaaaatataaatgaatcaagttttaatatactgtatgatgggtggatgaggctgtccattgtaccatttgtttgaattctcaggcatggtttggcagtgcaagaattctgtaacattaacaaattcaataaaaagtaaatatatggattttggactgtaaaaaaaaa

SEQ ID NO: 72346 - DNA, 4070 bp, Homo sapiens
ggcacgagctggctcgcgcgtgccttttcccctcaggttgtggggagagcggaatcctgctccgccgtcgcagcagcagcggcagccccggcagcctcgggcgacagcggcggcgcgcgagcccccgggcggaccgtaccaccgctcgccagcacgcagggggagccgcccgtctcgccgcgcacgcctcggcgaccccgcggggctgaggcgtcgccgcgcccggcagcgtgagcgcagagccggcctcgaccccgagctcggagccccgcgggccgcgcccgccgccggccccacccatccgggtcgaggaggccgaggccatggctgagacggaggagcggagcctggacaacttctttgccaagagggacaagaagaagaagaaggagcggagcaaccgggcggcgagtgccgcgggcgcagcgggcagcgccggcggaagcagtggagccgcgggtgcggcgggcggcggggcgggcgcggggacccggccgggtgacggcgggaccgccagcgcgggggctgcgggcccaggggccgccaccaaggctgtgacgaaggacgaagatgaatggaaagaattggagcaaaaagaggttgattacagcggcctcagggttcaggcaatgcaaataagcagtgaaaaggaagaagacgataatgaaaagagacaagatccaggtgataactgggaagaaggtggaggtggtggtggaggtatggaaaaatcttcaggtccctggaataaaacagctccagtacaagcacctcctgctccagtaattgttacagaaaccccagaaccagcgatgactagtggtgtgtataggcctcctggggccaggttaaccacaacaaggaaaacaccacaaggaccaccagaaatctacagtgatacacagttcccatccctgcagtcaactgccaagcatgtagaaagccggaacaggtacttaaaatgaatgctacctggaattaaatgactacatatggcacatctacatcttactttagggacatgaattttttaaaataaataaaatgggaagaaatgtaaatgacatcagatggaaatgtgtttttggggtggcttttagaataaatcccagccttttcaccactttgagagcacagctggcttgaatttaaacctccacgtggacttgctcctctgctctgtcttaaaaaatgtgtaagggaccttgggagggcagtgattcaccacactcgagtttctttacctgatctaatcagatccactcccacaaaatcgatgtgaggagaaatcattgactaatgagtagaatttacttgaatgagaaaattgttacccttgtgcataaagagagagatgtattatctattacttgctaaaagtaagagtcttaggaggaatgtcattacacagcttttaacagttttcttcaagtttgtcctgaaatagggtcacagttaatactgttcagtagaagataggaccctagagcttcaatacagcgttctgtgttttctgtttgaattgaagccttaaaatggtttgataaggattttctatatgcctccactcctacccctccccaggattcttctaaggggtggcttttttttaaattcaaggacgaatattttcaaaaaccctagtgaagaagaaatatttactgattacatttcttttcccttagggataaagaaatggagaagagctttgaagtagtaagacacaaaaatagaggtagggatgaggtttcaaaaaaccaggcccttaaacttcagctagacaaccaatatgctgtgcttgaaaatcagaaaagcagccactcacaatacaattaaggaatgggctttgctaacccttctgaggtaactagactgcagctaaccaccaccaacagccattcatcatctgatctctgctggatctacagacaccgatgcagaccactcgatttcatgaccggccctattgcactatggaagttaaagtgtcacgactgctctatgcatattggatttaggggaattttcattgttacataaatgtgtgaactagtttcaacagtgttctttcatatttactctgcaaatacaaaaaaccaaaacctgcagccagtggtcatttcaaaatctttttatgttcagatactgagccttcataagggttgactacctcagatttgctgcactcattgtggacttcatgtggatcacaacttctggataagaagattacaactattaagtgtcgatgtgaaccttgcaaccagctctactggattcttatcagaaatcctgcataaaaagtcagccatctgggttctgatctgctgtaaaagatgaagatttaagtgaccttaattaacctgtcctgtgccctacccttaaggaatactctctgtagtaggctgttgttatattagacttcctggaacacaccgctgaaaagaactgatgtgttcagatcatctgtgtagggctgtgatttgtaatttaaactaattgtattctgaggtaaccacaaaataaattcaaccaaactggggtccaccaagtgggggaaggggaagggagagaataatcttgggggtttttttttttggtaatttttttatttggatagtgcttttttgttttgtttttgttctgcattaaggccttttttgctttgacttgaaataagttctttgacagagcatattgcttggttaattaagtaacctaaagtatgcattaggattgtgaaatgtctcgtgagtatgccaatcctgagggtggaaccaaatagcctttgatgaaaagggcagtggattctggaggctctacttcaggtgctgctataatgcctcatctaatcaggactaaattgtgtaggaaactgcagtgggaagaatatgctttctgctcaggctaagagggtcactgatctgtccttagaaattcagagtaacatgagcaaaacctcagctaaaacccatttaagtggcatggattgtgcatgatctttgataagaattcctcatgtacttgtgcctagtttttcaaggtattggctgttctatagatgcagtgattgtcccagctagctctgttaccagccttttggtgtgtctttatgttcatttggagagtcagggcgaaagacaggtgatgtagcacttctgtttttaataattattgcttaaaatacctattaatagttttgggtcatttaaagggacttgaggaagctacccaggattacagaagagtgtccacctaacaagatggtctggcagtttcctagttttgtatctggttcaatagaaatatgtgaaagtggtaatgtcatcatttgatgcagagtccgggtttctctataataaatccctttgccaaatgcatgagttgcagacttgctactggcaagagtgaagcaagtgggtgagtaaaactattttgacgtgggagcgttttcagataggagtttagtcttgacgaaagtgtccgtgcaggaattggactccgaggagggttacagtatctcctgacgggacctgccactcgcatctgggcaatgttgacatttgaggtggcaggcaggatgcctgccttctaatatatttgggtgagtaactgagccagccaagggaaggttgaatgattaaatcagaaatgggattcttggtaaactgaagacttttatttgggaatgaaaaaccttaaaaaaatctcttcatcgttgaactgtgcattttccctgcattttttcccaacaaaattttgttgggggttatgttactgaagaatgaacagatgagtaagtggaggtgttatgtaaaggcatattgtactcgaaatctgaagacctgcagcagatttaaattacaactcttgttataactttttaaaagattgtgaaaatatcaaaatataaatgaatcaagttttaatatactgtatgatgggtggatgaggctgtccattgtaccatttgtttgaattctcaggcatggtttggcagtgcaagaattctgtaacattaacaaattcaataaaaagtaaatatatggattttggactgtaaaaaaaaa

SEQ ID NO: 72347 - DNA, 3422 bp, Homo sapiens
actagttctagatcgcgatctagaactagtccggacgcgtgggctgggaagaaggtggaggtggtggtggaggtatggaaaaatcttcaggtccctggaataaaacagctccagtacaagcacctcctgctccagtaattgttacagaaaccccagaaccagcgatgactagtggtgtgtataggcctcctggggccaggttaaccacaacaaggaaaacaccacaaggaccaccagaaatctacagtgatacacagttcccatccctgcagtcaactgccaagcatgtagaaagccggaacaggtacttaaaatgaatgctacctggaattaaatgactacatatggcacatctacatcttactttagggacatgaattttttaaaataaataaaatgggaagaaatgtaaatgacatcagatggaaatgtgtttttggggtggcttttagaataaatcccagccttttcaccactttgagagcacagctggcttgaatttaaacctccacgtggacttgctcctctgctctgtcttaaaaaatgtgtaagggaccttgggagggcagtgattcaccacactcgagtttctttacctgatctaatcagatccactcccacaaaatcgatgtgaggagaaatcattgactaatgagtagaatttacttgaatgagaaaattgttacccttgtgcataaagagagagatgtattatctattacttgctaaaagtaagagtcttaggaggaatgtcattacacagcttttaacagttttcttcaagtttgtcctgaaatagggtcacagttaatactgttcagtagaagataggaccctagagcttcaatacagcgttctgtgttttctgtttgaattgaagccttaaaatggtttgataaggattttctatatgcctccactcctacccctccccaggattcttctaaggggtggcttttttttaaattcaaggacgaatattttcaaaaaccctagtgaagaagaaatatttactgattacatttcttttcccttagggataaagaaatggagaagagctttgaagtagtaagacacaaaaatagaggtagggatgaggtttcaaaaaaccaggcccttaaacttcagctagacaaccaatatgctgtgcttgaaaatcagaaaagcagccactcacaatacaattaaggaatgggctttgctaacccttctgaggtaactagactgcagctaaccaccaccaacagccattcatcatctgatctctgctggatctacagacaccgatgcagaccactcgatttcatgaccggccctattgcactatggaagttaaagtgtcacgactgctctatgcatattggatttaggggaattttcattgttacataaatgtgtgaactagtttcaacagtgttctttcatatttactctgcaaatacaaaaaaccaaaacctgcagccagtggtcatttcaaaatctttttatgttcagatactgagccttcataagggttgactacctcagatttgctgcactcattgtggacttcatgtggatcacaacttctggataagaagattacaactattaagtgtcgatgtgaaccttgcaaccagctctactggattcttatcagaaatcctgcataaaaagtcagccatctgggttctgatctgctgtaaaagatgaagatttaagtgaccttaattaacctgtcctgtgccctacccttaaggaatactctctgtagtaggctgttgttatattagacttcctggaacacaccgctgaaaagaactgatgtgttcagatcatctgtgtagggctgtgatttgtaatttaaactaattgtattctgaggtaaccacaaaataaattcaaccaaactggggtccaccaagtgggggaaggggaagggagagaataatcttgggggtttttttttttggtaatttttttatttggatagtgcttttttgttttgtttttgttctgcattaaggccttttttgctttgacttgaaataagttctttgacagagcatattgcttggttaattaagtaacctaaagtatgcattaggattgtgaaatgtctcgtgagtatgccaatcctgagggtggaaccaaatagcctttgatgaaaagggcagtggattctggaggctctacttcaggtgctgctataatgcctcatctaatcaggactaaattgtgtaggaaactgcagtgggaagaatatgctttctgctcaggctaagagggtcactgatctgtccttagaaattcagagtaacatgagcaaaacctcagctaaaacccatttaagtggcatggattgtgcatgatctttgataagaattcctcatgtacttgtgcctagtttttcaaggtattggctgttctatagatgcagtgattgtcccagctagctctgttaccagccttttggtgtgtctttatgttcatttggagagtcagggcgaaagacaggtgatgtagcacttctgtttttaataattattgcttaaaatacctattaatagttttgggtcatttaaagggacttgaggaagctacccaggattacagaagagtgtccacctaacaagatggtctggcagtttcctagttttgtatctggttcaatagaaatatgtgaaagtggtaatgtcatcatttgatgcagagtccgggtttctctataataaatccctttgccaaatgcatgagttgcagacttgctactggcaagagtgaagcaagtgggtgagtaaaactattttgacgtgggagcgttttcagataggagtttagtcttgacgaaagtgtccgtgcaggaattggactccgaggagggttacagtatctcctgacgggacctgccactcgcatctgggcaatgttgacatttgaggtggcaggcaggatgcctgccttctaatatatttgggtgagtaactgagccagccaagggaaggttgaatgattaaatcagaaatgggattcttggtaaactgaagacttttatttgggaatgaaaaaccttaaaaaaatctcttcatcgttgaactgtgcattttccctgcattttttcccaacaaaattttgttgggggttatgttactgaagaatgaacagatgagtaagtggaggtgttatgtaaaggcatattgtactcgaaatctgaagacctgcagcagatttaaattacaactcttgttataactttttaaaagattgtgaaaatatcaaaatataaatgaatcaagttttaatatactgtatgatgggtggatgaggctgtccattgtaccatttgtttgaattctcaggcatggtttggcagtgcaagaattctgtaacattaacaaattcaataaaaagtaaatatatggattttggactgtaaaaaaaaa

SEQ ID NO: 72348 - DNA, 4506 bp, Homo sapiens
ggcacgagctggctcgcgcgtgccttttcccctcaggttgtggggagagcggaatcctgctccgccgtcgcagcagcagcggcagccccggcagcctcgggcgacagcggcggcgcgcgagcccccgggcggaccgtaccaccgctcgccagcacgcagggggagccgcccgtctcgccgcgcacgcctcggcgaccccgcggggctgaggcgtcgccgcgcccggcagcgtgagcgcagagccggcctcgaccccgagctcggagccccgcgggccgcgcccgccgccggccccacccatccgggtcgaggaggccgaggccatggctgagacggaggagcggagcctggacaacttctttgccaagagggacaagaagaagaagaaggagcggagcaaccgggcggcgagtgccgcgggcgcagcgggcagcgccggcggaagcagtggagccgcgggtgcggcgggcggcggggcgggcgcggggacccggccgggtgacggcgggaccgccagcgcgggggctgcgggcccaggggccgccaccaaggctgtgacgaaggacgaagatgaatggaaagaattggagcaaaaagaggttgattacagcggcctcagggttcaggcaatgcaaataagcagtgaaaaggaagaagacgataatgaaaagagacaagatccaggtgataactgggaagaaggtggaggtggtggtggaggtatggaaaaatcttcaggtccctggaataaaacagctccagtacaagcacctcctgctccagtaattgttacagaaaccccagaaccagcgatgactagtggtgtgtataggcctcctggggccaggttaaccacaacaaggaaaacaccacaaggaccaccagaaatctacagtgatacacagttcccatccctgcagtcaactgccaagcatgtagaaagccggaagtaagtactataattaattgcattttgtttgggacttctgttcctaggccagggagtgggatataggggatgtgcatacccacccaagggagagactactccttaactaataaagcctgagcttcagctgacaggcaggtgagaatcagggtgggacttcatatgtccagaagggaggaaagggggagggcaaagagcattggagacactttgtcttctgtctgcaaaagtttatcttagccctggtttatgttgttttatagcaatgacaagttttaatgtagttaaaattcttttataattaagtggcttttgctccttataatatggaaactagaaatataaaagcgctgtttaattgtattcccagttaatgtgactatagacagaagatgttggcatttataaatctaatattaaaataatcttatttcagcaggtacttaaaatgaatgctacctggaattaaatgactacatatggcacatctacatcttactttagggacatgaattttttaaaataaataaaatgggaagaaatgtaaatgacatcagatggaaatgtgtttttggggtggcttttagaataaatcccagccttttcaccactttgagagcacagctggcttgaatttaaacctccacgtggacttgctcctctgctctgtcttaaaaaatgtgtaagggaccttgggagggcagtgattcaccacactcgagtttctttacctgatctaatcagatccactcccacaaaatcgatgtgaggagaaatcattgactaatgagtagaatttacttgaatgagaaaattgttacccttgtgcataaagagagagatgtattatctattacttgctaaaagtaagagtcttaggaggaatgtcattacacagcttttaacagttttcttcaagtttgtcctgaaatagggtcacagttaatactgttcagtagaagataggaccctagagcttcaatacagcgttctgtgttttctgtttgaattgaagccttaaaatggtttgataaggattttctatatgcctccactcctacccctccccaggattcttctaaggggtggcttttttttaaattcaaggacgaatattttcaaaaaccctagtgaagaagaaatatttactgattacatttcttttcccttagggataaagaaatggagaagagctttgaagtagtaagacacaaaaatagaggtagggatgaggtttcaaaaaaccaggcccttaaacttcagctagacaaccaatatgctgtgcttgaaaatcagaaaagcagccactcacaatacaattaaggaatgggctttgctaacccttctgaggtaactagactgcagctaaccaccaccaacagccattcatcatctgatctctgctggatctacagacaccgatgcagaccactcgatttcatgaccggccctattgcactatggaagttaaagtgtcacgactgctctatgcatattggatttaggggaattttcattgttacataaatgtgtgaactagtttcaacagtgttctttcatatttactctgcaaatacaaaaaaccaaaacctgcagccagtggtcatttcaaaatctttttatgttcagatactgagccttcataagggttgactacctcagatttgctgcactcattgtggacttcatgtggatcacaacttctggataagaagattacaactattaagtgtcgatgtgaaccttgcaaccagctctactggattcttatcagaaatcctgcataaaaagtcagccatctgggttctgatctgctgtaaaagatgaagatttaagtgaccttaattaacctgtcctgtgccctacccttaaggaatactctctgtagtaggctgttgttatattagacttcctggaacacaccgctgaaaagaactgatgtgttcagatcatctgtgtagggctgtgatttgtaatttaaactaattgtattctgaggtaaccacaaaataaattcaaccaaactggggtccaccaagtgggggaaggggaagggagagaataatcttgggggtttttttttttggtaatttttttatttggatagtgcttttttgttttgtttttgttctgcattaaggccttttttgctttgacttgaaataagttctttgacagagcatattgcttggttaattaagtaacctaaagtatgcattaggattgtgaaatgtctcgtgagtatgccaatcctgagggtggaaccaaatagcctttgatgaaaagggcagtggattctggaggctctacttcaggtgctgctataatgcctcatctaatcaggactaaattgtgtaggaaactgcagtgggaagaatatgctttctgctcaggctaagagggtcactgatctgtccttagaaattcagagtaacatgagcaaaacctcagctaaaacccatttaagtggcatggattgtgcatgatctttgataagaattcctcatgtacttgtgcctagtttttcaaggtattggctgttctatagatgcagtgattgtcccagctagctctgttaccagccttttggtgtgtctttatgttcatttggagagtcagggcgaaagacaggtgatgtagcacttctgtttttaataattattgcttaaaatacctattaatagttttgggtcatttaaagggacttgaggaagctacccaggattacagaagagtgtccacctaacaagatggtctggcagtttcctagttttgtatctggttcaatagaaatatgtgaaagtggtaatgtcatcatttgatgcagagtccgggtttctctataataaatccctttgccaaatgcatgagttgcagacttgctactggcaagagtgaagcaagtgggtgagtaaaactattttgacgtgggagcgttttcagataggagtttagtcttgacgaaagtgtccgtgcaggaattggactccgaggagggttacagtatctcctgacgggacctgccactcgcatctgggcaatgttgacatttgaggtggcaggcaggatgcctgccttctaatatatttgggtgagtaactgagccagccaagggaaggttgaatgattaaatcagaaatgggattcttggtaaactgaagacttttatttgggaatgaaaaaccttaaaaaaatctcttcatcgttgaactgtgcattttccctgcattttttcccaacaaaattttgttgggggttatgttactgaagaatgaacagatgagtaagtggaggtgttatgtaaaggcatattgtactcgaaatctgaagacctgcagcagatttaaattacaactcttgttataactttttaaaagattgtgaaaatatcaaaatataaatgaatcaagttttaatatactgtatgatgggtggatgaggctgtccattgtaccatttgtttgaattctcaggcatggtttggcagtgcaagaattctgtaacattaacaaattcaataaaaagtaaatatatggattttggactgtaaaaaaaaa

SEQ ID NO: 72349 - DNA, 3486 bp, Homo sapiens
  misc_feature (3294)..(3294): n is a, c, g, or t
ggcacgagctggctcgcgcgtgccttttcccctcaggttgtggggagagcggaatcctgctccgccgtcgcagcagcagcggcagccccggcagcctcgggcgacagcggcggcgcgcgagcccccgggcggaccgtaccaccgctcgccagcacgcagggggagccgcccgtctcgccgcgcacgcctcggcgaccccgcggggctgaggcgtcgccgcgcccggcagcgtgagcgcagagccggcctcgaccccgagctcggagccccgcgggccgcgcccgccgccggccccacccatccgggtcgaggaggccgaggccatggctgagacggaggagcggagcctggacaacttctttgccaagagggacaagaagaagaagaaggagcggagcaaccgggcggcgagtgccgcgggcgcagcgggcagcgccggcggaagcagtggagccgcgggtgcggcgggcggcggggcgggcgcggggacccggccgggtgacggcgggaccgccagcgcgggggctgcgggcccaggggccgccaccaaggctgtgacgaaggacgaagatgaatggaaagaattggagcaaaaagaggttgattacagcggcctcagggttcaggcaatgcaaataagcagtgaaaaggaagaagacgataatgaaaagagacaagatccaggtgataactgggaagaaggtggaggtggtggtggaggtatggaaaaatcttcaggtccctggaataaaacagctccagtacaagcacctcctgctccagtaattgttacagaaaccccagaaccagcgatgactagtggtgtgtataggcctcctggggccaggttaaccacaacaaggaaaacaccacaaggaccaccagaaatctacagtgatacacagttcccatccctgcagtcaactgccaagcatgtagaaagccggaaggataaagaaatggagaagagctttgaagtagtaagacacaaaaatagaggtagggatgaggtttcaaaaaaccaggcccttaaacttcagctagacaaccaatatgctgtgcttgaaaatcagaaaagcagccactcacaatacaattaaggaatgggctttgctaacccttctgaggtaactagactgcagctaaccaccaccaacagccattcatcatctgatctctgctggatctacagacaccgatgcagaccactcgatttcatgaccggccctattgcactatggaagttaaagtgtcacgactgctctatgcatattggatttaggggaattttcattgttacataaatgtgtgaactagtttcaacagtgttctttcatatttactctgcaaatacaaaaaaccaaaacctgcagccagtggtcatttcaaaatctttttatgttcagatactgagccttcataagggttgactacctcagatttgctgcactcattgtggacttcatgtggatcacaacttctggataagaagattacaactattaagtgtcgatgtgaaccttgcaaccagctctactggattcttatcagaaatcctgcataaaaagtcagccatctgggttctgatctgctgtaaaagatgaagatttaagtgaccttaattaacctgtcctgtgccctacccttaaggaatactctctgtagtaggctgttgttatattagacttcctggaacacaccgctgaaaagaactgatgtgttcagatcatctgtgtagggctgtgatttgtaatttaaactaattgtattctgaggtaaccacaaaataaattcaaccaaactggggtccaccaagtgggggaaggggaagggagagaataatcttgggggtttttttttttggtaatttttttatttggatagtgcttttttgttttgtttttgttctgcattaaggccttttttgctttgacttgaaataagttctttgacagagcatattgcttggttaattaagtaacctaaagtatgcattaggattgtgaaatgtctcgtgagtatgccaatcctgagggtggaaccaaatagcctttgatgaaaagggcagtggattctggaggctctacttcaggtgctgctataatgcctcatctaatcaggactaaattgtgtaggaaactgcagtgggaagaatatgctttctgctcaggctaagagggtcactgatctgtccttagaaattcagagtaacatgagcaaaacctcagctaaaacccatttaagtggcatggattgtgcatgatctttgataagaattcctcatgtacttgtgcctagtttttcaaggtattggctgttctatagatgcagtgattgtcccagctagctctgttaccagccttttggtgtgtctttatgttcatttggagagtcagggcgaaagacaggtgatgtagcacttctgtttttaataattattgcttaaaatacctattaatagttttgggtcatttaaagggacttgaggaagctacccaggattacagaagagtgtccacctaacaagatggtctggcagtttcctagttttgtatctggttcaatagaaatatgtgaaagtggtaatgtcatcatttgatgcagagtccgggtttctctataataaatccctttgccaaatgcatgagttgcagacttgctactggcaagagtgaagcaagtgggtgagtaaaactattttgacgtgggagcgttttcagataggagtttagtcttgacgaaagtgtccgtgcaggaattggactccgaggagggttacagtatctcctgacgggacctgccactcgcatctgggcaatgttgacatttgaggtggcaggcaggatgcctgccttctaatatatttgggtgagtaactgagccagccaagggaaggttgaatgattaaatcagaaatgggattcttggtaaactgaagacttttatttgggaatgaaaaaccttaaaaaaatctcttcatcgttgaactgtgcattttccctgcattttttcccaacaaaattttgttgggggttatgttactgaagaatgaacagatgagtaagtggaggtgttatgtaaaggcatattgtactcgaaatctgaagacctgcagcagatttaaattacaactcttgttataactttttaaaagattgtgaaaatatcaaaatataaatgaatcaagttttaatatactgtatgatgggtggatgaggctgtccattgtaccatttgtttgaattctcaggcatggtttggcagtgcaagaattctgtaacattaacaaattcntaaagtatttttggcacacaaaaaaaaaagggcgggctaaaattcccgggcaattcggtccagttttaaaaggcccacagggataaaaagaggccgtaacagcaggagaagcaggctttaaacccggggttagacacacaaaccggaaagacgaagtccggcgataaaaaaaaaagggctattgtaactcaa

SEQ ID NO: 72350 - DNA, 2576 bp, Homo sapiens
ccggctacgtgcccgaggatgggctcaccgcgcagcagctcttcgccagcgccgacggcctcacctacaacgacttcctgattctcccaggattcttctaaggggtggcttttttttaaattcaaggacgaatattttcaaaaaccctagtgaagaagaaatatttactgattacatttcttttcccttagggataaagaaatggagaagagctttgaagtagtaagacacaaaaatagaggtagggatgaggtttcaaaaaaccaggcccttaaacttcagctagacaaccaatatgctgtgcttgaaaatcagaaaagcagccactcacaatacaattaaggaatgggctttgctaacccttctgaggtaactagactgcagctaaccaccaccaacagccattcatcatctgatctctgctggatctacagacaccgatgcagaccactcgatttcatgaccggccctattgcactatggaagttaaagtgtcacgactgctctatgcatattggatttaggggaattttcattgttacataaatgtgtgaactagtttcaacagtgttctttcatatttactctgcaaatacaaaaaaccaaaacctgcagccagtggtcatttcaaaatctttttatgttcagatactgagccttcataagggttgactacctcagatttgctgcactcattgtggacttcatgtggatcacaacttctggataagaagattacaactattaagtgtcgatgtgaaccttgcaaccagctctactggattcttatcagaaatcctgcataaaaagtcagccatctgggttctgatctgctgtaaaagatgaagatttaagtgaccttaattaacctgtcctgtgccctacccttaaggaatactctctgtagtaggctgttgttatattagacttcctggaacacaccgctgaaaagaactgatgtgttcagatcatctgtgtagggctgtgatttgtaatttaaactaattgtattctgaggtaaccacaaaataaattcaaccaaactggggtccaccaagtgggggaaggggaagggagagaataatcttgggggtttttttttttggtaatttttttatttggatagtgcttttttgttttgtttttgttctgcattaaggccttttttgctttgacttgaaataagttctttgacagagcatattgcttggttaattaagtaacctaaagtatgcattaggattgtgaaatgtctcgtgagtatgccaatcctgagggtggaaccaaatagcctttgatgaaaagggcagtggattctggaggctctacttcaggtgctgctataatgcctcatctaatcaggactaaattgtgtaggaaactgcagtgggaagaatatgctttctgctcaggctaagagggtcactgatctgtccttagaaattcagagtaacatgagcaaaacctcagctaaaacccatttaagtggcatggattgtgcatgatctttgataagaattcctcatgtacttgtgcctagtttttcaaggtattggctgttctatagatgcagtgattgtcccagctagctctgttaccagccttttggtgtgtctttatgttcatttggagagtcagggcgaaagacaggtgatgtagcacttctgtttttaataattattgcttaaaatacctattaatagttttgggtcatttaaagggacttgaggaagctacccaggattacagaagagtgtccacctaacaagatggtctggcagtttcctagttttgtatctggttcaatagaaatatgtgaaagtggtaatgtcatcatttgatgcagagtccgggtttctctataataaatccctttgccaaatgcatgagttgcagacttgctactggcaagagtgaagcaagtgggtgagtaaaactattttgacgtgggagcgttttcagataggagtttagtcttgacgaaagtgtccgtgcaggaattggactccgaggagggttacagtatctcctgacgggacctgccactcgcatctgggcaatgttgacatttgaggtggcaggcaggatgcctgccttctaatatatttgggtgagtaactgagccagccaagggaaggttgaatgattaaatcagaaatgggattcttggtaaactgaagacttttatttgggaatgaaaaaccttaaaaaaatctcttcatcgttgaactgtgcattttccctgcattttttcccaacaaaattttgttgggggttatgttactgaagaatgaacagatgagtaagtggaggtgttatgtaaaggcatattgtactcgaaatctgaagacctgcagcagatttaaattacaactcttgttataactttttaaaagattgtgaaaatatcaaaatataaatgaatcaagttttaatatactgtatgatgggtggatgaggctgtccattgtaccatttgtttgaattctcaggcatggtttggcagtgcaagaattctgtaacattaacaaattcaataaaaagtaaatatatggattttggactgtaaaaaaaaa

SEQ ID NO: 72351 - DNA, 2396 bp, Homo sapiens
ggtcatccgtctaccaaagcaggaggatagagctttgaagtagtaagacacaaaaatagaggtagggatgaggtttcaaaaaaccaggcccttaaacttcagctagacaaccaatatgctgtgcttgaaaatcagaaaagcagccactcacaatacaattaaggaatgggctttgctaacccttctgaggtaactagactgcagctaaccaccaccaacagccattcatcatctgatctctgctggatctacagacaccgatgcagaccactcgatttcatgaccggccctattgcactatggaagttaaagtgtcacgactgctctatgcatattggatttaggggaattttcattgttacataaatgtgtgaactagtttcaacagtgttctttcatatttactctgcaaatacaaaaaaccaaaacctgcagccagtggtcatttcaaaatctttttatgttcagatactgagccttcataagggttgactacctcagatttgctgcactcattgtggacttcatgtggatcacaacttctggataagaagattacaactattaagtgtcgatgtgaaccttgcaaccagctctactggattcttatcagaaatcctgcataaaaagtcagccatctgggttctgatctgctgtaaaagatgaagatttaagtgaccttaattaacctgtcctgtgccctacccttaaggaatactctctgtagtaggctgttgttatattagacttcctggaacacaccgctgaaaagaactgatgtgttcagatcatctgtgtagggctgtgatttgtaatttaaactaattgtattctgaggtaaccacaaaataaattcaaccaaactggggtccaccaagtgggggaaggggaagggagagaataatcttgggggtttttttttttggtaatttttttatttggatagtgcttttttgttttgtttttgttctgcattaaggccttttttgctttgacttgaaataagttctttgacagagcatattgcttggttaattaagtaacctaaagtatgcattaggattgtgaaatgtctcgtgagtatgccaatcctgagggtggaaccaaatagcctttgatgaaaagggcagtggattctggaggctctacttcaggtgctgctataatgcctcatctaatcaggactaaattgtgtaggaaactgcagtgggaagaatatgctttctgctcaggctaagagggtcactgatctgtccttagaaattcagagtaacatgagcaaaacctcagctaaaacccatttaagtggcatggattgtgcatgatctttgataagaattcctcatgtacttgtgcctagtttttcaaggtattggctgttctatagatgcagtgattgtcccagctagctctgttaccagccttttggtgtgtctttatgttcatttggagagtcagggcgaaagacaggtgatgtagcacttctgtttttaataattattgcttaaaatacctattaatagttttgggtcatttaaagggacttgaggaagctacccaggattacagaagagtgtccacctaacaagatggtctggcagtttcctagttttgtatctggttcaatagaaatatgtgaaagtggtaatgtcatcatttgatgcagagtccgggtttctctataataaatccctttgccaaatgcatgagttgcagacttgctactggcaagagtgaagcaagtgggtgagtaaaactattttgacgtgggagcgttttcagataggagtttagtcttgacgaaagtgtccgtgcaggaattggactccgaggagggttacagtatctcctgacgggacctgccactcgcatctgggcaatgttgacatttgaggtggcaggcaggatgcctgccttctaatatatttgggtgagtaactgagccagccaagggaaggttgaatgattaaatcagaaatgggattcttggtaaactgaagacttttatttgggaatgaaaaaccttaaaaaaatctcttcatcgttgaactgtgcattttccctgcattttttcccaacaaaattttgttgggggttatgttactgaagaatgaacagatgagtaagtggaggtgttatgtaaaggcatattgtactcgaaatctgaagacctgcagcagatttaaattacaactcttgttataactttttaaaagattgtgaaaatatcaaaatataaatgaatcaagttttaatatactgtatgatgggtggatgaggctgtccattgtaccatttgtttgaattctcaggcatggtttggcagtgcaagaattctgtaacattaacaaattcaataaaaagtaaatatatggattttggactgtaaaaaaaaa

SEQ ID NO: 72352 - DNA, 2199 bp, Homo sapiens
ctctagaggcccccatctgcctatccattcatcatctgatctctgctggatctacagacaccgatgcagaccactcgatttcatgaccggccctattgcactatggaagttaaagtgtcacgactgctctatgcatattggatttaggggaattttcattgttacataaatgtgtgaactagtttcaacagtgttctttcatatttactctgcaaatacaaaaaaccaaaacctgcagccagtggtcatttcaaaatctttttatgttcagatactgagccttcataagggttgactacctcagatttgctgcactcattgtggacttcatgtggatcacaacttctggataagaagattacaactattaagtgtcgatgtgaaccttgcaaccagctctactggattcttatcagaaatcctgcataaaaagtcagccatctgggttctgatctgctgtaaaagatgaagatttaagtgaccttaattaacctgtcctgtgccctacccttaaggaatactctctgtagtaggctgttgttatattagacttcctggaacacaccgctgaaaagaactgatgtgttcagatcatctgtgtagggctgtgatttgtaatttaaactaattgtattctgaggtaaccacaaaataaattcaaccaaactggggtccaccaagtgggggaaggggaagggagagaataatcttgggggtttttttttttggtaatttttttatttggatagtgcttttttgttttgtttttgttctgcattaaggccttttttgctttgacttgaaataagttctttgacagagcatattgcttggttaattaagtaacctaaagtatgcattaggattgtgaaatgtctcgtgagtatgccaatcctgagggtggaaccaaatagcctttgatgaaaagggcagtggattctggaggctctacttcaggtgctgctataatgcctcatctaatcaggactaaattgtgtaggaaactgcagtgggaagaatatgctttctgctcaggctaagagggtcactgatctgtccttagaaattcagagtaacatgagcaaaacctcagctaaaacccatttaagtggcatggattgtgcatgatctttgataagaattcctcatgtacttgtgcctagtttttcaaggtattggctgttctatagatgcagtgattgtcccagctagctctgttaccagccttttggtgtgtctttatgttcatttggagagtcagggcgaaagacaggtgatgtagcacttctgtttttaataattattgcttaaaatacctattaatagttttgggtcatttaaagggacttgaggaagctacccaggattacagaagagtgtccacctaacaagatggtctggcagtttcctagttttgtatctggttcaatagaaatatgtgaaagtggtaatgtcatcatttgatgcagagtccgggtttctctataataaatccctttgccaaatgcatgagttgcagacttgctactggcaagagtgaagcaagtgggtgagtaaaactattttgacgtgggagcgttttcagataggagtttagtcttgacgaaagtgtccgtgcaggaattggactccgaggagggttacagtatctcctgacgggacctgccactcgcatctgggcaatgttgacatttgaggtggcaggcaggatgcctgccttctaatatatttgggtgagtaactgagccagccaagggaaggttgaatgattaaatcagaaatgggattcttggtaaactgaagacttttatttgggaatgaaaaaccttaaaaaaatctcttcatcgttgaactgtgcattttccctgcattttttcccaacaaaattttgttgggggttatgttactgaagaatgaacagatgagtaagtggaggtgttatgtaaaggcatattgtactcgaaatctgaagacctgcagcagatttaaattacaactcttgttataactttttaaaagattgtgaaaatatcaaaatataaatgaatcaagttttaatatactgtatgatgggtggatgaggctgtccattgtaccatttgtttgaattctcaggcatggtttggcagtgcaagaattctgtaacattaacaaattcaataaaaagtaaatatatggattttggactgtaaaaaaaaa

SEQ ID NO: 72353 - DNA, 2877 bp, Homo sapiens
ggcacgagctggctcgcgcgtgccttttcccctcaggttgtggggagagcggaatcctgctccgccgtcgcagcagcagcggcagccccggcagcctcgggcgacagcggcggcgcgcgagcccccgggcggaccgtaccaccgctcgccagcacgcagggggagccgcccgtctcgccgcgcacgcctcggcgaccccgcggggctgaggcgtcgccgcgcccggcagcgtgagcgcagagccggcctcgaccccgagctcggagccccgcgggccgcgcccgccgccggccccacccatccgggtcgaggaggccgaggccatggctgagacggaggagcggagcctggacaacttctttgccaagagggacaagaagaagaagaaggagcggagcaaccgggcggcgagtgccgcgggcgcagcgggcagcgccggcggaagcagtggagccgcgggtgcggcgggcggcggggcgggcgcggggacccggccgggtgacggcgggaccgccagcgcgggggctgcgggcccaggggccgccaccaaggctgtgacgaaggacgaagatgaatggaaagaattggagcaaaaagaggttgattacagcggcctcagggttcaggcaatgcaaataagcagtgaaaaggaagaagacgataatgaaaagagacaagatccaggtgataactgggaagaaggtggaggtggtggtggaggtatggaaaaatcttcaggtccctggaataaaacagctccagtacaagcacctcctgctccagtaattgttacagaaaccccagaaccagcgatgactagtggtgtgtataggcctcctggggccaggttaaccacaacaaggaaaacaccacaaggaccaccagaaatctacagtgatacacagttcccatccctgcagtcaactgccaagcatgtagaaagccggaaatactgagccttcataagggttgactacctcagatttgctgcactcattgtggacttcatgtggatcacaacttctggataagaagattacaactattaagtgtcgatgtgaaccttgcaaccagctctactggattcttatcagaaatcctgcataaaaagtcagccatctgggttctgatctgctgtaaaagatgaagatttaagtgaccttaattaacctgtcctgtgccctacccttaaggaatactctctgtagtaggctgttgttatattagacttcctggaacacaccgctgaaaagaactgatgtgttcagatcatctgtgtagggctgtgatttgtaatttaaactaattgtattctgaggtaaccacaaaataaattcaaccaaactggggtccaccaagtgggggaaggggaagggagagaataatcttgggggtttttttttttggtaatttttttatttggatagtgcttttttgttttgtttttgttctgcattaaggccttttttgctttgacttgaaataagttctttgacagagcatattgcttggttaattaagtaacctaaagtatgcattaggattgtgaaatgtctcgtgagtatgccaatcctgagggtggaaccaaatagcctttgatgaaaagggcagtggattctggaggctctacttcaggtgctgctataatgcctcatctaatcaggactaaattgtgtaggaaactgcagtgggaagaatatgctttctgctcaggctaagagggtcactgatctgtccttagaaattcagagtaacatgagcaaaacctcagctaaaacccatttaagtggcatggattgtgcatgatctttgataagaattcctcatgtacttgtgcctagtttttcaaggtattggctgttctatagatgcagtgattgtcccagctagctctgttaccagccttttggtgtgtctttatgttcatttggagagtcagggcgaaagacaggtgatgtagcacttctgtttttaataattattgcttaaaatacctattaatagttttgggtcatttaaagggacttgaggaagctacccaggattacagaagagtgtccacctaacaagatggtctggcagtttcctagttttgtatctggttcaatagaaatatgtgaaagtggtaatgtcatcatttgatgcagagtccgggtttctctataataaatccctttgccaaatgcatgagttgcagacttgctactggcaagagtgaagcaagtgggtgagtaaaactattttgacgtgggagcgttttcagataggagtttagtcttgacgaaagtgtccgtgcaggaattggactccgaggagggttacagtatctcctgacgggacctgccactcgcatctgggcaatgttgacatttgaggtggcaggcaggatgcctgccttctaatatatttgggtgagtaactgagccagccaagggaaggttgaatgattaaatcagaaatgggattcttggtaaactgaagacttttatttgggaatgaaaaaccttaaaaaaatctcttcatcgttgaactgtgcattttccctgcattttttcccaacaaaattttgttgggggttatgttactgaagaatgaacagatgagtaagtggaggtgttatgtaaaggcatattgtactcgaaatctgaagacctgcagcagatttaaattacaactcttgttataactttttaaaagattgtgaaaatatcaaaatataaatgaatcaagttttaatatactgtatgatgggtggatgaggctgtccattgtaccatttgtttgaattctcaggcatggtttggcagtgcaagaattctgtaacattaacaaattcaataaaaagtaaatatatggattttggactgtaaaaaaaaa

SEQ ID NO: 72354 - DNA, 1761 bp, Homo sapiens
accatagtttacttttttaggatttctcccccttttaatagaaatatttgatcctatactatattccagttatcatagccaaattttttttttcctacccagatcattcttgatcatcagcttccccaactagtaagtctgtgcatcattgggtgtttttttttaaattaattgtaaattatcccagctattagatagaagggataatttaaaataaattcaaccaaactggggtccaccaagtgggggaaggggaagggagagaataatcttgggggtttttttttttggtaatttttttatttggatagtgcttttttgttttgtttttgttctgcattaaggccttttttgctttgacttgaaataagttctttgacagagcatattgcttggttaattaagtaacctaaagtatgcattaggattgtgaaatgtctcgtgagtatgccaatcctgagggtggaaccaaatagcctttgatgaaaagggcagtggattctggaggctctacttcaggtgctgctataatgcctcatctaatcaggactaaattgtgtaggaaactgcagtgggaagaatatgctttctgctcaggctaagagggtcactgatctgtccttagaaattcagagtaacatgagcaaaacctcagctaaaacccatttaagtggcatggattgtgcatgatctttgataagaattcctcatgtacttgtgcctagtttttcaaggtattggctgttctatagatgcagtgattgtcccagctagctctgttaccagccttttggtgtgtctttatgttcatttggagagtcagggcgaaagacaggtgatgtagcacttctgtttttaataattattgcttaaaatacctattaatagttttgggtcatttaaagggacttgaggaagctacccaggattacagaagagtgtccacctaacaagatggtctggcagtttcctagttttgtatctggttcaatagaaatatgtgaaagtggtaatgtcatcatttgatgcagagtccgggtttctctataataaatccctttgccaaatgcatgagttgcagacttgctactggcaagagtgaagcaagtgggtgagtaaaactattttgacgtgggagcgttttcagataggagtttagtcttgacgaaagtgtccgtgcaggaattggactccgaggagggttacagtatctcctgacgggacctgccactcgcatctgggcaatgttgacatttgaggtggcaggcaggatgcctgccttctaatatatttgggtgagtaactgagccagccaagggaaggttgaatgattaaatcagaaatgggattcttggtaaactgaagacttttatttgggaatgaaaaaccttaaaaaaatctcttcatcgttgaactgtgcattttccctgcattttttcccaacaaaattttgttgggggttatgttactgaagaatgaacagatgagtaagtggaggtgttatgtaaaggcatattgtactcgaaatctgaagacctgcagcagatttaaattacaactcttgttataactttttaaaagattgtgaaaatatcaaaatataaatgaatcaagttttaatatactgtatgatgggtggatgaggctgtccattgtaccatttgtttgaattctcaggcatggtttggcagtgcaagaattctgtaacattaacaaattcaataaaaagtaaatatatggattttggactgtaaaaaaaaa

SEQ ID NO: 72355 - DNA, 4144 bp, Homo sapiens
ggcacgagctggctcgcgcgtgccttttcccctcaggttgtggggagagcggaatcctgctccgccgtcgcagcagcagcggcagccccggcagcctcgggcgacagcggcggcgcgcgagcccccgggcggaccgtaccaccgctcgccagcacgcagggggagccgcccgtctcgccgcgcacgcctcggcgaccccgcggggctgaggcgtcgccgcgcccggcagcgtgagcgcagagccggcctcgaccccgagctcggagccccgcgggccgcgcccgccgccggccccacccatccgggtcgaggaggccgaggccatggctgagacggaggagcggagcctggacaacttctttgccaagagggacaagaagaagaagaaggagcggagcaaccgggcggcgagtgccgcgggcgcagcgggcagcgccggcggaagcagtggagccgcgggtgcggcgggcggcggggcgggcgcggggacccggccgggtgacggcgggaccgccagcgcgggggctgcgggcccaggggccgccaccaaggctgtgacgaaggacgaagatgaatggaaagaattggagcaaaaagaggttgattacagcggcctcagggttcaggcaatgcaaataagcagtgaaaaggaagaagacgataatgaaaagagacaagatccaggtgataactgggaagaaggtggaggtggtggtggaggtatggaaaaatcttcaggtccctggaataaaacagctccagtacaagcacctcctgctccagtaattgttacagaaaccccagaaccagcgatgactagtggtgtgtataggcctcctggggccaggttaaccacaacaaggaaaacaccacaaggaccaccagaaatctacagtgatacacagttcccatccctgcagtcaactgccaagcatgtagaaagccggaacaggtacttaaaatgaatgctacctggaattaaatgactacatatggcacatctacatcttactttagggacatgaattttttaaaataaataaaatgggaagaaatgtaaatgacatcagatggaaatgtgtttttggggtggcttttagaataaatcccagccttttcaccactttgagagcacagctggcttgaatttaaacctccacgtggacttgctcctctgctctgtcttaaaaaatgtgtaagggaccttgggagggcagtgattcaccacactcgagtttctttacctgatctaatcagatccactcccacaaaatcgatgtgaggagaaatcattgactaatgagtagaatttacttgaatgagaaaattgttacccttgtgcataaagagagagatgtattatctattacttgctaaaagtaagagtcttaggaggaatgtcattacacagcttttaacagttttcttcaagtttgtcctgaaatagggtcacagttaatactgttcagtagaagataggaccctagagcttcaatacagcgttctgtgttttctgtttgaattgaagccttaaaatggtttgataaggattttctatatgcctccactcctacccctccccaggattcttctaaggggtggcttttttttaaattcaaggacgaatattttcaaaaaccctagtgaagaagaaatatttactgattacatttcttttcccttagggataaagaaatggagaagagctttgaagtagtaagacacaaaaatagaggtagggatgaggtttcaaaaaaccaggcccttaaacttcagctagacaaccaatatgctgtgcttgaaaatcagaaaagcagccactcacaatacaattaaggaatgggctttgctaacccttctgaggtaactagactgcagctaaccaccaccaacagccattcatcatctgatctctgctggatctacagacaccgatgcagaccactcgatttcatgaccggccctattgcactatggaagttaaagtgtcacgactgctctatgcatattggatttaggggaattttcattgttacataaatgtgtgaactagtttcaacagtgttctttcatatttactctgcaaatacaaaaaaccaaaacctgcagccagtggtcatttcaaaatctttttatgttcagatactgagccttcataagggttgactacctcagatttgctgcactcattgtggacttcatgtggatcacaacttctggataagaagattacaactattaagtgtcgatgtgaaccttgcaaccagctctactggattcttatcagaaatcctgcataaaaagtcagccatctgggttctgatctgctgtaaaagatgaagatttaagtgaccttaattaacctgtcctgtgccctacccttaaggaatactctctgtagtaggctgttgttatattagacttcctggaacacaccgctgaaaagaactgatgtgttcagatcatctgtgtagggctgtgatttgtaatttaaactaattgtattctgaggtaaccacaaaataaattcaaccaaactggggtccaccaagtgggggaaggggaagggagagaataatcttgggggtttttttttttggtaatttttttatttggatagtgcttttttgttttgtttttgttctgcattaaggccttttttgctttgacttgaaataagttctttgacagagcatattgcttggttaattaagtaacctaaagtatgcattaggattgtgaaatgtctcgtgagtatgccaatcctgagggtggaaccaaatagcctttgatgaaaagggcagtggattctggaggctctacttcaggtgctgctataatgcctcatctaatcaggactaaattgtgtaggaaactgcagtgggaagaatatgctttctgctcaggctaagagggtcactgatctgtccttagaaattcagagtaacatgagcaaaacctcagctaaaacccatttaagtggcatggattgtgcatgatctttgataagaattcctcatgtacttgtgcctagtttttcaaggtattggctgttctatagatgcagtgattgtcccagctagctctgttaccagccttttggtgtgtctttatgttcatttggagagtcagggcgaaagacaggtgatgtagcacttctgtttttaataattattgcttaaaatacctattaatagttttgggtcatttaaagggacttgaggaagctacccaggattacagaagagtgtccacctaacaagatggtctggcagtttcctagttttgtatctggttcaatagaaatatgtgaaagtggtaatgtcatcatttgatgcagagtccgggtttctctataataaatccctttgccaaatgcatgagttgcagacttgctactggcaagagtgaagcaagtgggtgagtaaaactattttgacgtgggagcgttttcagataggagtttagtcttgacgaaagtgtccgtgcaggaattggactccgaggagggttacagtatctcctgacgggacctgccactcgcatctgggcaatgttgacatttgaggtggcaggcaggatgcctgccttctaatatatttgggtgagtaactgagccagccaagggaaggttgaatgattaaatcagaaatgggattcttggtaaactgaagacttttatttgggaatgaaaaaccttaaaaaaatctcttcatcgttgaactgtgcattttccctgcattttttcccaacaaaattttgttgggggttatgttactgaagaatgaacagatgagtaagtggaggtgttatgtaaaggcatattgtactcgaaatctgaagacctgcagcagatttaaattacaactcttgttataactttttaaaagattgtgaaaatatcaaaatataaatgaatcaagttttaatatactgtatgatgggtggatgaggctgtccattgtaccatttgttgatctcaaggatggtggagggagaatccggacattaaattctacaagattttgggaaaagaggaaaaaaaatggggggggggcgaaagaataaattgggggggccaagaagaagggaaatgaaaagggaaggggcaaaaagggggggaaaggtggtgaagaaaaaaagg

SEQ ID NO: 72356 - DNA, 1459 bp, Homo sapiens
atctataggctccctgtagatagtagtagttgttttcctgctctaactgttctttggaaggagcagaggatgaatctgttgcatcgctgggggggtttacttcactaggaatgtactgaaagataacatctctcccaaacttcacgtagataaaggatttgtgaacatcttaatgactagcttcttacagcagtggattctggaggctctacttcaggtgctgctataatgcctcatctaatcaggactaaattgtgtaggaaactgcagtgggaagaatatgctttctgctcaggctaagagggtcactgatctgtccttagaaattcagagtaacatgagcaaaacctcagctaaaacccatttaagtggcatggattgtgcatgatctttgataagaattcctcatgtacttgtgcctagtttttcaaggtattggctgttctatagatgcagtgattgtcccagctagctctgttaccagccttttggtgtgtctttatgttcatttggagagtcagggcgaaagacaggtgatgtagcacttctgtttttaataattattgcttaaaatacctattaatagttttgggtcatttaaagggacttgaggaagctacccaggattacagaagagtgtccacctaacaagatggtctggcagtttcctagttttgtatctggttcaatagaaatatgtgaaagtggtaatgtcatcatttgatgcagagtccgggtttctctataataaatccctttgccaaatgcatgagttgcagacttgctactggcaagagtgaagcaagtgggtgagtaaaactattttgacgtgggagcgttttcagataggagtttagtcttgacgaaagtgtccgtgcaggaattggactccgaggagggttacagtatctcctgacgggacctgccactcgcatctgggcaatgttgacatttgaggtggcaggcaggatgcctgccttctaatatatttgggtgagtaactgagccagccaagggaaggttgaatgattaaatcagaaatgggattcttggtaaactgaagacttttatttgggaatgaaaaaccttaaaaaaatctcttcatcgttgaactgtgcattttccctgcattttttcccaacaaaattttgttgggggttatgttactgaagaatgaacagatgagtaagtggaggtgttatgtaaaggcatattgtactcgaaatctgaagacctgcagcagatttaaattacaactcttgttataactttttaaaagattgtgaaaatatcaaaatataaatgaatcaagttttaatatactgtatgatgggtggatgaggctgtccattgtaccatttgtttgaattctcaggcatggtttggcagtgcaagaattctgtaacattaacaaattcaataaaaagtaaatatatggattttggactgtaaaaaaaaa

SEQ ID NO: 72357 - DNA, 3471 bp, Homo sapiens
  misc_feature (3455)..(3456): n is a, c, g, or t
ggcacgagctggctcgcgcgtgccttttcccctcaggttgtggggagagcggaatcctgctccgccgtcgcagcagcagcggcagccccggcagcctcgggcgacagcggcggcgcgcgagcccccgggcggaccgtaccaccgctcgccagcacgcagggggagccgcccgtctcgccgcgcacgcctcggcgaccccgcggggctgaggcgtcgccgcgcccggcagcgtgagcgcagagccggcctcgaccccgagctcggagccccgcgggccgcgcccgccgccggccccacccatccgggtcgaggaggccgaggccatggctgagacggaggagcggagcctggacaacttctttgccaagagggacaagaagaagaagaaggagcggagcaaccgggcggcgagtgccgcgggcgcagcgggcagcgccggcggaagcagtggagccgcgggtgcggcgggcggcggggcgggcgcggggacccggccgggtgacggcgggaccgccagcgcgggggctgcgggcccaggggccgccaccaaggctgtgacgaaggacgaagatgaatggaaagaattggagcaaaaagaggttgattacagcggcctcagggttcaggcaatgcaaataagcagtgaaaaggaagaagacgataatgaaaagagacaagatccaggtgataactgggaagaaggtggaggtggtggtggaggtatggaaaaatcttcaggtccctggaataaaacagctccagtacaagcacctcctgctccagtaattgttacagaaaccccagaaccagcgatgactagtggtgtgtataggcctcctggggccaggttaaccacaacaaggaaaacaccacaaggaccaccagaaatctacagtgatacacagttcccatccctgcagtcaactgccaagcatgtagaaagccggaacaggtacttaaaatgaatgctacctggaattaaatgactacatatggcacatctacatcttactttagggacatgaattttttaaaataaataaaatgggaagaaatgtaaatgacatcagatggaaatgtgtttttggggtggcttttagaataaatcccagccttttcaccactttgagagcacagctggcttgaatttaaacctccacgtggacttgctcctctgctctgtcttaaaaaatgtgtaagggaccttgggagggcagtgattcaccacactcgagtttctttacctgatctaatcagatccactcccacaaaatcgatgtgaggagaaatcattgactaatgagtagaatttacttgaatgagaaaattgttacccttgtgcataaagagagagatgtattatctattacttgctaaaagtaagagtcttaggaggaatgtcattacacagcttttaacagttttcttcaagtttgtcctgaaatagggtcacagttaatactgttcagtagaagataggaccctagagcttcaatacagcgttctgtgttttctgtttgaattgaagccttaaaatggtttgataaggattttctatatgcctccactcctacccctccccaggattcttctaaggggtggcttttttttaaattcaaggacgaatattttcaaaaaccctagtgaagaagaaatatttactgattacatttcttttcccttagggataaagaaatggagaagagctttgaagtagtaagacacaaaaatagaggtagggatgaggtttcaaaaaaccaggcccttaaacttcagctagacaaccaatatgctgtgcttgaaaatcagaaaagcagccactcacaatacaattaaggaatgggctttgctaacccttctgaggtaactagactgcagctaaccaccaccaacagccattcatcatctgatctctgctggatctacagacaccgatgcagaccactcgatttcatgaccggccctattgcactatggaagttaaagtgtcacgactgctctatgcatattggatttaggggaattttcattgttacataaatgtgtgaactagtttcaacagtgttctttcatatttactctgcaaatacaaaaaaccaaaacctgcagccagtggtcatttcaaaatctttttatgttcagatactgagccttcataagggttgactacctcagatttgctgcactcattgtggacttcatgtggatcacaacttctggataagaagattacaactattaagtgtcgatgtgaaccttgcaaccagctctactggattcttatcagaaatcctgcataaaaagtcagccatctgggttctgatctgctgtaaaagatgaagatttaagtgaccttaattaacctgtcctgtgccctacccttaaggaatactctctgtagtaggctgttgttatattagacttcctggaacacaccgctgaaaagaactgatgtgttcagatcatctgtgtagggctgtgatttgtaatttaaactaattgtattctgaggtaaccacaaaataaattcaaccaaactggggtccaccaagtgggggaaggggaagggagagaataatcttgggggtttttttttttggtaatttttttatttggatagtgcttttttgttttgtttttgttctgcattaaggccttttttgctttgacttgaaataagttctttgacagagcatattgcttggttaattaagtaacctaaagtatgcattaggattgtgaaatgtctcgtgagtatgccaatcctgagggtggaaccaaatagcctttgatgaaaagggcagtggattctggaggctctacttcaggtgctgctataatgcctcatctaatcaggactaaattgtgtaggaaactgcagtgggaagaatatgctttctgctcaggctaagagggtcactgatctgtccttagaaattcagagtaacatgagcaaaacctcagctaaaacccatttaagtggcatggattgtgcatgatctttgataagaattcctcatgtacttgtgcctagtttttcaaggtattggctgttctatagatgcagtgattgtcccagctagctctgttaccagccttttggtgtgtctttatgttcatttggagagtcagggcgaaagacaggtgatgtagcacttctgtttttaataattattgcttaaaatacctattaatagttttgggtcatttaaagggacttgaggaagctacccaggattacagaagagtgtccacctaacaagatggtctggcagtttcctagttttgtatctggttcaatagaaatatgtgaaagtggtaatgtcatcatttgatgcagagtccgggtttctctataataaatccctttgccaaatgcatgagttgcagacttgctactggcaagagtgaagcaagtgggtgagtaaaactattttgacgtggggtaggaggtnnggatactctaaagtc

SEQ ID NO: 72358 - DNA, 1114 bp, Homo sapiens
cgctctagaggatctcccctcctaccccatggattgtgcatgatctttgataagaattcctcatgtacttgtgcctagtttttcaaggtattggctgttctatagatgcagtgattgtcccagctagctctgttaccagccttttggtgtgtctttatgttcatttggagagtcagggcgaaagacaggtgatgtagcacttctgtttttaataattattgcttaaaatacctattaatagttttgggtcatttaaagggacttgaggaagctacccaggattacagaagagtgtccacctaacaagatggtctggcagtttcctagttttgtatctggttcaatagaaatatgtgaaagtggtaatgtcatcatttgatgcagagtccgggtttctctataataaatccctttgccaaatgcatgagttgcagacttgctactggcaagagtgaagcaagtgggtgagtaaaactattttgacgtgggagcgttttcagataggagtttagtcttgacgaaagtgtccgtgcaggaattggactccgaggagggttacagtatctcctgacgggacctgccactcgcatctgggcaatgttgacatttgaggtggcaggcaggatgcctgccttctaatatatttgggtgagtaactgagccagccaagggaaggttgaatgattaaatcagaaatgggattcttggtaaactgaagacttttatttgggaatgaaaaaccttaaaaaaatctcttcatcgttgaactgtgcattttccctgcattttttcccaacaaaattttgttgggggttatgttactgaagaatgaacagatgagtaagtggaggtgttatgtaaaggcatattgtactcgaaatctgaagacctgcagcagatttaaattacaactcttgttataactttttaaaagattgtgaaaatatcaaaatataaatgaatcaagttttaatatactgtatgatgggtggatgaggctgtccattgtaccatttgtttgaattctcaggcatggtttggcagtgcaagaattctgtaacattaacaaattcaataaaaagtaaatatatggattttggactgtaaaaaaaaa

SEQ ID NO: 72359 - DNA, 1107 bp, Homo sapiens
gggaattcttatcaaagatcatgcacaagtacatgaggaattcttatcaaagatcatgtacttgtgcctagtttttcaaggtattggctgttctatagatgcagtgattgtcccagctagctctgttaccagccttttggtgtgtctttatgttcatttggagagtcagggcgaaagacaggtgatgtagcacttctgtttttaataattattgcttaaaatacctattaatagttttgggtcatttaaagggacttgaggaagctacccaggattacagaagagtgtccacctaacaagatggtctggcagtttcctagttttgtatctggttcaatagaaatatgtgaaagtggtaatgtcatcatttgatgcagagtccgggtttctctataataaatccctttgccaaatgcatgagttgcagacttgctactggcaagagtgaagcaagtgggtgagtaaaactattttgacgtgggagcgttttcagataggagtttagtcttgacgaaagtgtccgtgcaggaattggactccgaggagggttacagtatctcctgacgggacctgccactcgcatctgggcaatgttgacatttgaggtggcaggcaggatgcctgccttctaatatatttgggtgagtaactgagccagccaagggaaggttgaatgattaaatcagaaatgggattcttggtaaactgaagacttttatttgggaatgaaaaaccttaaaaaaatctcttcatcgttgaactgtgcattttccctgcattttttcccaacaaaattttgttgggggttatgttactgaagaatgaacagatgagtaagtggaggtgttatgtaaaggcatattgtactcgaaatctgaagacctgcagcagatttaaattacaactcttgttataactttttaaaagattgtgaaaatatcaaaatataaatgaatcaagttttaatatactgtatgatgggtggatgaggctgtccattgtaccatttgtttgaattctcaggcatggtttggcagtgcaagaattctgtaacattaacaaattcaataaaaagtaaatatatggattttggactgtaaaaaaaaa

SEQ ID NO: 72360 - DNA, 923 bp, Homo sapiens
tccgacacgctccggaactagattactggcttacgactacctattaatagttttgggtcatttaaagggacttgaggaagctacccaggattacagaagagtgtccacctaacaagatggtctggcagtttcctagttttgtatctggttcaatagaaatatgtgaaagtggtaatgtcatcatttgatgcagagtccgggtttctctataataaatccctttgccaaatgcatgagttgcagacttgctactggcaagagtgaagcaagtgggtgagtaaaactattttgacgtgggagcgttttcagataggagtttagtcttgacgaaagtgtccgtgcaggaattggactccgaggagggttacagtatctcctgacgggacctgccactcgcatctgggcaatgttgacatttgaggtggcaggcaggatgcctgccttctaatatatttgggtgagtaactgagccagccaagggaaggttgaatgattaaatcagaaatgggattcttggtaaactgaagacttttatttgggaatgaaaaaccttaaaaaaatctcttcatcgttgaactgtgcattttccctgcattttttcccaacaaaattttgttgggggttatgttactgaagaatgaacagatgagtaagtggaggtgttatgtaaaggcatattgtactcgaaatctgaagacctgcagcagatttaaattacaactcttgttataactttttaaaagattgtgaaaatatcaaaatataaatgaatcaagttttaatatactgtatgatgggtggatgaggctgtccattgtaccatttgtttgaattctcaggcatggtttggcagtgcaagaattctgtaacattaacaaattcaataaaaagtaaatatatggattttggactgtaaaaaaaaa

SEQ ID NO: 72361 - DNA, 919 bp, Homo sapiens
gttgattctagagtatcccggtcatcttgctacaccctattaatagttttgggtcatttaaagggacttgaggaagctacccaggattacagaagagtgtccacctaacaagatggtctggcagtttcctagttttgtatctggttcaatagaaatatgtgaaagtggtaatgtcatcatttgatgcagagtccgggtttctctataataaatccctttgccaaatgcatgagttgcagacttgctactggcaagagtgaagcaagtgggtgagtaaaactattttgacgtgggagcgttttcagataggagtttagtcttgacgaaagtgtccgtgcaggaattggactccgaggagggttacagtatctcctgacgggacctgccactcgcatctgggcaatgttgacatttgaggtggcaggcaggatgcctgccttctaatatatttgggtgagtaactgagccagccaagggaaggttgaatgattaaatcagaaatgggattcttggtaaactgaagacttttatttgggaatgaaaaaccttaaaaaaatctcttcatcgttgaactgtgcattttccctgcattttttcccaacaaaattttgttgggggttatgttactgaagaatgaacagatgagtaagtggaggtgttatgtaaaggcatattgtactcgaaatctgaagacctgcagcagatttaaattacaactcttgttataactttttaaaagattgtgaaaatatcaaaatataaatgaatcaagttttaatatactgtatgatgggtggatgaggctgtccattgtaccatttgtttgaattctcaggcatggtttggcagtgcaagaattctgtaacattaacaaattcaataaaaagtaaatatatggattttggactgtaaaaaaaaa

SEQ ID NO: 72362 - DNA, 3182 bp, Homo sapiens
ggcacgagctggctcgcgcgtgccttttcccctcaggttgtggggagagcggaatcctgctccgccgtcgcagcagcagcggcagccccggcagcctcgggcgacagcggcggcgcgcgagcccccgggcggaccgtaccaccgctcgccagcacgcagggggagccgcccgtctcgccgcgcacgcctcggcgaccccgcggggctgaggcgtcgccgcgcccggcagcgtgagcgcagagccggcctcgaccccgagctcggagccccgcgggccgcgcccgccgccggccccacccatccgggtcgaggaggccgaggccatggctgagacggaggagcggagcctggacaacttctttgccaagagggacaagaagaagaagaaggagcggagcaaccgggcggcgagtgccgcgggcgcagcgggcagcgccggcggaagcagtggagccgcgggtgcggcgggcggcggggcgggcgcggggacccggccgggtgacggcgggaccgccagcgcgggggctgcgggcccaggggccgccaccaaggctgtgacgaaggacgaagatgaatggaaagaattggagcaaaaagaggttgattacagcggcctcagggttcaggcaatgcaaataagcagtgaaaaggaagaagacgataatgaaaagagacaagatccaggtgataactgggaagaaggtggaggtggtggtggaggtatggaaaaatcttcaggtccctggaataaaacagctccagtacaagcacctcctgctccagtaattgttacagaaaccccagaaccagcgatgactagtggtgtgtataggcctcctggggccaggttaaccacaacaaggaaaacaccacaaggaccaccagaaatctacagtgatacacagttcccatccctgcagtcaactgccaagcatgtagaaagccggaacaggtacttaaaatgaatgctacctggaattaaatgactacatatggcacatctacatcttactttagggacatgaattttttaaaataaataaaatgggaagaaatgtaaatgacatcagatggaaatgtgtttttggggtggcttttagaataaatcccagccttttcaccactttgagagcacagctggcttgaatttaaacctccacgtggacttgctcctctgctctgtcttaaaaaatgtgtaagggaccttgggagggcagtgattcaccacactcgagtttctttacctgatctaatcagatccactcccacaaaatcgatgtgaggagaaatcattgactaatgagtagaatttacttgaatgagaaaattgttacccttgtgcataaagagagagatgtattatctattacttgctaaaagtaagagtcttaggaggaatgtcattacacagcttttaacagttttcttcaagtttgtcctgaaatagggtcacagttaatactgttcagtagaagataggaccctagagcttcaatacagcgttctgtgttttctgtttgaattgaagccttaaaatggtttgataaggattttctatatgcctccactcctacccctccccaggattcttctaaggggtggcttttttttaaattcaaggacgaatattttcaaaaaccctagtgaagaagaaatatttactgattacatttcttttcccttagggataaagaaatggagaagagctttgaagtagtaagacacaaaaatagaggtagggatgaggtttcaaaaaaccaggcccttaaacttcagctagacaaccaatatgctgtgcttgaaaatcagaaaagcagccactcacaatacaattaaggaatgggctttgctaacccttctgaggtaactagactgcagctaaccaccaccaacagccattcatcatctgatctctgctggatctacagacaccgatgcagaccactcgatttcatgaccggccctattgcactatggaagttaaagtgtcacgactgctctatgcatattggatttaggggaattttcattgttacataaatgtgtgaactagtttcaacagtgttctttcatatttactctgcaaatacaaaaaaccaaaacctgcagccagtggtcatttcaaaatctttttatgttcagatactgagccttcataagggttgactacctcagatttgctgcactcattgtggacttcatgtggatcacaacttctggataagaagattacaactattaagtgtcgatgtgaaccttgcaaccagctctactggattcttatcagaaatcctgcataaaaagtcagccatctgggttctgatctgctgtaaaagatgaagatttaagtgaccttaattaacctgtcctgtgccctacccttaaggaatactctctgtagtaggctgttgttatattagacttcctggaacacaccgctgaaaagaactgatgtgttcagatcatctgtgtagggctgtgatttgtaatttaaactaattgtattctgaggtaaccacaaaataaattcaaccaaactggggtccaccaagtgggggaaggggaagggagagaataatcttgggggtttttttttttggtaatttttttatttggatagtgcttttttgttttgtttttgttctgcattaaggccttttttgctttgacttgaaataagttctttgacagagcatattgcttggttaattaagtaacctaaagtatgcattaggattgtgaaatgtctcgtgagtatgccaatcctgagggtggaaccaaatagcctttgatgaaaagggcagtggattctggaggctctacttcaggtgctgctataatgcctcatctaatcaggactaaattgtgtaggaaactgcagtgggaagaatatgctttctgctcaggctaagagggtcactgatctgtccttagaaattcagagtaacatgagcaaaacctcacagatttaaattacaactcttgttataactttttaaaagattgtgaaaatatcaaaatataaatgaatcaagttttaatatactgtatgatgggtggatgaggctgtccattgtaccatttgtttgaattctcaggcatggtttggcagtgcaagaattctgtaacattaacaaattcaataaaaagtaaatatatggattttggactgtaaaaaaaaa

SEQ ID NO: 72363 - DNA, 576 bp, Homo sapiens
gtacccttccaacatctcatttctgatttaatcatcgacctgccactcgcatctgggcaatgttgacatttgaggtggcaggcaggatgcctgccttctaatatatttgggtgagtaactgagccagccaagggaaggttgaatgattaaatcagaaatgggattcttggtaaactgaagacttttatttgggaatgaaaaaccttaaaaaaatctcttcatcgttgaactgtgcattttccctgcattttttcccaacaaaattttgttgggggttatgttactgaagaatgaacagatgagtaagtggaggtgttatgtaaaggcatattgtactcgaaatctgaagacctgcagcagatttaaattacaactcttgttataactttttaaaagattgtgaaaatatcaaaatataaatgaatcaagttttaatatactgtatgatgggtggatgaggctgtccattgtaccatttgtttgaattctcaggcatggtttggcagtgcaagaattctgtaacattaacaaattcaataaaaagtaaatatatggattttggactgtaaaaaaaaa

SEQ ID NO: 72364 - DNA, 2567 bp, Homo sapiens
ggcacgagctggctcgcgcgtgccttttcccctcaggttgtggggagagcggaatcctgctccgccgtcgcagcagcagcggcagccccggcagcctcgggcgacagcggcggcgcgcgagcccccgggcggaccgtaccaccgctcgccagcacgcagggggagccgcccgtctcgccgcgcacgcctcggcgaccccgcggggctgaggcgtcgccgcgcccggcagcgtgagcgcagagccggcctcgaccccgagctcggagccccgcgggccgcgcccgccgccggccccacccatccgggtcgaggaggccgaggccatggctgagacggaggagcggagcctggacaacttctttgccaagagggacaagaagaagaagaaggagcggagcaaccgggcggcgagtgccgcgggcgcagcgggcagcgccggcggaagcagtggagccgcgggtgcggcgggcggcggggcgggcgcggggacccggccgggtgacggcgggaccgccagcgcgggggctgcgggcccaggggccgccaccaaggctgtgacgaaggacgaagatgaatggaaagaattggagcaaaaagaggttgattacagcggcctcagggttcaggcaatgcaaataagcagtgaaaaggaagaagacgataatgaaaagagacaagatccaggtgataactgggaagaaggtggaggtggtggtggaggtatggaaaaatcttcaggtccctggaataaaacagctccagtacaagcacctcctgctccagtaattgttacagaaaccccagaaccagcgatgactagtggtgtgtataggcctcctggggccaggttaaccacaacaaggaaaacaccacaaggaccaccagaaatctacagtgatacacagttcccatccctgcagtcaactgccaagcatgtagaaagccggaacaggtacttaaaatgaatgctacctggaattaaatgactacatatggcacatctacatcttactttagggacatgaattttttaaaataaataaaatgggaagaaatgtaaatgacatcagatggaaatgtgtttttggggtggcttttagaataaatcccagccttttcaccactttgagagcacagctggcttgaatttaaacctccacgtggacttgctcctctgctctgtcttaaaaaatgtgtaagggaccttgggagggcagtgattcaccacactcgagtttctttacctgatctaatcagatccactcccacaaaatcgatgtgaggagaaatcattgactaatgagtagaatttacttgaatgagaaaattgttacccttgtgcataaagagagagatgtattatctattacttgctaaaagtaagagtcttaggaggaatgtcattacacagcttttaacagttttcttcaagtttgtcctgaaatagggtcacagttaatactgttcagtagaagataggaccctagagcttcaatacagcgttctgtgttttctgtttgaattgaagccttaaaatggtttgataaggattttctatatgcctccactcctacccctccccaggattcttctaaggggtggcttttttttaaattcaaggacgaatattttcaaaaaccctagtgaagaagaaatatttactgattacatttcttttcccttagggataaagaaatggagaagagctttgaagtagtaagacacaaaaatagaggtagggatgaggtttcaaaaaaccaggcccttaaacttcagctagacaaccaatatgctgtgcttgaaaatcagaaaagcagccactcacaatacaattaaggaatgggctttgctaacccttctgaggtaactagactgcagctaaccaccaccaacagccattcatcatctgatctctgctggatctacagacaccgatgcagaccactcgatttcatgaccggccctattgcactatggaagttaaagtgtcacgactgctctatgcatattggatttaggggaattttcattgttacataaatgtgtgaactagtttcaacagtgttctttcatatttactctgcaaatacaaaaaaccaaaacctgcagccagtggtcatttcaaaatctttttatgttcagatactgagccttcataagggttgactacctcagatttgctgcactcattgtggacttcatgtggatcacaacttctggataagaagattacaactattaagtgtcgatgtgaaccttgcaaccagctctactggattcttatcagaaatcctgcataaaaagtcagccatctgggttctgatctgctgtaaaagatgaagatttaagtgaccttaattaacctgtcctgtgccctacccttaaggaatactagtatctgaacataaaaagattttgaaatgaccactgcctgcaggttttggttttttgtatttgcagagtaaatatgaaagaccactgttgaaactagttcacacatttatgtaacaatgaaaattcccctaaatccaatatgcatagagcagtcgtgacactttaacttccat

SEQ ID NO: 72365 - DNA, 2146 bp, Homo sapiens
ggcacgagctggctcgcgcgtgccttttcccctcaggttgtggggagagcggaatcctgctccgccgtcgcagcagcagcggcagccccggcagcctcgggcgacagcggcggcgcgcgagcccccgggcggaccgtaccaccgctcgccagcacgcagggggagccgcccgtctcgccgcgcacgcctcggcgaccccgcggggctgaggcgtcgccgcgcccggcagcgtgagcgcagagccggcctcgaccccgagctcggagccccgcgggccgcgcccgccgccggccccacccatccgggtcgaggaggccgaggccatggctgagacggaggagcggagcctggacaacttctttgccaagagggacaagaagaagaagaaggagcggagcaaccgggcggcgagtgccgcgggcgcagcgggcagcgccggcggaagcagtggagccgcgggtgcggcgggcggcggggcgggcgcggggacccggccgggtgacggcgggaccgccagcgcgggggctgcgggcccaggggccgccaccaaggctgtgacgaaggacgaagatgaatggaaagaattggagcaaaaagaggttgattacagcggcctcagggttcaggcaatgcaaataagcagtgaaaaggaagaagacgataatgaaaagagacaagatccaggtgataactgggaagaaggtggaggtggtggtggaggtatggaaaaatcttcaggtccctggaataaaacagctccagtacaagcacctcctgctccagtaattgttacagaaaccccagaaccagcgatgactagtggtgtgtataggcctcctggggccaggttaaccacaacaaggaaaacaccacaaggaccaccagaaatctacagtgatacacagttcccatccctgcagtcaactgccaagcatgtagaaagccggaacaggtacttaaaatgaatgctacctggaattaaatgactacatatggcacatctacatcttactttagggacatgaattttttaaaataaataaaatgggaagaaatgtaaatgacatcagatggaaatgtgtttttggggtggcttttagaataaatcccagccttttcaccactttgagagcacagctggcttgaatttaaacctccacgtggacttgctcctctgctctgtcttaaaaaatgtgtaagggaccttgggagggcagtgattcaccacactcgagtttctttacctgatctaatcagatccactcccacaaaatcgatgtgaggagaaatcattgactaatgagtagaatttacttgaatgagaaaattgttacccttgtgcataaagagagagatgtattatctattacttgctaaaagtaagagtcttaggaggaatgtcattacacagcttttaacagttttcttcaagtttgtcctgaaatagggtcacagttaatactgttcagtagaagataggaccctagagcttcaatacagcgttctgtgttttctgtttgaattgaagccttaaaatggtttgataaggattttctatatgcctccactcctacccctccccaggattcttctaaggggtggcttttttttaaattcaaggacgaatattttcaaaaaccctagtgaagaagaaatatttactgattacatttcttttcccttagggataaagaaatggagaagagctttgaagtagtaagacacaaaaatagaggtagggatgaggtttcaaaaaaccaggcccttaaacttcagctagacaaccaatatgctgtgcttgaaaatcagaaaagcagccactcacaatacaattaaggaatgggctttgctaacccttctgaggtaactagactgcagctaaccaccaccaacagccattcatcatctgatctctgctggatctacagacaccgatgcagaccactcgatttcatgaccggccctattgcactatggaagttaaagtgtcacgactgctctatgcatattggatttaggggaattttcattgttacataaatgtgtgaactagtttcaacagtgttctttcatatttactctgcaaatacaaaaaaccaaaacctgcaaaaaaaaacccccacaaatatcctccaacaaaaaaaaa

SEQ ID NO: 72366 - DNA, 1002 bp, Homo sapiens
ggcacgagctggctcgcgcgtgccttttcccctcaggttgtggggagagcggaatcctgctccgccgtcgcagcagcagcggcagccccggcagcctcgggcgacagcggcggcgcgcgagcccccgggcggaccgtaccaccgctcgccagcacgcagggggagccgcccgtctcgccgcgcacgcctcggcgaccccgcggggctgaggcgtcgccgcgcccggcagcgtgagcgcagagccggcctcgaccccgagctcggagccccgcgggccgcgcccgccgccggccccacccatccgggtcgaggaggccgaggccatggctgagacggaggagcggagcctggacaacttctttgccaagagggacaagaagaagaagaaggagcggagcaaccgggcggcgagtgccgcgggcgcagcgggcagcgccggcggaagcagtggagccgcgggtgcggcgggcggcggggcgggcgcggggacccggccgggtgacggcgggaccgccagcgcgggggctgcgggcccaggggccgccaccaaggctgtgacgaaggacgaagatgaatggaaagaattggagcaaaaagaggttgattacagcggcctcagggttcaggcaatgcaaataagcagtgaaaaggaagaagacgataatgaaaagagacaagatccaggtgataactgggaagaaggtggaggtggtggtggaggtatggaaaaatcttcaggtccctggaataaaacagctccagtacaagcacctcctgctccagtaattgttacagaaaccccagaaccagcgatgactagtggtgtgtataggcctcctggggccaggttaaccacaacaaggaaaacaccacaaggaccaccagaaatctacagtgatacacagttcccatccctgcagtcaactgccaagcatgtagaaagccggaacaggtacttaaaatgaatgctacctggctacctggtgttagtgtctacctggt

SEQ ID NO: 72367 - DNA, 890 bp, Homo sapiens
  misc_feature (813)..(813): n is a, c, g, or t
ggcacgagctggctcgcgcgtgccttttcccctcaggttgtggggagagcggaatcctgctccgccgtcgcagcagcagcggcagccccggcagcctcgggcgacagcggcggcgcgcgagcccccgggcggaccgtaccaccgctcgccagcacgcagggggagccgcccgtctcgccgcgcacgcctcggcgaccccgcggggctgaggcgtcgccgcgcccggcagcgtgagcgcagagccggcctcgaccccgagctcggagccccgcgggccgcgcccgccgccggccccacccatccgggtcgaggaggccgaggccatggctgagacggaggagcggagcctggacaacttctttgccaagagggacaagaagaagaagaaggagcggagcaaccgggcggcgagtgccgcgggcgcagcgggcagcgccggcggaagcagtggagccgcgggtgcggcgggcggcggggcgggcgcggggacccggccgggtgacggcgggaccgccagcgcgggggctgcgggcccaggggccgccaccaaggctgtgacgaaggacgaagatgaatggaaagaattggagcaaaaagaggttgattacagcggcctcagggttcaggcaatgcaaataagcagtgaaaaggaagaagacgataatgaaaagagacaagatccaggtgataactgggaagaaggtggaggtggtggtggaggtatggaaaaatcttcaggtccctggaataaaacagctccagtacaagcacctcctgctccagtaattgtacagaaccccagaccacgtgatngttgtgttataggctcttgggccagttaccacaccaagaacacccaaggccccagaatttcatgttcaattccctcc

SEQ ID NO: 72368 - DNA, 1336 bp, Homo sapiens
  misc_feature (30)..(30): n is a, c, g, or t
aaattacggctagtacgaggctggtttaantcggacgagggagctacccaggcttccctggagtcggccccacggatcatgcggctggtggccgaatgcagccgctccaggcccgggcaggcgagctgtggctgccgcatgggacagtggccactcctgtgttcatgccagtgggcacgcaggccaccatgaagggcatcacgaccgaacagctggacgctctgggttgccgcatctgcctgggcaatacctaccatctgggtctaaggccgggacccgagctgatccagaaagccaacggtctccacggcttcatgaattggcctcataatctgctaacggacagcggcggtttccagatggtgtcgctggtgtctctgtccgaggtgacggaggagggcgtccgcttccgctccccctacgacggcaatgagaccctgctgagcccggagaaatccgtgcagatccagaatgcgctgggctcggacatcatcatgcagctggacgacgtggttagcagtactgtgactgggccacgtgtggaggaggccatgtacaggtcaatccgctggctggaccggtgcattgcagcccatcagcggccggacaagcagaacctcttcgccattatccagggtgggctggacgcagatctccgggccacctgccttgaagagatgaccaagcgagacgtgcctggcttcgccatcgggggcctgagcgggggtgagagcaagtcgcagttctggcggatggtggcgctgagcacctctcggctgccgaaggacaagccccgatatctgatgggggttggctatgccactgatctggtagtctgcgtggctcttggatgtgacatgttcgactgcgtcttccccacacggacagcgcgctttggctctgccctggtgcccactgggaacctgcagttgaggaagaaggtgtttgagaaggacttcggccccatagacccggagtgcacctgccccacgtgccaaaagcacagccgcgccttcctgcacgcactgctgcacagtgacaacacggccgcgctgcaccacctcacggtccacaacatcgcctaccagctgcagctcatgagcgccgtccgcaccagcatcgtggagaagcgcttcccggacttcgtgcgggacttcatgggcgccatgtacggggatcccaccctctgtcccacctgggccactgacgctctggcctctgtgggaatcacactgggctgacctggcattgggagagggagggaggaaggaagggagggaggggctggaagatactgaaggattcctttttgaaaggttttttttattgtaactta

SEQ ID NO: 72369 - DNA, 1382 bp, Homo sapiens
  misc_feature (400)..(401): n is a, c, g, or t
  misc_feature (409)..(409): n is a, c, g, or t
  misc_feature (411)..(411): n is a, c, g, or t
  misc_feature (421)..(421): n is a, c, g, or t
  misc_feature (433)..(434): n is a, c, g, or t
  misc_feature (449)..(449): n is a, c, g, or t
  misc_feature (451)..(452): n is a, c, g, or t
  misc_feature (454)..(454): n is a, c, g, or t
  misc_feature (456)..(456): n is a, c, g, or t
  misc_feature (463)..(463): n is a, c, g, or t
  misc_feature (479)..(479): n is a, c, g, or t
  misc_feature (491)..(491): n is a, c, g, or t
  misc_feature (494)..(494): n is a, c, g, or t
  misc_feature (506)..(506): n is a, c, g, or t
  misc_feature (508)..(508): n is a, c, g, or t
  misc_feature (512)..(512): n is a, c, g, or t
  misc_feature (520)..(520): n is a, c, g, or t
  misc_feature (527)..(527): n is a, c, g, or t
  misc_feature (529)..(529): n is a, c, g, or t
  misc_feature (542)..(542): n is a, c, g, or t
  misc_feature (546)..(546): n is a, c, g, or t
  misc_feature (553)..(554): n is a, c, g, or t
  misc_feature (557)..(557): n is a, c, g, or t
  misc_feature (559)..(559): n is a, c, g, or t
  misc_feature (565)..(565): n is a, c, g, or t
  misc_feature (577)..(577): n is a, c, g, or t
  misc_feature (581)..(581): n is a, c, g, or t
  misc_feature (595)..(595): n is a, c, g, or t
  misc_feature (599)..(600): n is a, c, g, or t
  misc_feature (602)..(602): n is a, c, g, or t
  misc_feature (616)..(616): n is a, c, g, or t
  misc_feature (618)..(619): n is a, c, g, or t
  misc_feature (634)..(634): n is a, c, g, or t
  misc_feature (639)..(640): n is a, c, g, or t
  misc_feature (646)..(646): n is a, c, g, or t
  misc_feature (662)..(662): n is a, c, g, or t
  misc_feature (672)..(672): n is a, c, g, or t
  misc_feature (674)..(674): n is a, c, g, or t
  misc_feature (678)..(680): n is a, c, g, or t
  misc_feature (704)..(705): n is a, c, g, or t
  misc_feature (708)..(714): n is a, c, g, or t
  misc_feature (718)..(719): n is a, c, g, or t
  misc_feature (721)..(721): n is a, c, g, or t
ccttgacctcatgtaatttgcattgtagcaaggaaggcagacttgaggcgaggagcagatgacagagagcagtaacagctctgaagaaaagctagaggctgatgagatgaccatgacttggggtgaggggagagagcaagacaaggactgctctgtcgggaaggcctttgactgggggcctgaatgatggagagccagccacatgaaaaacttaaaaacagcactgcaaaaagagcactgcaggcaaggaattggtaaatgcaaaggccctggggcatgttgaagggtggaaggaaggccagtggagctggagccaagagatggaggggcagcttggtgggtgaagagccccagggacccgcagtgtcatcacctaggagcttcttagaaatgcagactnnggccgggngnggtggctcangcctgtaatccnngcactttgggaggcngnngngngcggatnacctgaggtcaggagntcaagaccagcntgnccaacatggcgnancccngtctctantaaaaananaaaaaattagccnggcntggtggnnggngnctgtantcccagctactngggnggctgaggcagganaatnncntgaacccgggaggngnnggttgcagtgagccnagatnntgccantgcactccagcctggntgacagagcnanactnnntctcaaaaaaaaaaaaaaaaaaannaannnnnnngatnnanagatgaccaagcgagacgtgcctggcttcgccatcgggggcctgagcgggggtgagagcaagtcgcagttctggcggatggtggcgctgagcacctctcggctgccgaaggacaagccccgatatctgatgggggttggctatgccactgatctggtagtctgcgtggctcttggatgtgacatgttcgactgcgtcttccccacacggacagcgcgctttggctctgccctggtgcccactgggaacctgcagttgaggaagaaggtgtttgagaaggacttcggccccatagacccggagtgcacctgccccacgtgccaaaagcacagccgcgccttcctgcacgcactgctgcacagtgacaacacggccgcgctgcaccacctcacggtccacaacatcgcctaccagctgcagctcatgagcgccgtccgcaccagcatcgtggagaagcgcttcccggacttcgtgcgggacttcatgggcgccatgtacggggatcccaccctctgtcccacctgggccactgacgctctggcctctgtgggaatcacactgggctgacctggcattgggagagggagggaggaaggaagggagggaggggctggaagatactgaaggattcctttttgaaaggttttttttattgtaactta

SEQ ID NO: 72370 - DNA, 389 bp, Homo sapiens
gactctacaggatcttctgtgctttgggacggcgctgcgtttggttacggcgttgctgggggaaaacagaatgggtacttgagtctgaagctttagtggccaggccacagtggcggggagggggtgtcaggccctggacccatgcccaggacagaaaagcaggagcagaacactatcccaagaaagaccctacggaggacctctggaggcgcagggtgcagcaggaagttacaccccgccgtcccaaagcacagcctgcccccacgtgccaaaagcacagccgcgccttcctgcacgcactgctgcacagtgacaacacggccgcgctgcaccacctcacggtccacaacatcgcctaccaggtgagccagtgcccggggcaaggtggg

SEQ ID NO: 72371 - DNA, 1327 bp, Homo sapiens
cacgtggttccgacagtcaagatggcgggagcagctacccaggcttccctggagtcggccccacggatcatgcggctggtggccgaatgcagccgctccaggcccgggcaggcgagctgtggctgccgcatgggacagtggccactcctgtgttcatgccagtgggcacgcaggccaccatgaagggcatcacgaccgaacagctggacgctctgggttgccgcatctgcctgggcaatacctaccatctgggtctaaggccgggacccgagctgatccagaaagccaacggtctccacggcttcatgaattggcctcataatctgctaacggacagcggcggtttccagatggtgtcgctggtgtctctgtccgaggtgacggaggagggcgtccgcttccgctccccctacgacggcaatgagaccctgctgagcccggagaaatccgtgcagatccagaatgcgctgggctcggacatcatcatgcagctggacgacgtggttagcagtactgtgactgggccacgtgtggaggaggccatgtacaggtcaatccgctggctggaccggtgcattgcagcccatcagcggccggacaagcagaacctcttcgccattatccagggtgggctggacgcagatctccgggccacctgccttgaagagatgaccaagcgagacgtgcctggcttcgccatcgggggcctgagcgggggtgagagcaagtcgcagttctggcggatggtggcgctgagcacctctcggctgccgaaggacaagccccgatatctgatgggggttggctatgccactgatctggtagtctgcgtggctcttggatgtgacatgttcgactgcgtcttccccacacggacagcgcgctttggctctgccctggtgcccactgggaacctgcagttgaggaagaaggtgtttgagaaggacttcggccccatagacccggagtgcacctgccccacgtgccaaaagcacagccgcgccttcctgcacgcactgctgcacagtgacaacacggccgcgctgcaccacctcacggtccacaacatcgcctaccagctgcagctcatgagcgccgtccgcaccagcatcgtggagaagcgcttcccggacttcgtgcgggacttcatgggcgccatgtacggggatcccaccctctgtcccacctgggccactgacgctctggcctctgtgggaatcacactgggctgacctggcattgggagagggagggaggaaggaagggagggaggggctggaagatactgaaggattcctttttgaaaggttttttttattgtaactta

SEQ ID NO: 72372 - DNA, 1325 bp, Homo sapiens
caggctgtactggtctggatgtttgggatgagctacccaggcttccctggagtcggccccacggatcatgcggctggtggccgaatgcagccgctccaggcccgggcaggcgagctgtggctgccgcatgggacagtggccactcctgtgttcatgccagtgggcacgcaggccaccatgaagggcatcacgaccgaacagctggacgctctgggttgccgcatctgcctgggcaatacctaccatctgggtctaaggccgggacccgagctgatccagaaagccaacggtctccacggcttcatgaattggcctcataatctgctaacggacagcggcggtttccagatggtgtcgctggtgtctctgtccgaggtgacggaggagggcgtccgcttccgctccccctacgacggcaatgagaccctgctgagcccggagaaatccgtgcagatccagaatgcgctgggctcggacatcatcatgcagctggacgacgtggttagcagtactgtgactgggccacgtgtggaggaggccatgtacaggtcaatccgctggctggaccggtgcattgcagcccatcagcggccggacaagcagaacctcttcgccattatccagggtgggctggacgcagatctccgggccacctgccttgaagagatgaccaagcgagacgtgcctggcttcgccatcgggggcctgagcgggggtgagagcaagtcgcagttctggcggatggtggcgctgagcacctctcggctgccgaaggacaagccccgatatctgatgggggttggctatgccactgatctggtagtctgcgtggctcttggatgtgacatgttcgactgcgtcttccccacacggacagcgcgctttggctctgccctggtgcccactgggaacctgcagttgaggaagaaggtgtttgagaaggacttcggccccatagacccggagtgcacctgccccacgtgccaaaagcacagccgcgccttcctgcacgcactgctgcacagtgacaacacggccgcgctgcaccacctcacggtccacaacatcgcctaccagctgcagctcatgagcgccgtccgcaccagcatcgtggagaagcgcttcccggacttcgtgcgggacttcatgggcgccatgtacggggatcccaccctctgtcccacctgggccactgacgctctggcctctgtgggaatcacactgggctgacctggcattgggagagggagggaggaaggaagggagggaggggctggaagatactgaaggattcctttttgaaaggttttttttattgtaactta

SEQ ID NO: 72373 - DNA, 1580 bp, Homo sapiens
cacgtggttccgacagtcaagatggcgggagcagctacccaggcttccctggagtcggccccacggatcatgcggctggtggccgaatgcagccgctccaggcccgggcaggcgagctgtggctgccgcatgggacagtggccactcctgtgttcatgccagtgggcacgcaggccaccatgaagggcatcacgaccgaacagctggacgctctgggttgccgcatctgcctgggcaatacctaccatctgggtctaaggccgggacccgagctgatccagaaagccaacggtctccacggcttcatgaattggcctcataatctgctaacggacagcggcggtttccagatggtgtcgctggtgtctctgtccgaggtgacggaggagggcgtccgcttccgctccccctacgacggcaatgagaccctgctgagcccggagaaatccgtgcagatccagaatgcgctgggctcggacatcatcatgcagctggacgacgtggttagcagtactgtgactgggccacgtgtggaggaggccatgtacaggtcaatccgctggctggaccggtgcattgcagcccatcagcggccggacaagcagaacctcttcgccattatccagggtgggctggacgcagatctccgggccacctgccttgaagagatgaccaagcgagacgtgcctggcttcgccatcgggggcctgagcgggggtgagagcaagtcgcagttctggcggatggtggcgctgagcacctctcggctgccgaaggacaagccccgatatctgatgggggttgggtatgttgtggatagggaagccagagccctacctgtgggaagtggattcctggggaccccctaccctgcttggggaggtggcatttgggggaaacggacacaggtctgatctgaggagactaggaagacatggctgtcccttgggggccattctgagggaatatggcccagtctggggcagtgtgagggttgggaggggccctgggaagcccctgaggttctctgccccctcccgtcatggctgcaaccccagctatgccactgatctggtagtctgcgtggctcttggatgtgacatgttcgactgcgtcttccccacacggacagcgcgctttggctctgccctggtgcccactgggaacctgcagttgaggaagaaggtgtttgagaaggacttcggccccatagacccggagtgcacctgccccacgtgccaaaagcacagccgcgccttcctgcacgcactgctgcacagtgacaacacggccgcgctgcaccacctcacggtccacaacatcgcctaccagctgcagctcatgagcgccgtccgcaccagcatcgtggagaagcgcttcccggacttcgtgcgggacttcatgggcgccatgtacggggatcccaccctctgtcccacctgggccactgacgctctggcctctgtgggaatcacactgggctgacctggcattgggagagggagggaggaaggaagggagggaggggctggaagatactgaaggattcctttttgaaaggttttttttattgtaactta

SEQ ID NO: 72374 - DNA, 1712 bp, Homo sapiens
cacgtggttccgacagtcaagatggcgggagcagctacccaggcttccctggagtcggccccacggatcatgcggctggtggccgaatgcagccgctccaggcccgggcaggcgagctgtggctgccgcatgggacagtggccactcctgtgttcatgccagtgggcacgcaggccaccatgaagggcatcacgaccgaacagctggacgctctgggttgccgcatctgcctgggcaatacctaccatctgggtctaaggccgggacccgagctgatccagaaagccaacggtctccacggcttcatgaattggcctcataatctgctaacggacagcggcggtttccagatggtgtcgctggtgtctctgtccgaggtgacggaggagggcgtccgcttccgctccccctacgacggcaatgagaccctgctgagcccggagaaatccgtgcagatccagaatgcgctgggctcggacatcatcatgcagctggacgacgtggttagcagtactgtgactgggccacgtgtggaggaggccatgtacaggtcaatccgctggctggaccggtgcattgcagcccatcagcggccggacaagcagaacctcttcgccattatccagggtgggctggacgcagatctccgggccacctgccttgaagagatgaccaagcgagacgtgcctggcttcgccatcgggggcctgagcgggggtgagagcaagtcgcagttctggcggatggtggcgctgagcacctctcggctgccgaaggacaagccccgatatctgatgggggttgggtatgttgtggatagggaagccagagccctacctgtgggaagtggattcctggggaccccctaccctgcttggggaggtggcatttgggggaaacggacacaggtctgatctgaggagactaggaagacatggctgtcccttgggggccattctgagggaatatggcccagtctggggcagtgtgagggttgggaggggccctgggaagcccctgaggttctctgccccctcccgtcatggctgcaaccccagctatgccactgatctggtagtctgcgtggctcttggatgtgacatgttcgactgcgtcttccccacacggacagcggcggtgaggctctggcagaaggaggtcagggcgggagacgggtgggggactagggaggcaaggttaggggtggggggtggggagaatgaagccctgggtgacgcccctttccctgcccttcctctcccacagcgctttggctctgccctggtgcccactgggaacctgcagttgaggaagaaggtgtttgagaaggacttcggccccatagacccggagtgcacctgccccacgtgccaaaagcacagccgcgccttcctgcacgcactgctgcacagtgacaacacggccgcgctgcaccacctcacggtccacaacatcgcctaccagctgcagctcatgagcgccgtccgcaccagcatcgtggagaagcgcttcccggacttcgtgcgggacttcatgggcgccatgtacggggatcccaccctctgtcccacctgggccactgacgctctggcctctgtgggaatcacactgggctgacctggcattgggagagggagggaggaaggaagggagggaggggctggaagatactgaaggattcctttttgaaaggttttttttattgtaactta

SEQ ID NO: 72375 - DNA, 1251 bp, Homo sapiens
cacgtggttccgacagtcaagatggcgggagcagctacccaggcttccctggagtcggccccacggatcatgcggctggtggccgaatgcagccgctccaggcccgggcaggcgagctgtggctgccgcatgggacagtggccactcctgtgttcatgccagtgggcacgcaggccaccatgaagggcatcacgaccgaacagctggacgctctgggttgccgcatctgcctgggcaatacctaccatctgggtctaaggccgggacccgagctgatccagaaagccaacggtctccacggcttcatgaattggcctcataatctgctaacggacagcggcggtttccagatggtgtcgctggtgtctctgtccgaggtgacggaggagggcgtccgcttccgctccccctacgacggcaatgagaccctgctgagcccggagaaatccgtgcagatccagaatgcgctgggctcggacatcatcatgcagctggacgacgtggttagcagtactgtgactgggccacgtgtggaggaggccatgtacaggtcaatccgctggctggaccggtgcattgcagcccatcagcggccggacaagcagaacctcttcgccattatccagggtgggctggacgcagatctccgggccacctgccttgaagagatgaccaagcgagacgtgcctggcttcgccatcgggggcctgagcgggggtgagagcaagtcgcagttctggcggatggtggcgctgagcacctctcggctgccgaaggacaagccccgatatctgatgggggttggcgctttggctctgccctggtgcccactgggaacctgcagttgaggaagaaggtgtttgagaaggacttcggccccatagacccggagtgcacctgccccacgtgccaaaagcacagccgcgccttcctgcacgcactgctgcacagtgacaacacggccgcgctgcaccacctcacggtccacaacatcgcctaccagctgcagctcatgagcgccgtccgcaccagcatcgtggagaagcgcttcccggacttcgtgcgggacttcatgggcgccatgtacggggatcccaccctctgtcccacctgggccactgacgctctggcctctgtgggaatcacactgggctgacctggcattgggagagggagggaggaaggaagggagggaggggctggaagatactgaaggattcctttttgaaaggttttttttattgtaactta

SEQ ID NO: 72376 - DNA, 1183 bp, Homo sapiens
cacgtggttccgacagtcaagatggcgggagcagctacccaggcttccctggagtcggccccacggatcatgcggctggtggccgaatgcagccgctccaggcccgggcaggcgagctgtggctgccgcatgggacagtggccactcctgtgttcatgccagtgggcacgcaggccaccatgaagggcatcacgaccgaacagctggacgctctgggttgccgcatctgcctgggcaatacctaccatctgggtctaaggccgggacccgagctgatccagaaagccaacggtctccacggcttcatgaattggcctcataatctgctaacggacagcggcggtttccagatggtgtcgctggtgtctctgtccgaggtgacggaggagggcgtccgcttccgctccccctacgacggcaatgagaccctgctgagcccggagaaatccgtgcagatccagaatgcgctgggctcggacatcatcatgcagctggacgacgtggttagcagtactgtgactgggccacgtgtggaggaggccatgtacaggtcaatccgctggctggaccggtgcattgcagcccatcagcggccggacaagcagaacctcttcgccattatccagggtgggctggacgcagatctccgggccacctgccttgaagagatgaccaagcgagacgtgcctggcttcgccatcgggggcctgagcgggggtgagagcaagtcgcagttctggcggatggtggcgctgagcacctctcggctgccgaaggacaagccccgatatctgatgggggttggctatgccactgatctggtagtctgcgtggctcttggatgtgacatgttcgactgcgtcttccccacacggacagcgagtgacaacacggccgcgctgcaccacctcacggtccacaacatcgcctaccagctgcagctcatgagcgccgtccgcaccagcatcgtggagaagcgcttcccggacttcgtgcgggacttcatgggcgccatgtacggggatcccaccctctgtcccacctgggccactgacgctctggcctctgtgggaatcacactgggctgacctggcattgggagagggagggaggaaggaagggagggaggggctggaagatactgaaggattcctttttgaaaggttttttttattgtaactta

SEQ ID NO: 72377 - DNA, 1411 bp, Homo sapiens
cacgtggttccgacagtcaagatggcgggagcagctacccaggcttccctggagtcggccccacggatcatgcggctggtggccgaatgcagccgctccaggcccgggcaggcgagctgtggctgccgcatgggacagtggccactcctgtgttcatgccagtgggcacgcaggccaccatgaagggcatcacgaccgaacagctggacgctctgggttgccgcatctgcctgggcaatacctaccatctgggtctaaggccgggacccgagctgatccagaaagccaacggtctccacggcttcatgaattggcctcataatctgctaacggacagcggcggtttccagatggtgtcgctggtgtctctgtccgaggtgacggaggagggcgtccgcttccgctccccctacgacggcaatgagaccctgctgagcccggagaaatccgtgcagatccagaatgcgctgggctcggacatcatcatgcagctggacgacgtggttagcagtactgtgactgggccacgtgtggaggaggccatgtacaggtcaatccgctggctggaccggtgcattgcagcccatcagcggccggacaagcagaacctcttcgccattatccagggtgggctggacgcagatctccgggccacctgccttgaaggtcctcagagcgaaagtctaaaatccagaacattggccgggtaccatagctcacacctgaatcccagcactttaggaggccaagagatgaccaagcgagacgtgcctggcttcgccatcgggggcctgagcgggggtgagagcaagtcgcagttctggcggatggtggcgctgagcacctctcggctgccgaaggacaagccccgatatctgatgggggttggctatgccactgatctggtagtctgcgtggctcttggatgtgacatgttcgactgcgtcttccccacacggacagcgcgctttggctctgccctggtgcccactgggaacctgcagttgaggaagaaggtgtttgagaaggacttcggccccatagacccggagtgcacctgccccacgtgccaaaagcacagccgcgccttcctgcacgcactgctgcacagtgacaacacggccgcgctgcaccacctcacggtccacaacatcgcctaccagctgcagctcatgagcgccgtccgcaccagcatcgtggagaagcgcttcccggacttcgtgcgggacttcatgggcgccatgtacggggatcccaccctctgtcccacctgggccactgacgctctggcctctgtgggaatcacactgggctgacctggcattgggagagggagggaggaaggaagggagggaggggctggaagatactgaaggattcctttttgaaaggttttttttattgtaactta

SEQ ID NO: 72378 - DNA, 1282 bp, Homo sapiens
cacgtggttccgacagtcaagatggcgggagcagctacccaggcttccctggagtcggccccacggatcatgcggctggtggccgaatgcagccgctccaggcccgggcaggcgagctgtggctgccgcatgggacagtggccactcctgtgttcatgccagtgggcacgcaggccaccatgaagggcatcacgaccgaacagctggacgctctgggttgccgcatctgcctgggcaatacctaccatctgggtctaaggccgggacccgagctgatccagaaagccaacggtctccacggcttcatgaattggcctcataatctgctaacggtgacggaggagggcgtccgcttccgctccccctacgacggcaatgagaccctgctgagcccggagaaatccgtgcagatccagaatgcgctgggctcggacatcatcatgcagctggacgacgtggttagcagtactgtgactgggccacgtgtggaggaggccatgtacaggtcaatccgctggctggaccggtgcattgcagcccatcagcggccggacaagcagaacctcttcgccattatccagggtgggctggacgcagatctccgggccacctgccttgaagagatgaccaagcgagacgtgcctggcttcgccatcgggggcctgagcgggggtgagagcaagtcgcagttctggcggatggtggcgctgagcacctctcggctgccgaaggacaagccccgatatctgatgggggttggctatgccactgatctggtagtctgcgtggctcttggatgtgacatgttcgactgcgtcttccccacacggacagcgcgctttggctctgccctggtgcccactgggaacctgcagttgaggaagaaggtgtttgagaaggacttcggccccatagacccggagtgcacctgccccacgtgccaaaagcacagccgcgccttcctgcacgcactgctgcacagtgacaacacggccgcgctgcaccacctcacggtccacaacatcgcctaccagctgcagctcatgagcgccgtccgcaccagcatcgtggagaagcgcttcccggacttcgtgcgggacttcatgggcgccatgtacggggatcccaccctctgtcccacctgggccactgacgctctggcctctgtgggaatcacactgggctgacctggcattgggagagggagggaggaaggaagggagggaggggctggaagatactgaaggattcctttttgaaaggttttttttattgtaactta

SEQ ID NO: 72379 - DNA, 1573 bp, Homo sapiens
cacgtggttccgacagtcaagatggcgggagcagctacccaggcttccctggagtcggccccacggatcatgcggctggtggccgaatgcagccgctccaggcccgggcaggcgagctgtggctgccgcatgggacagtggccactcctgtgttcatgccagtgggcacgcaggccaccatgaagggcatcacgaccgaacagctggacgctctgggttgccgcatctgcctgggcaatacctaccatctgggtctaaggccggtgggtgggctctgcccgcgcggggaggcggcgaggcggcgaggcgtggggagccatggagcgtcctccaggcccggacactcctcccaaagtcaatcgaccagctgtattgagcgcccccaatgaccaggccttgtactgggcgtgaaagagcagcagggactaaagctggccagatctgtctcccaagaagggcccccagggacgcggtcacccctaacctgacactttcttccatcaacccagggacccgagctgatccagaaagccaacggtctccacggcttcatgaattggcctcataatctgctaacggacagcggcggtttccagatggtgtcgctggtgtctctgtccgaggtgacggaggagggcgtccgcttccgctccccctacgacggcaatgagaccctgctgagcccggagaaatccgtgcagatccagaatgcgctgggctcggacatcatcatgcagctggacgacgtggttagcagtactgtgactgggccacgtgtggaggaggccatgtacaggtcaatccgctggctggaccggtgcattgcagcccatcagcggccggacaagcagaacctcttcgccattatccagggtgggctggacgcagatctccgggccacctgccttgaagagatgaccaagcgagacgtgcctggcttcgccatcgggggcctgagcgggggtgagagcaagtcgcagttctggcggatggtggcgctgagcacctctcggctgccgaaggacaagccccgatatctgatgggggttggctatgccactgatctggtagtctgcgtggctcttggatgtgacatgttcgactgcgtcttccccacacggacagcgcgctttggctctgccctggtgcccactgggaacctgcagttgaggaagaaggtgtttgagaaggacttcggccccatagacccggagtgcacctgccccacgtgccaaaagcacagccgcgccttcctgcacgcactgctgcacagtgacaacacggccgcgctgcaccacctcacggtccacaacatcgcctaccagctgcagctcatgagcgccgtccgcaccagcatcgtggagaagcgcttcccggacttcgtgcgggacttcatgggcgccatgtacggggatcccaccctctgtcccacctgggccactgacgctctggcctctgtgggaatcacactgggctgacctggcattgggagagggagggaggaaggaagggagggaggggctggaagatactgaaggattcctttttgaaaggttttttttattgtaactta

SEQ ID NO: 72380 - DNA, 1305 bp, Homo sapiens
ccaggctacctcgtgtgattcggcgccatgcattcatgcggttggtgatccgcattgcaaccgggtccgagtgtgccgggcaggtgctgaaactgtggctgtacgattgctacattgttcgactcctgtgttcatgccagtgggcacgcaggccaccatgaagggcatcacgaccgaacagctggacgctctgggttgccgcatctgcctgggcaatacctaccatctgggtctaaggccgggacccgagctgatccagaaagccaacggtctccacggcttcatgaattggcctcataatctgctaacggacagcggcggtttccagatggtgtcgctggtgtctctgtccgaggtgacggaggagggcgtccgcttccgctccccctacgacggcaatgagaccctgctgagcccggagaaatccgtgcagatccagaatgcgctgggctcggacatcatcatgcagctggacgacgtggttagcagtactgtgactgggccacgtgtggaggaggccatgtacaggtcaatccgctggctggaccggtgcattgcagcccatcagcggccggacaagcagaacctcttcgccattatccagggtgggctggacgcagatctccgggccacctgccttgaagagatgaccaagcgagacgtgcctggcttcgccatcgggggcctgagcgggggtgagagcaagtcgcagttctggcggatggtggcgctgagcacctctcggctgccgaaggacaagccccgatatctgatgggggttggctatgccactgatctggtagtctgcgtggctcttggatgtgacatgttcgactgcgtcttccccacacggacagcgcgctttggctctgccctggtgcccactgggaacctgcagttgaggaagaaggtgtttgagaaggacttcggccccatagacccggagtgcacctgccccacgtgccaaaagcacagccgcgccttcctgcacgcactgctgcacagtgacaacacggccgcgctgcaccacctcacggtccacaacatcgcctaccagctgcagctcatgagcgccgtccgcaccagcatcgtggagaagcgcttcccggacttcgtgcgggacttcatgggcgccatgtacggggatcccaccctctgtcccacctgggccactgacgctctggcctctgtgggaatcacactgggctgacctggcattgggagagggagggaggaaggaagggagggaggggctggaagatactgaaggattcctttttgaaaggttttttttattgtaactta

SEQ ID NO: 72381 - DNA, 991 bp, Homo sapiens
aagttgaaatcatcgcagaaggataaagttcgtcagtttatgatcttcacacaatctagtgaaaaaacagcagacagcggcggtttccagatggtgtcgctggtgtctctgtccgaggtgacggaggagggcgtccgcttccgctccccctacgacggcaatgagaccctgctgagcccggagaaatccgtgcagatccagaatgcgctgggctcggacatcatcatgcagctggacgacgtggttagcagtactgtgactgggccacgtgtggaggaggccatgtacaggtcaatccgctggctggaccggtgcattgcagcccatcagcggccggacaagcagaacctcttcgccattatccagggtgggctggacgcagatctccgggccacctgccttgaagagatgaccaagcgagacgtgcctggcttcgccatcgggggcctgagcgggggtgagagcaagtcgcagttctggcggatggtggcgctgagcacctctcggctgccgaaggacaagccccgatatctgatgggggttggcgctttggctctgccctggtgcccactgggaacctgcagttgaggaagaaggtgtttgagaaggacttcggccccatagacccggagtgcacctgccccacgtgccaaaagcacagccgcgccttcctgcacgcactgctgcacagtgacaacacggccgcgctgcaccacctcacggtccacaacatcgcctaccagctgcagctcatgagcgccgtccgcaccagcatcgtggagaagcgcttcccggacttcgtgcgggacttcatgggcgccatgtacggggatcccaccctctgtcccacctgggccactgacgctctggcctctgtgggaatcacactgggctgacctggcattgggagagggagggaggaaggaagggagggaggggctggaagatactgaaggattcctttttgaaaggttttttttattgtaactta

SEQ ID NO: 72382 - DNA, 407 bp, Homo sapiens
cacgtggttccgacagtcaagatggcgggagcagctacccaggcttccctggagtcggccccacggatcatgcggctggtggccgaatgcagccgctccaggcccgggcaggcgagctgtggctgccgcatgggacagtggccactcctgtgttcatgccagtgggcacgcaggccaccatgaagggcatcacgaccgaacagctggacgctctgggttgccgcatctgcctgggcaatacctaccatctgggtctaaggccgggacccgagctgatccagaaagccaacggtctccacggcttcatgaattggcctcataatctgctaacggtgagctgaggagagagccgacgttctagggcccttctctggagtgaagggtccccatctccaccccctgacagc

SEQ ID NO: 72383 - DNA, 371 bp, Homo sapiens
ctggccgtgctgagctgtcccctgccgctctacaggcacagccgcgccttcctgcacgcactgctgcacagtgacaacacggccgcgctgcaccacctcacggtccacaacatcgcctaccagctgcagctcatgagcgccgtccgcaccagcatcgtggagaagcgcttcccggacttcgtgcgggacttcatgggcgccatgtacggggatcccaccctctgtcccacctgggccactgacgctctggcctctgtgggaatcacactgggctgacctggcattgggagagggagggaggaaggaagggagggaggggctggaagatactgaaggattcctttttgaaaggttttttttattgtaactta

SEQ ID NO: 72384 - DNA, 349 bp, Homo sapiens
gcacatctgttcccaaaaggctttaacattctatagtctctaggaaattttatttttttcttcaaaatttcttgaataaattttatagaaatatgtatgcttttttatgcaccaaattaaaatgaagatttcgtaagatctaatttagcaaactttttaatgtctttcccttatttcttcaatattaagtgctgcaaaatgagcaagacagtttctcccttggaggagtgttcagctttaatagaagatagcacagggtcatatgtaactataatataaaactggataaggcccataaaagaattgcagataaactatgggagctcaaaaaagattatacccagtttag

SEQ ID NO: 72385 - DNA, 285 bp, Homo sapiens
ttctattccactttctgttttattttcatagatataaaaatatagtaattatgcatgtcacataaataagtggatgggaatggaagtcattttgttatattgtacaacaatgctcctatttgaactccttccgatttgccaaaatttacaggctgataatataccaaaaatatttcaatgacttatcagttggcaattcaatcacgtcttcatttaattttgttgtaaacaaagaattgaaaaccacctgatttgcagagagatttgttacccagtcatttccag

SEQ ID NO: 72386 - DNA, 275 bp, Homo sapiens
ctacctcaccccctccatccctctgcttctcagtgtaggatatagactcaggggtgggagatcaggggtgaaagccactatgaatactgagtcggctaaacagagttgctaaattggcctgggaatctgctgagggtccatcctcttgattctatgggaaaatgcagtttaaagatctaaagagctgggaggtccttacaagaggcttccttctgtgggcagcattggggtggggtggtgaggttaccccgcgggtgtctccctgccccagtgga

SEQ ID NO: 72387 - DNA, 2812 bp, Homo sapiens
  misc_feature (13)..(13): n is a, c, g, or t
  misc_feature (25)..(25): n is a, c, g, or t
gtttgcgcggggnaccacccgctcncccccccaaccctcctcagcagaagcagccggcggcgggggcaggagtcagcccgcttccgaccgtaccccgcccgcctcccggggctcctgttctttggccccgggaccctaaccttctcccggggcggttccctccgtctgggcgtccgagcgctgcccacatctttcattcctccctgcacctccttcccttcacttttgccccggctctctttctcctctctgtcctgctgtcgcctcctctcctcactccagcctccttccctggcttattctgcccaggaaagtttggaacccccgccccccctccccaatcaggtcaacctgactaggagtagggggagatgtaggaaggcctgagagttcggggggggggaagctggaagctggtttcccagaaaatttccccccatcttctccatttagggtggtgggaattttttttaatcctgtttttgaggaggtggtaggtgtttagaaaaggatgtgggaatggaaggggtagatgagtcaaccctctttcaagattccaagggtggtgtgttacctgatccttttcgtgtgtggagttcagggggtcgggaggtttggcctttattcccacattcaaagttggaacctcccccaaattaagaatggagttttagtacccacttgtggcaggaatcctggggggaaggggtccttttttcctttttcttttcttttttcccttttttttccttttggcaacccacacccttccacacacgctcaccccaaaattaaacaccaagatcctctaacttgtttggattgactgatgaagacataaagctctatgttttttgaggtggagtgagtggtttttcttcatttttaaatggccaaatgacagcttgacccagtttgctttccaatcaaagggcatttattttgaatgtctctttgtggcgcaagagccaacgcaaaaatgatggcggcttacaatggcggtacatctgcagcagcagcaggtcaccaccaccaccatcaccaccaccttccacacctccctcctcctcacctgcaccaccaccaccaccctcaacaccatcttcatccggggtcggctgccgctgtacaccctgtacagcagcacacctcttcggcagctgcggcagccgcagcagcggctgcagctgcagccatgttaaaccctgggcaacaacagccatatttcccatcaccggcaccggggcaggctcctggaccagctgcagcagccccagctcaggtacaggctgccgcagctgctacagttaaggcgcaccatcatcagcactcgcatcatccacagcagcagctggatattgagccggatagacctattggatatggagcctttggtgttgtctggtcagtaacagatccaagagatggaaagagagtagcgctcaaaaagatgcccaacgtcttccagaatctggtctcttgcaaaagggtcttccgggaattgaagatgttgtgtttttttaagcatgataatgtactctctgcccttgacatactccaacctccacacattgactattttgaagaaatatatgttgtcacagaattgatgcagagtgacctacataaaattatcgtctctcctcaaccactcagctcagatcatgtcaaagtttttctttatcagattttgcgaggtttgaaatatctccattcagctggcattttacatcgagacattaagccagggaatctccttgtgaacagcaactgtgttctaaagatttgtgattttggattggccagagtggaagaattagatgaatcccgtcatatgactcaggaagttgttactcagtattatcgggctccagaaatcctgatgggcagccgtcattacagcaatgctattgacatctggtctgtgggatgtatctttgcagaactactaggacgaagaatattgtttcaggcacagagtcccattcagcagttggatttgatcacggatctgttgggcacaccatcactggaagcaatgaggacagcttgtgaaggcgctaaggcacatatactcaggggtcctcataaacagccatctcttcctgtactctataccctgtctagccaggctacacatgaagctgttcatctcctttgcaggatgttggtctttgatccatccaaaagaatatccgctaaggatgccttagcccacccctacctagatgaagggcgactacgatatcacacatgtatgtgtaaatgttgcttttccacctccactggaagagtttataccagtgactttgagcctgtcaccaatcccaaatttgatgacactttcgagaagaacctcagttctgtccgacaggttaaagaaattattcatcagttcattttggaacagcagaaaggaaacagagtgcctctctgcatcaaccctcagtctgctgcttttaagagctttattagttccactgttgctcagccatctgagatgcccccatctcctctggtgtgggagtgatggtggaagataatgtactactgaagatgtaatgtagctttccactggagtctgggatttgcaattctggaggctcctgagaatcaacccaactgaagcatttcaattcacttgaatgagaaacgtgtttagtatcaaaagagcccaagaagacactggtgtgaaaggtacaatctcagaggttggtcaattaccgtggcacactttctggtcactttgtacaatgtagatttgaagtacagtggtgaaaacattaaatgtgacatttgaaaaaaaaaatca

SEQ ID NO: 72388 - DNA, 2417 bp, Homo sapiens
  misc_feature (13)..(13): n is a, c, g, or t
  misc_feature (25)..(25): n is a, c, g, or t
gtttgcgcggggnaccacccgctcncccccccaaccctcctcagcagaagcagccggcggcgggggcaggagtcagcccgcttccgaccgtaccccgcccgcctcccggggctcctgttctttggccccgggaccctaaccttctcccggggcggttccctccgtctgggcgtccgagcgctgcccacatctttcattcctccctgcacctccttcccttcacttttgccccggctctctttctcctctctgtcctgctgtcgcctcctctcctcactccagcctccttccctggcttattctgcccaggaaagtttggaacccccgccccccctccccaatcaggtcaacctgactaggagtagggggagatgtaggaaggcctgagagttcggggggggggaagctggaagctggtttcccagaaaatttccccccatcttctccatttagggtggtgggaattttttttaatcctgtttttgaggaggtggtaggtgtttagaaaaggatgtgggaatggaaggggtagatgagtcaaccctctttcaagattccaagggtggtgtgttacctgatccttttcgtgtgtggagttcagggggtcgggaggtttggcctttattcccacattcaaagttggaacctcccccaaattaagaatggagttttagtacccacttgtggcaggaatcctggggggaaggggtccttttttcctttttcttttcttttttcccttttttttccttttggcaacccacacccttccacacacgctcaccccaaaattaaacaccaagatcctctaacttgtttggattgactgatgaagacataaagctctatgttttttgaggtggagtgagtggtttttcttcatttttaaatggccaaatgacagcttgacccagtttgctttccaatcaaagggcatttattttgaatgtctctttgtggcgcaagagccaacgcaaaaatgatggcggcttacaatggcggtacatctgcagcagcagcaggtcaccaccaccaccatcaccaccaccttccacacctccctcctcctcacctgcaccaccaccaccaccctcaacaccatcttcatccggggtcggctgccgctgtacaccctgtacagcagcacacctcttcggcagctgcggcagccgcagcagcggctgcagctgcagccatgttaaaccctgggcaacaacagccatatttcccatcaccggcaccggggcaggctcctggaccagctgcagcagccccagctcaggtacaggctgccgcagctgctacagttaaggcgcaccatcatcagcactcgcatcatccacagcagcagctggatattgagccggatagacctattggatatggagcctttggtgttgtctggttgagaatctgtagtactgagaagtttctccactatcagccgagattaacagccacagctggattctttgggggctctgctttgtgaaaagagctttgaagaagcagagcctgcaccataaaaaggaaacggttgctcttctagacataacaaagcatccgtatgaaactagaaatgtggaaatctgtattgttaattttaactacaaacgaacttacttttggaaattacaggttcatgatcataaagtagataaagagtagagaataaaagtaacaatctgatgattctgcacccacttcttggtggttgaaactccatagcctataacgttgcaagtcattttgtacttagactcctgaaaagattatccaaattatgttcaaaaaaccacagcacaaaaaataaacttgttttattcttggggagaaatttcatgttatactgtccaatattaatttagaaaaaaagacagtttttttttttaaggcatttcagaaacattgccctttcaagcaagttaaaacaatatccctcaacattaaataccatctttttagccatcagtaccactgggcatgtgtcataaaagagaaatgggggcagatatagctccctttcatatgctataccagaacaaaaatttgtaaaatgcataagtgcattaactgaatatgtttgaatttaaattctgggtttttaccttcaaagcacaggcagctgtagatacaaaaagtcctctaatggagtactggaatgtttcattgtcttcacaacttggagtgtcagagttttctctgccttctatattgtaaaactgagtgactattcttggtcgtttttattagatttattgatgtccaagcaatacaagaattaactgttcatatactgtatgtttccttaacatgcttatttggtttctttgatggagattgtcaaggccaaagaaactttttcatttgtcatccaaccaataaatggacagaagctgttagaagctctttaatta

SEQ ID NO: 72389 - DNA, 2371 bp, Homo sapiens
  misc_feature (13)..(13): n is a, c, g, or t
  misc_feature (25)..(25): n is a, c, g, or t
gtttgcgcggggnaccacccgctcncccccccaaccctcctcagcagaagcagccggcggcgggggcaggagtcagcccgcttccgaccgtaccccgcccgcctcccggggctcctgttctttggccccgggaccctaaccttctcccggggcggttccctccgtctgggcgtccgagcgctgcccacatctttcattcctccctgcacctccttcccttcacttttgccccggctctctttctcctctctgtcctgctgtcgcctcctctcctcactccagcctccttccctggcttattctgcccaggaaagtttggaacccccgccccccctccccaatcaggtcaacctgactaggagtagggggagatgtaggaaggcctgagagttcggggggggggaagctggaagctggtttcccagaaaatttccccccatcttctccatttagggtggtgggaattttttttaatcctgtttttgaggaggtggtaggtgtttagaaaaggatgtgggaatggaaggggtagatgagtcaaccctctttcaagattccaagggtggtgtgttacctgatccttttcgtgtgtggagttcagggggtcgggaggtttggcctttattcccacattcaaagttggaacctcccccaaattaagaatggagttttagtacccacttgtggcaggaatcctggggggaaggggtccttttttcctttttcttttcttttttcccttttttttccttttggcaacccacacccttccacacacgctcaccccaaaattaaacaccaagatcctctaacttgtttggattgactgatgaagacataaagctctatgttttttgaggtggagtgagtggtttttcttcatttttaaatggccaaatgacagcttgacccagtttgctttccaatcaaagggcatttattttgaatgtctctttgtggcgcaagagccaacgcaaaaatgatggcggcttacaatggcggtacatctgcagcagcagcaggtcaccaccaccaccatcaccaccaccttccacacctccctcctcctcacctgcaccaccaccaccaccctcaacaccatcttcatccggggtcggctgccgctgtacaccctgtacagcagcacacctcttcggcagctgcggcagccgcagcagcggctgcagctgcagccatgttaaaccctgggcaacaacagccatatttcccatcaccggcaccggggcaggctctgctacagttaaggcgcaccatcatcagcactcgcatcatccacagcagcagctggatattgagccggatagacctattggatatggagcctttggtgttgtctggttgagaatctgtagtactgagaagtttctccactatcagccgagattaacagccacagctggattctttgggggctctgctttgtgaaaagagctttgaagaagcagagcctgcaccataaaaaggaaacggttgctcttctagacataacaaagcatccgtatgaaactagaaatgtggaaatctgtattgttaattttaactacaaacgaacttacttttggaaattacaggttcatgatcataaagtagataaagagtagagaataaaagtaacaatctgatgattctgcacccacttcttggtggttgaaactccatagcctataacgttgcaagtcattttgtacttagactcctgaaaagattatccaaattatgttcaaaaaaccacagcacaaaaaataaacttgttttattcttggggagaaatttcatgttatactgtccaatattaatttagaaaaaaagacagtttttttttttaaggcatttcagaaacattgccctttcaagcaagttaaaacaatatccctcaacattaaataccatctttttagccatcagtaccactgggcatgtgtcataaaagagaaatgggggcagatatagctccctttcatatgctataccagaacaaaaatttgtaaaatgcataagtgcattaactgaatatgtttgaatttaaattctgggtttttaccttcaaagcacaggcagctgtagatacaaaaagtcctctaatggagtactggaatgtttcattgtcttcacaacttggagtgtcagagttttctctgccttctatattgtaaaactgagtgactattcttggtcgtttttattagatttattgatgtccaagcaatacaagaattaactgttcatatactgtatgtttccttaacatgcttatttggtttctttgatggagattgtcaaggccaaagaaactttttcatttgtcatccaaccaataaatggacagaagctgttagaagctctttaatta

SEQ ID NO: 72390 - DNA, 635 bp, Homo sapiens
  misc_feature (621)..(621): n is a, c, g, or t
ttagggaacaattttaaatcctctactgtttcttccaaggttttttttaaattattggttgagtaaaaggaattaaatatctgcaattaaatctgtttgttatttcaggtttgaaatatctccattcagctggcattttacatcgagacattaagccagggaatctccttgtgaacagcaactgtgttctaaaggtagcttttcagtttatttaaatacctgggaaaaatcagaatgtcagggcaggtttaagaacaacatatttttgtgaaagaaagaagttcatttccattactttaccaaaagttaacccagttttctccatatcactactcatagccatggtaataatttgtagtcctgcctcatgttcttttcatgatatttggcctatgttttagaaacactgaaattggaattgtagtgtaactagaaagaagaatagacaaggtgactcctttacagcttgttccattattaaaagaagtgcatatcagaagaaatattagaacagcaagcatctgtttatataagagaatgaagtgtgacttttaggaagaccatttacatttttacacagctaacatatctatatgctgttgaccaggtagcgaatccatntccgggtaccgctc

SEQ ID NO: 72391 - DNA, 359 bp, Homo sapiens
  misc_feature (330)..(330): n is a, c, g, or t
tactttaagttctggggtacatgtgcagaacgtgtaggtttgttacataggtatacatcagctcaggtacaggctgccgcagctgctacagttaaggcgcaccatcatcagcactcgcatcatccacagcagcagctggatattgagccggatagacggttctctggcagcaggattcccaggcatgcctagctaacaaagaagcatgtcaatcaatttgccgatgtcttgcctagattccatagcccttggatttaactttggtcggggacatgatctttctcctctggcttccgatattctaaccaacacttagtgggaagtatgggntgaagggggatgattacccttcccagcca

SEQ ID NO: 72392 - DNA, 4283 bp, Homo sapiens
  misc_feature (13)..(13): n is a, c, g, or t
  misc_feature (25)..(25): n is a, c, g, or t
gtttgcgcggggnaccacccgctcncccccccaaccctcctcagcagaagcagccggcggcgggggcaggagtcagcccgcttccgaccgtaccccgcccgcctcccggggctcctgttctttggccccgggaccctaaccttctcccggggcggttccctccgtctgggcgtccgagcgctgcccacatctttcattcctccctgcacctccttcccttcacttttgccccggctctctttctcctctctgtcctgctgtcgcctcctctcctcactccagcctccttccctggcttattctgcccaggaaagtttggaacccccgccccccctccccaatcaggtcaacctgactaggagtagggggagatgtaggaaggcctgagagttcggggggggggaagctggaagctggtttcccagaaaatttccccccatcttctccatttagggtggtgggaattttttttaatcctgtttttgaggaggtggtaggtgtttagaaaaggatgtgggaatggaaggggtagatgagtcaaccctctttcaagattccaagggtggtgtgttacctgatccttttcgtgtgtggagttcagggggtcgggaggtttggcctttattcccacattcaaagttggaacctcccccaaattaagaatggagttttagtacccacttgtggcaggaatcctggggggaaggggtccttttttcctttttcttttcttttttcccttttttttccttttggcaacccacacccttccacacacgctcaccccaaaattaaacaccaagatcctctaacttgtttggattgactgatgaagacataaagctctatgttttttgaggtggagtgagtggtttttcttcatttttaaatggccaaatgacagcttgacccagtttgctttccaatcaaagggcatttattttgaatgtctctttgtggcgcaagagccaacgcaaaaatgatggcggcttacaatggcggtacatctgcagcagcagcaggtcaccaccaccaccatcaccaccaccttccacacctccctcctcctcacctgcaccaccaccaccaccctcaacaccatcttcatccggggtcggctgccgctgtacaccctgtacagcagcacacctcttcggcagctgcggcagccgcagcagcggctgcagctgcagccatgttaaaccctgggcaacaacagccatatttcccatcaccggcaccggggcaggctcctggaccagctgcagcagccccagctcaggtacaggctgccgcagctgctacagttaaggcgcaccatcatcagcactcgcatcatccacagcagcagctggatattgagccggatagacctattggatatggagcctttggtgttgtctggtcagtaacagatccaagagatggaaagagagtagcgctcaaaaagatgcccaacgtcttccagaatctggtctcttgcaaaagggtcttccgggaattgaagatgttgtgtttttttaagcatgataatgtactctctgcccttgacatactccaacctccacacattgactattttgaagaaatatatgttgtcacagaattgatgcagagtgacctacataaaattatcgtctctcctcaaccactcagctcagatcatgtcaaagtttttctttatcagattttgcgaggtttgaaatatctccattcagctggcattttacatcgagacattaagccagggaatctccttgtgaacagcaactgtgttctaaagatttgtgattttggattggccagagtggaagaattagatgaatcccgtcatatgactcaggaagttgttactcagtattatcgggctccagaaatcctgatgggcagccgtcattacagcaatgctattgacatctggtctgtgggatgtatctttgcagaactactaggacgaagaatattgtttcaggcacagagtcccattcagcagttggatttgatcacggatctgttgggcacaccatcactggaagcaatgaggacagcttgtgaaggcgctaaggcacatatactcaggggtcctcataaacagccatctcttcctgtactctataccctgtctagccaggctacacatgaagctgttcatctcctttgcaggatgttggtctttgatccatccaaaagaatatccgctaaggatgccttagcccacccctacctagatgaagggcgactacgatatcacacatgtatgtgtaaatgttgcttttccacctccactggaagagtttataccagtgactttgagcctgtcaccaatcccaaatttgatgacactttcgagaagaacctcagttctgtccgacaggttaaagaaattattcatcagttcattttggaacagcagaaaggaaacagagtgcctctctgcatcaaccctcagtctgctgcttttaagagctttattagttccactgttgctcagccatctgagatgcccccatctcctctggtgtgggagtgatggtggaagataatgtactactgaagatgtaatgtagctttccactggagtctgggatttgcaattctggaggttaatcatgcttgtactgtaattttactaatgaagttttaaattaacaaccactacttgtatgatatgaataatatttagaaatgttactagacttttaatcttgtaaagtggttgtgcttttagaagaaaaatattttacccagagttgcacatgttttatgaatttagtgcagctgttatggctcacctcagaacaaaagagaattgaaccaaatttgggagtttggggttttatgttttgtttttcttttctaaaatgaagtgagattgttcacacacacacacacacacacacacacacacaaacacaaaggacagtcatacattttgatatttgagccattcctaaagatttggggttttctaaaactaaagaatctaggaaccttgcctgcgaccaatcatggagccacgtgagctgatcgtggctgcacctggggggagggtagggaggaggggcatgccacctaatgatcaagccctataattagcttctcattagagccgtgatggtgatgtgtgctgtctaaaatccaatgttgtgggtagagagaatgagtttgtgactaggagagactaaacttttgttttccttacccagtataaatatatatatatatatttaatctatttttattagaagtttttctgctctttcttacataaaagaaccccaagcatgcatctttcatgtgtgtaaataattcatttctgggctaatttcaaaagaatcccaatattgctgtatagaaagagaactagcttgcacattttaggtctgtgaaattttgtgagacttttcctgcactggacagtaaaaaaataataaaagacaaaaacaaatttaaaaaaaaatttaagccacaaaaaaaggcacatagggaattatgtcaaatgtgtttgtgtccttaggcaaagctgtgggagtcttgaaatgtcacagtagtaaataacttattactttttgacaagttctttttttctgttggaacactgaattcttctgtgcatatgtacatatgaatacaaatcgaaggcctctacctcctggagttatacaacttggcttgtttacctccacatgctgatgatgactattttttttttttgagttcagtgtggagacttgaaacttgaatgtcccttccaacttttatattaaaaataaaaagacaagaaaattgaagatcatttttcacctgtacaaggaatactaatggatcgtcttaaaattggtctaggaaaaaaccttggtgtgtgttatggacaattaactgttaaagttattgtaagttatctgtatttagcagagtattttcaacttgagtgatctgagctgaatttgaagactattaataagttatgtttggaagttttaacttcaatgaagtaattatttgctgtgaaagaaacaaacattgaattactaaacaaagatggtgcaatatctttgttttttttttatgaggctcctgagaatcaacccaactgaagcatttcaattcacttgaatgagaaacgtgtttagtatcaaaagagcccaagaagacactggtgtgaaaggtacaatctcagaggttggtcaattaccgtggcacactttctggtcactttgtacaatgtagatttgaagtacagtggtgaaaacattaaatgtgacatttgaaaaaaaaaatca

SEQ ID NO: 72393 - DNA, 547 bp, Homo sapiens
gtccccaaagtaaccacctgaaactatacacctagataccaactgaggtctttaagtgatcttcaaaaaggcaataattgccagcaacttagaagagttcacccataatgccaaacctgtggagtctctctcaaatttataggccattttactcttcccactgatggggttgcagtctgtgtaatgccaccagtaggtttcttatatttagcaacagctgtcattttagttttaggaagttcagctgaattctgcttgatagatgatgtgtgtgtttgatttaactaaaccagtaggcagtgcttttcagatgctggctagagttcgctgagaattcactgctcccgggcttgcaaattgtcatggattgtatgatgtttgttttctccacagaaattattcatcagttcattttggaacagcagaaaggaaacagagtgcctctctgcatcaaccctcagtctgctgcttttaagagctttattaggtaactatatgtatgtaattcaacattcttgttagaattaaaaggatgccagtgttactt

SEQ ID NO: 72394 - DNA, 1301 bp, Homo sapiens
ggtgtccgacgctggctccgctctatccggctttgctaggggagctgcggcagccgcagcagcggctgcagctgcagccatgttaaaccctgggcaacaacagccatatttcccatcaccggcaccggggcaggctcctggaccagctgcagcagccccagctcaggtacaggctgccgcagctgctacagttaaggcgcaccatcatcagcactcgcatcatccacagcagcagctggatattgagccggatagacctattggatatggagcctttggtgttgtctggttgagaatctgtagtactgagaagtttctccactatcagccgagattaacagccacagctggattctttgggggctctgctttgtgaaaagagctttgaagaagcagagcctgcaccataaaaaggaaacggttgctcttctagacataacaaagcatccgtatgaaactagaaatgtggaaatctgtattgttaattttaactacaaacgaacttacttttggaaattacaggttcatgatcataaagtagataaagagtagagaataaaagtaacaatctgatgattctgcacccacttcttggtggttgaaactccatagcctataacgttgcaagtcattttgtacttagactcctgaaaagattatccaaattatgttcaaaaaaccacagcacaaaaaataaacttgttttattcttggggagaaatttcatgttatactgtccaatattaatttagaaaaaaagacagtttttttttttaaggcatttcagaaacattgccctttcaagcaagttaaaacaatatccctcaacattaaataccatctttttagccatcagtaccactgggcatgtgtcataaaagagaaatgggggcagatatagctccctttcatatgctataccagaacaaaaatttgtaaaatgcataagtgcattaactgaatatgtttgaatttaaattctgggtttttaccttcaaagcacaggcagctgtagatacaaaaagtcctctaatggagtactggaatgtttcattgtcttcacaacttggagtgtcagagttttctctgccttctatattgtaaaactgagtgactattcttggtcgtttttattagatttattgatgtccaagcaatacaagaattaactgttcatatactgtatgtttccttaacatgcttatttggtttctttgatggagattgtcaaggccaaagaaactttttcatttgtcatccaaccaataaatggacagaagctgttagaagctctttaatta

SEQ ID NO: 72395 - DNA, 2191 bp, Homo sapiens
gtcaagcagttaatgtgtcttttgaaagatcctatgtggacagtcattttatctgtagtgttgatgtgctggtctctaatttgatttcagtccaaaagaatatccgctaaggatgccttagcccacccctacctagatgaagggcgactacgatatcacacatgtatgtgtaaatgttgcttttccacctccactggaagagtttataccagtgactttgagcctgtcaccaatcccaaatttgatgacactttcgagaagaacctcagttctgtccgacaggttaaagaaattattcatcagttcattttggaacagcagaaaggaaacagagtgcctctctgcatcaaccctcagtctgctgcttttaagagctttattagttccactgttgctcagccatctgagatgcccccatctcctctggtgtgggagtgatggtggaagataatgtactactgaagatgtaatgtagctttccactggagtctgggatttgcaattctggaggttaatcatgcttgtactgtaattttactaatgaagttttaaattaacaaccactacttgtatgatatgaataatatttagaaatgttactagacttttaatcttgtaaagtggttgtgcttttagaagaaaaatattttacccagagttgcacatgttttatgaatttagtgcagctgttatggctcacctcagaacaaaagagaattgaaccaaatttgggagtttggggttttatgttttgtttttcttttctaaaatgaagtgagattgttcacacacacacacacacacacacacacacacaaacacaaaggacagtcatacattttgatatttgagccattcctaaagatttggggttttctaaaactaaagaatctaggaaccttgcctgcgaccaatcatggagccacgtgagctgatcgtggctgcacctggggggagggtagggaggaggggcatgccacctaatgatcaagccctataattagcttctcattagagccgtgatggtgatgtgtgctgtctaaaatccaatgttgtgggtagagagaatgagtttgtgactaggagagactaaacttttgttttccttacccagtataaatatatatatatatatttaatctatttttattagaagtttttctgctctttcttacataaaagaaccccaagcatgcatctttcatgtgtgtaaataattcatttctgggctaatttcaaaagaatcccaatattgctgtatagaaagagaactagcttgcacattttaggtctgtgaaattttgtgagacttttcctgcactggacagtaaaaaaataataaaagacaaaaacaaatttaaaaaaaaatttaagccacaaaaaaaggcacatagggaattatgtcaaatgtgtttgtgtccttaggcaaagctgtgggagtcttgaaatgtcacagtagtaaataacttattactttttgacaagttctttttttctgttggaacactgaattcttctgtgcatatgtacatatgaatacaaatcgaaggcctctacctcctggagttatacaacttggcttgtttacctccacatgctgatgatgactattttttttttttgagttcagtgtggagacttgaaacttgaatgtcccttccaacttttatattaaaaataaaaagacaagaaaattgaagatcatttttcacctgtacaaggaatactaatggatcgtcttaaaattggtctaggaaaaaaccttggtgtgtgttatggacaattaactgttaaagttattgtaagttatctgtatttagcagagtattttcaacttgagtgatctgagctgaatttgaagactattaataagttatgtttggaagttttaacttcaatgaagtaattatttgctgtgaaagaaacaaacattgaattactaaacaaagatggtgcaatatctttgttttttttttatgaggctcctgagaatcaacccaactgaagcatttcaattcacttgaatgagaaacgtgtttagtatcaaaagagcccaagaagacactggtgtgaaaggtacaatctcagaggttggtcaattaccgtggcacactttctggtcactttgtacaatgtagatttgaagtacagtggtgaaaacattaaatgtgacatttgaaaaaaaaaatca

SEQ ID NO: 72396 - DNA, 480 bp, Homo sapiens
gatgtgtaaaacttcattttgcctgatgcaaagttcccagtattcttgtcactaatttctttccagaaaatgaaagttataggcttggctgttctctgtggggtgaggaggggagtatggagggcagaggaggagacagaaatgtccaggagccataatctagaacatccaagtccttgaccaacagtttccttaagtacagtgagcctcagctagacagatcctgggggaagttttctgcacagagaacaagctcaggaaattctcctttctttaccacccaaggctttgccgcagccagaaccctcagccattgggcttgtgtggtgcagatcatgtagtcttcttctatggattctgtctgctgataacaggttcttagcctttgctaagagcaaacaatttggactcttggtctcttgtgcctaagttcagactccctgtgaaaacactccaatgaatagaagaggcaaaaaaaaa

SEQ ID NO: 72397 - DNA, 481 bp, Homo sapiens
acacattcccagctgtggtggctatggtgagagatgcctttctgcttgagaaaggcagagggaaaagtaaaggggactttgtcttgcagcttgagtatcagctcagccacagtgggatagaacaccaagtgggcttccagggttcccacttccagacttcaagtcctgtctggcacttctgcactcgccctgggccagagagaaacgcactgctcagaaagaagagactcagtataggtggtagcaaggcagtcgtcaccatagggtttgagcaagaaccagtactgggctggcttcggatctgaactagaggagtctcagtggtcgtggccacaagaatgcttgtgtcacccctcccccagctccaggcagctccatacacacacacacacacagagagagagagagagagagagagagagagagagagagagagagactctgtttgtttggggtaaaggaagaagagaacaagagtctc

SEQ ID NO: 72398 - DNA, 329 bp, Homo sapiens
gtaaattttacaggcagtttattagctttctttaaaacatcatattggaattcttagcaggattacattgagacagtagattaatgtatgatgtttcagtcaaggaacatggcatgtcttttaacttatttattgttaaatgtactttagtaagtgtgtgtagtttttcttccatcctatacatttttgttaggtttataactagatattttatattgtacctggttcataattgggatcccccccatataaattgttattaatgcttaggagaactattgatttttgtctgcagtcagccaccttaaattattttgctattaatttca

SEQ ID NO: 72399 - DNA, 370 bp, Homo sapiens
ttgggaagaagctacctgttaagaaaaaaaaaaaggacaatggcaataactgggatcataattcccaagttttaggtttatacacaaaaatgaggcagtcaaaaacaaaaaaagaaaatttttaaaaatgaggcagtcagtcaaagaagtcagcatccaacattcctgattgcaatgcagtcaacgttcatggagcatggagatacaagaaaataaaagataagaagattggaaagattttactactccagctacttacaaaatccagggcctgtctctctcagataagcagagagattctcctgggcttttggtttgctttttttgtttgtttaatttagtttttgcgttttggtgcttctatcaagta

SEQ ID NO: 72400 - DNA, 407 bp, Homo sapiens
taggagtgagtggccaatgtcaccactgaacctagggtaaagccgaggtccatgatgcacttttctaaggcaacaaggtgctatgatcaacagggacacatgaagtggcatggaggagcattcagtgaggcaaagggaactactggaccaggctcacatctgatttacagtagatttagctccccttcctcaagagacccaaacatattctgtccttaagccattctgtcatagaacctgtctggcttcagggaaagggagaaggcatggtagtataggctaaagacccatttgaccagttgattggcttttgatgatcagtagacacacccctcaatgctgcgaagaaaatgaaggccactcttctaaggttgtaaaaagataaatcattattcatgtgaaaactt

SEQ ID NO: 72401 - DNA, 223 bp, Homo sapiens
tggaccaatacttggtagtgtgtttattatactttattcagatgctctgtagacaagtaggacactcaaagcaatttgtttcttggctaagtcagtattaaaataaggtgaaatctgattggaacactgtgctacttacaatgatcctttttatacatctttacttttgcatcttaccttctgcgtgtttgctcttcttgcctattgaaaggggagtccagaa

SEQ ID NO: 72402 - DNA, 619 bp, Homo sapiens
aggacaaaataaagcctaaatccaagaacacttttaaaaatgaggaaatagtgaacacaatagacggaagtctggaagtttctacccatgccaagaaaagcattttatgttttgttcacatatgttgtgcaattcaaatttttttccctatattctctgactagacacttgtactgagtcaattggcgagtgtgtctgtctaaaagcacaatatcaaaatatcacttaaagcatctttacatagtgtgtttaagaaaaagttgttattcagcagaaaggtaattccaattggtctgcatatttatcagcacttggtattgtctgtttcttattttagccattctgataggtgtgtactgatatctaatcatggctttaatttgaatttccctaatggctgatggtgaacatcttttcatgtgcatttctgtcatctgtatgtctttggtgaagagtcttcaaatcttttgttcatcttaaaattggattgttatattaccattgggtttaagaatctacatattatggatacaaatatgttgtcagatatgtgttttgcagcattttctcccagtctgtagcttgtctttaaaaaaaaaattttttttttttttttttt

SEQ ID NO: 72403 - DNA, 389 bp, Homo sapiens
  misc_feature (26)..(26): n is a, c, g, or t
gtgggagccgaatgatgagaactcantggacacatgtggggaaactggggaaacaacacacactggggcctgcaggagaatgggggtgggaggagggagaccatcaggaaaaatagctaatggatgctgggcttaatacctaggtgatgggatgatctgtgcagcaaaccaccatgacacaggtttagctatgtaacctgcacatcctgcgcatgtacccctgaacttaaaagttagaaaaaggtaaaaattaaagaaaacctgtacatcaaaacttactgaatgtaatgaaagcagcgctcagagggaaatttatagctgtaaaagcctacattataaaagatctaagactaaacacacagagtagactaaacacagaaaacaaaagg

SEQ ID NO: 72404 - DNA, 383 bp, Homo sapiens
ccattctttgcttttgtgttttcttgaggaaattcttccagagtcagacattctctatattctctaaaaacttctcttgtttgagccagagctctgtgagctgcttctcttaaagagctgctcgtggacgatctgccacaaagagttttaaaatgtggtgttggtctcttttttctgaaccacatcaaagagcacagattatttcctttctgagaacaaaactctttaatgacaagaaagaacaagaaactgagccgccaaccagccctatcaggaaagacactgtaaccctaacaatgacaaatgatccacttctacaatctcttgtcactttttgaaatttaaaccaaacacagtaatcatattctcgcatatgtgtctct

SEQ ID NO: 72405 - DNA, 966 bp, Homo sapiens
cagggaaggatccgttttggcgggcggttggcgttgcgcagaaggcggcggcggtggtggcttgtggtgcggcctcaccatacaggaacagggcagacgttagcgtgagtgatcactctcaatcccgggaaggagtccaggtcatcctgagaagagttcgcttgtccagagtccaagatgcagatttgttggatttctgtaagccactcgaagccacatattcatttctgatgacagctttacacttgtgctggaagaacacccactgtgacaactgctgcctatgtttagtctgtccaggagctctaccaactagcatgtttgcagaaaaacctacactgttcttgttagcagctatgtaaatattagatctttctgagtttctcttctcagatctgccaatttctttggggcaaattgtatcctgcagtagcctcaatttaccctttgaaatgagggattaaaggttttagacattctttgggttatctgaaacacaattctttttggatcagtaatgttttatatatgtccactttatgatgtttaaaattttattccccctatgtattagtttcctgtggctgctataacaaattaccacagacttggtggtttaaaacaagaggaatttattcttctcaaaattttggagcccagaagtctgcaatcaagatattgaggcccctctggaggctctaggagagagactgttctttgcctcttttagcttctgattatggtcagcattccttggcatatctctctgttctgttttcacattgtcttctcttttgagtacttgcatcagaactctccctctacctgtgtattataaggatacatatgattgcaattaagaaaccacttggatgaaccaggataaatttctccaatcctatcttttaattcaacctgagagagcagatttaaaatatattttattcctaaagtggcaggtccctg

SEQ ID NO: 72406 - DNA, 864 bp, Homo sapiens
cagggaaggatccgttttggcgggcggttggcgttgcgcagaaggcggcggcggtggtggcttgtggtgcggcctcaccatacaggaacagggcagacgttagcgtgagtgatcactctcaatcccggggacctggtggccttagtctttcaggtggaacggtgtgcgacatgggaaagaaaaccaagcggacagctgacagttcttcttcagaggatgaggaggagtatgttgtggagaaggtgctagacaggcgcgtggttaagggacaagtggaatatctactgaagtggaaaggcttttctgaggagcacaatacttgggaacctgagaaaaacttggattgccctgagctaatttctgaatttatgaaaaagtataagaagatgaaggagggtgaaaataataaacccagggagaagtcagaaagtaacaagaggaaatccaatttctcaaacagtgccgatgacatcaaatctaaaaaaaagagagagcagagcaatgatatcgctcggggctttgagagaggactggaaccagaaaagatcattggggcaacagattcctgtggtgatttaatgttcctaatgaaatggaaagacacagatgaagctgacctggttcttgcaaaagaagctaatgtgaaatgtccacaaattgtgatagcattttatgaagagagactgacatggcatgcatatcctgaggatgcggaaaacaaagagaaagaaacagcaaagagctaaaggaggggatggtctctgtcatttctctttgtacataatacattcacctccctgcctcctctcctttctacccacccctttctatcctaaacacatccataaaaaatgtgcttatcac

SEQ ID NO: 72407 - DNA, 794 bp, Homo sapiens
ctgggaggggaggcccctcctgttagcccagagggaaagaaagaactggggcgatccgggacctggtggccttagtctttcaggtggaacggtgtgcgacatgggaaagaaaaccaagcggacagctgacagttcttcttcagaggatgaggaggagtatgttgtggagaaggtgctagacaggcgcgtggttaagggacaagtggaatatctactgaagtggaaaggcttttctgaggagcacaatacttgggaacctgagaaaaacttggattgccctgagctaatttctgaatttatgaaaaagtataagaagatgaaggagggtgaaaataataaacccagggagaagtcagaaagtaacaagaggaaatccaatttctcaaacagtgccgatgacatcaaatctaaaaaaaagagagagcagagcaatgatatcgctcggggctttgagagaggactggaaccagaaaagatcattggggcaacagattcctgtggtgatttaatgttcctaatgaaatggaaagacacagatgaagctgacctggttcttgcaaaagaagctaatgtgaaatgtccacaaattgtgatagcattttatgaagagagactgacatggcatgcatatcctgaggatgcggaaaacaaagagaaagaaacagcaaagagctaaaggaggggatggtctctgtcatttctctttgtacataatacattcacctccctgcctcctctcctttctacccacccctttctatcctaaacacatccataaaaaatgtgcttatcac

SEQ ID NO: 72408 - DNA, 757 bp, Homo sapiens
  misc_feature (748)..(749): n is a, c, g, or t
cagggaaggatccgttttggcgggcggttggcgttgcgcagaaggcggcggcggtggtggcttgtggtgcggcctcaccatacaggaacagggcagacgttagcgtgagtgatcactctcaatcccggggacctggtggccttagtctttcaggtggaacggtgtgcgacatgggaaagaaaaccaagcggacagctgacagttcttcttcagaggatgaggaggagtatgttgtggagaaggtgctagacaggcgcgtggttaagggacaagtggaatatctactgaagtggaaaggcttttctgaggagcacaatacttgggaacctgagaaaaacttggattgccctgagctaatttctgaatttatgaaaaagtataagaagatgaaggagggtgaaaataataaacccagggagaagtcagaaagtaacaagaggaaatccaatttctcaaacagtgccgatgacatcaaatctaaaaaaaagagagagcagagcaatgatatcgctcggggctttgagagaggactggaaccagaaaagatcattggggcaacagattcctgtggtgatttaatgttcctaatgaaatggaaagacacagatgaagctgacctggttcttgcaaaagaagctaatgtgaaatgtccacaaattgtgatagcattttatgaagagagactgacatggcatgcatatcctgaggatgcggactctttgacatatacattcaccctcctgctctnntcttctac

SEQ ID NO: 72409 - DNA, 687 bp, Homo sapiens
cagggaaggatccgttttggcgggcggttggcgttgcgcagaaggcggcggcggtggtggcttgtggtgcggcctcaccatacaggaacagggcagacgttagcgtgagtgatcactctcaatcccggggacctggtggccttagtctttcaggtggaacggtgtgcgacatgggaaagaaaaccaagcggacagctgacagttcttcttcagaggatgaggaggagtatgttgtggagaaggtgctagacaggcgcgtggttaagggacaagtggaatatctactgaagtggaaaggcttttctgaggagcacaatacttgggaacctgagaaaaacttggattgccctgagctaatttctgaatttatgaaaaagtataagaagatgaaggagggtgaaaatgatcaatgtcctctaagacaatcctcacccagacacaggcaagggagagcgaagaggttcgttagagaaatcaagtaatgccgaactttatggaattgagaactgactttgcaaagctgaattctttgtgcttccaatgtcctcattagaatccctttgaagtacatcagagtataattttcaagagtcaagaacaaagcttcatctagccattggctcaaatggcccaccagcagaaacaaagtatctgaatgctctgctcctcaagccataacgtgcgcag

SEQ ID NO: 72410 - DNA, 906 bp, Homo sapiens
ctgatataaacttttatttttcttccttgcttatagagaatgattttaactgatcattgtactaataggaaggagtccaggtcatcctgagaagagttcgcttgtccagagtccaagatgcagatttgttggatttctgtaagccactcgaagccacatattcatttctgatgacagctttacacttgtgctggaagaacacccactgtgacaactgctgcctatgtttagtctgtccaggagctctaccaactagcatgtttgcagaaaaacctacactgttcttgttagcagctatgtaaatattagatctttctgagtttctcttctcagatctgccaatttctttggggcaaattgtatcctgcagtagcctcaatttaccctttgaaatgagggattaaaggttttagacattctttgggttatctgaaacacaattctttttggatcagtaatgttttatatatgtccactttatgatgtttaaaattttattccccctatgtattagtttcctgtggctgctataacaaattaccacagacttggtggtttaaaacaagaggaatttattcttctcaaaattttggagcccagaagtctgcaatcaagatattgaggcccctctggaggctctaggagagagactgttctttgcctcttttagcttctgattatggtcagcattccttggcatatctctctgttctgttttcacattgtcttctcttttgagtacttgcatcagaactctccctctacctgtgtattataaggatacatatgattgcaattaagaaaccacttggatgaaccaggataaatttctccaatcctatcttttaattcaacctgagagagcagatttaaaatatattttattcctaaagtggcaggtccctg

SEQ ID NO: 72411 - DNA, 313 bp, Homo sapiens
cagggaaggatccgttttggcgggcggttggcgttgcgcagaaggcggcggcggtggtggcttgtggtgcggcctcaccatacaggaacagggcagacgttagcgtgagtgatcactctcaatcccggggacctggtggccttagtctttcaggtggaacggtgtgcgacatgggaaagaaaaccaagcggacagctgacagttcttcttcagaggatgaggaggagtatgttgtggagaaggtgctagacaggcgcgtggttaaggtcaacgctacaggaggaccgtagcttcctcccagaccattacggcc

SEQ ID NO: 72412 - DNA, 195 bp, Homo sapiens
cagggaaggatccgttttggcgggcggttggcgttgcgcagaaggcggcggcggtggtggcttgtggtgcggcctcaccatacaggaacagggcagacgttagcgtgagtgatcactctcaatcccgggtaagtggcagacagtcttatctacccatagtaggtcttgaactgactccatttgggcccgttattg

SEQ ID NO: 72413 - DNA, 8292 bp, Homo sapiens
cagggaaggatccgttttggcgggcggttggcgttgcgcagaaggcggcggcggtggtggcttgtggtgcggcctcaccatacaggaacagggcagacgttagcgtgagtgatcactctcaatcccggggacctggtggccttagtctttcaggtggaacggtgtgcgacatgggaaagaaaaccaagcggacagctgacagttcttcttcagaggatgaggaggagtatgttgtggagaaggtgctagacaggcgcgtggttaagggacaagtggaatatctactgaagtggaaaggcttttctgaggagcacaatacttgggaacctgagaaaaacttggattgccctgagctaatttctgaatttatgaaaaagtataagaagatgaaggagggtgaaaataataaacccagggagaagtcagaaagtaacaagaggaaatccaatttctcaaacagtgccgatgacatcaaatctaaaaaaaagagagagcagagcaatgatatcgctcggggctttgagagaggactggaaccagaaaagatcattggggcaacagattcctgtggtgatttaatgttcctaatgaaatggaaagacacagatgaagctgacctggttcttgcaaaagaagctaatgtgaaatgtccacaaattgtgatagcattttatgaagagagactgacatggcatgcatatcctgaggatgcggaaaacaaagagaaagaaacagcaaagagctaaaggaggggatggtctctgtcatttctctttgtacataatacattcacctccctgcctcctctcctttctacccacccctttctatcctaaacacatccataaaaaatgtgcttatcactgtgctccacaggagaaatgttggtattggttctcttgtaacataactgatggtctgattaatgataagtgtctctctgtgaagaccaggcatttacatactgagtgtaatacccacaatttttttttcctttgccctgatctcttccttctgcttccctgtgacctcaagatgagtttcaactttttaatcaccttagagtcttgatcttttcagggttggtcgctttttaggttgggggattttgttacaatgatgttgaattttggtttcttgctttggttcttagaacatgttgctgactagctggcctttgttctgacatgttgagatggaaaggatgttgcccatctgttaaaaagccaatagcaactgcctacctgttggggctttcccaaccttgttcagctctacccaggagaatacagggtttctggtgtggtcttctgggccaccctctgttgttcatcctcactcatcctcccagaattactccatcctttggaagatttgaaattttacactgaaatctgtcaagacactctttttagccccaggactttcggtattgcttttagcactccccacttctgcttctgtaaagtgatatcaatttgtgataaaatgacaagattattaactgtgcagatttgtagctatagtacatgaggatgatggggtagggtacaattgtctttattatcatatatggtatgtatgtatgatttctttccattcctcatatttagactgtatatttatgtaggtgtgagtgattgcctggtgcttgcttgtgccaaggtgctaggcaccctccaaccctgccaacttttgtggcctcccaaagcattcctgttaccaaagaggcttcaaacctgaccctcacttctcagtggacccgagtttcccttccatgccattattttcagtggggaagttttagaggtgagctgttggccacaatatcaattttaagtgttcatagcagttatgtctcctgcattcttggctcctggatttaccaccaagagtccccaaaatattaatgctcttccctttttctaccctcaaacttatagttgtatcttattttttaaaatgaattttcatggccaggcacagtggctaccgcctgtaatcccagcactttgggaggctgagggcaggagaattgcttgaagccagaagtttgagaccagcctgggcaatgtagtgagaccccctgtctctaaaaaatataaataaaaataaaggcatgttcctgaaagactgtcaccttggaaagtgacaggccctggcattagcatgttgacacacccttttcttcttactcagcaaaatacttcgttttggtttcttcttgtgttgctattgagaaatttgtctgatcatatccttctgcctttgtcccccaagaaatgccctactttatccttttctttttgtagttgaggagggctagagaatcacaattaaaagtaaggaaatagcagggttttgaggatccttgtcccagccccaaagctgaggaaataagaataaatgcttaatatagccttaattctagagcgcaccagccatgaggctgcttttcttgttgtttttgatttttaaaacatacagctgtctggccaggagcatctaccatttctagattattcagagtaatgaggggaatggatggattgctccagtccacagatgagccacataatatgcaaatcatatacccattcatagcatttgttaacattgcttccctgctcagctgctgattgaattctgtgtgcttatataaattatgtcaaaaattatactgcataattgaggtgacagctgttgctgcagtgacatgacagactggaacaatgaagcttttggtttaagtcagccaggaaaatccttctgaatggtaatgtgattgggcaagagctcataaaccatacctcaagtgggtgggagttttatctctatattccttctctctctgaaggaattaaaggcctagatcaagtgctggataattgacaattgcttgtacttaatctgatcggtatctaaaagaaggaaaggatggtcaggaaacatttatcataaatgtagccaaggatatcaattagggtagacaagaataggacaaaaataggccagagctcctgaggaggtgatatgggtctcttgatttgcagaaaatgacagcctatccaagtggcccagtgtatgcctcccagtagcagtgggcatgtaaactgcagcgaccttatttttaaaaccaaaaacctagtatgtggacaaagaacatgacaatatttggtactgagattggttctgagaaacctggggcatgtggctgctgtggttataggtaatatttaagacattcataaaaatctgatattcttttaccgaaataaccccagtatcatctactacttaccatctgttaatagactttactctgtcttttttgtcttcggtttattgtactgagtgccgccaaaacaacttttgttctcttcctgcctacctgcagctggttctataggaatgtagggagccagaggccagtattgatttcagcccttagcacaaaggaaatcagatgcctgcttccagcatttgttagtgttgagtagatgttcttgccctagaagaattacagcctcaaacagaaacctgtttcatggagctttctcccctcagaagagttaatagttaagagctaagcactcttaaacacctaagtctcaaatgctaaaaatttatttttcttgtgtttagtcctctttcaagacatctttctaagcctttcagtaatcaacattaaaagatctccctttcttcagagttatagcacagctttgcccagtagaggctaccaaggacagcttagcagccctttgattgctgggctgggcagatggccttcaagttaagatcaaatgccgggaaaatcagcctacatgggagcacccattttaaacctggagagaaccatgatgttttcttcttcaaataacaatctagttttttttcccccagtactaaaattgtattgtctttcagacaatataatttttatttaaaattggaacatactatcttcatgctttctaagctaaatcttcatttagatttcactcctcagtagatcccagagaagaagctatataggatccagattcaaatttaacagtgtcttctacttttttagttatgttttctatcaactcctgctgccttttcaaatacggatatttttcaggagactcttctacttgtccactgactgtattttttcctttttgatccgtagccctggttaaatggctgacatccttccgtggatgattcttggaggtagtctcagaattccaaagtgattgtctgtcttcttcttgtcttgatcctaatgcagacattcacctctattatttatttattttttttagacagagtctcgctctgtcaccaggctggagtgcagtggcacaatcttggcttactgtaccctccacctcctgggttcaagcgattctcctgcctcagcctctcgagtagctgggactacaggtgtgtgccaccatgcccagctaatttttgtatttttggtagagatggggttttaccatgtttgccaggatggtctcgatttcctgaccttgtgatctgcccaccttggcctcccaaagtgctggaattacaggcatgagccaccgtgcctggccacctctattaaatttttgtggacaaaaataaaattgtcattatttgtttgctctcatggagcactttcagtaatacaattttttttaaattccagttgccctctttgttgctctgtcctctgtaatacctgactttgctaaagacttgaggggtggtttcagaggagggtcaggtgatgggaaggcaggatgagaaaagccctggacttgcatgtttgagaaggcttccaaccacatcttcactcagactcttggaattcctgtccccaaaacaagcttctgttttttgctcacaatgctatatttctaaatttttcctgaattactgagaagcagtcattagctttgttaagtttggtttggggacattgttggtatcaaaaatcgaagtcttattcatttgatgtaggccatgaatcatcaataactggttgctggaaagcttgactaccatccactggggtgctattttgagaaggatttttgggtatctttatagtctgcaattagttgatgattgctttctagtttatcaactgcatttatatttgcttttctgttcatggaaaatcctttatttgctggggttttttgtttgtttgtttgtttttcccacttacagcaagtaaaagtggtctgaggttatccttgtttttcttcgcggtttgccatgtgtgaaagtagatttcctgctattgatatattctcattatagacagaatagtggagaacagtgttgccatggacaaaatccagttttggtccactctggggagcatttggacctgtggtgcttctaacaattaaaagtctagatggtccttgactgtcccccagccatactgcatactactttgtgcattctactttgtgtcattaatgaaagattggttctgtccctgtaacttaggcatttattattcttaactcttcattcctgttctgtagccacccagcagtccattttccctatgttcaggccaaaccacagggcattggggaaggtttttgggattttcttattgagattttgttgaatctgtagtttaccccagctttcctaaggtacagtgaggggttggagggatctgtgtttggcccggggagcaattgtctctaccttaaggttcagttttgagggcataaaatactactttgcaatgtcatgagaacaccattagatctgaaatgtggaaatggtttctcacaatttaaaggaaaaacccactttgcacccatgatcccatcattttggttgagattttagaataaaaaatatagtgttgagatccgtacttttgtaatcagaccaccaagcatgcctgtggcaaggcagagaggaaaggtctggagccagtgtattgcagtttcatgctacctttacctgctaatcataaaaattatgttttcaaaagtagatgatactagccttacacccaaaaacatgttctgaattagatgccccctcacccaatttttattaagctttctaaattccagccacattgctgtacatcaacattggtttcattcaacagacatttttttggcctgaagatacaaggttcagaaagaggccatccctgccctcaaataactttcatactggtgtatgatgaactgaccattaatagtttaagtgcttacaagctatgtttctgttcaaaaaaaaaatagtttggtataataaatgctataaaccaatacacatttctgacttgggggcagagacagactggctgatgttgtatagtttgtagccctggagtaagaagttgacattaatttcggcctatatgtggaaaagacctataacattgggtgaactgagccagctggccatagaacacaagaacatattccaggaaataaatatagctggagggttggaaatgctgttattactgagagagaaaacaggtgagttgggattgagaactcctgattttcatccctggtttagattcttggccaaagtagtggtagagttaatctttgcttgtggaaagcattaactatgttgcagattcagttgtgttacattattgtgggttctataacaacatattcctcatggacactttaccagagttgctcacacctttttcaatttctcatcccttttggaggaatgaacatgagacttaactgcctttaagcctaaaacggacatgctttccaatgacaagagattttctaaagagaagtcttggagcacatctgttaatacctgagcatctactctgagcagtgcagttttattcaatactggagagagggtgatttctttttttttgagacggagtcttgctctgtctcccaggctggagtgcagtggcgcaatctcggctcactgcaagctccacctcccgggttcacgccattctcctgcctcagcctcccgaggagctgggactacaggcgccggccaccacgcccggctaattttttgtatttttagtagagacggggtttcaccttgttagccaggatggtctcaatctcctgacctcatgatccacccacctcggcctcccagagtgctgggattacaggcgtgagccaccgccgggccgagagggtgatttctaagcagagaattgtatcagttatgtggaaacctttgccagaaatacatataccttgtatattaaatctgagtctcagatttaatcatcgaagcgtagctgggttaagaaacagtctgatcgtaaggatgttgtcgattctgacccatggatgaccacaagaaaaagatatttatttctgcctggataattgagagttgactaactttggaagtcagaattcccaggaattagagtaactgctctggaaagttaaagtgtgaagttttttagatagtttcataaaaacaattctggtttctttttgcttgtgctgactttcttggattttaatctacctcatcttgtctttttagagttacttcaacttgtcactttaacattgtgcttgactttggttgttttctaagatggaatttttcctgttcattgacagcttgttctcttgccttttcattctgatcctcatttcatctaacatcatctcatattgctcctctgtcaagagaaatgttttaaaatagtttaaagtcttgttttatgggaagaaagtgatcctccaatgctatttgtttctgaggtcagtaagagaaggagttaaaacaaggcagtggggaagggaatgaatcctgcactggaggcaaaagctgacaaggaaagagccattaattaagacaatttcaaagtcaactgattgtgatcattaatgtcacaatagatcaaaacctaattatcacagcctaggtaagagccatcagtattaatcggaaaatctaataggaaactattatcaagaaattaggccaaattgaatgcagtgaactttttatcttggcattctctatttttttgtgatgtcccctggcattggcaggtgtgaccctaacagtcgattcaaggccaagtggtcagtttgtcagccttttttaagggatttctttttatttttaggaattccaaacagagttaacctaaactgtcattgccaaaagatcagtcttaaactttcttagcacctgtacctgtttaatgtgatcagctatcagtgaggaaaaaaaaaaaaatctatttaggtcttggaatggttcctgtacctagagtatccatattga

SEQ ID NO: 72414 - DNA, 7121 bp, Homo sapiens
cagggaaggatccgttttggcgggcggttggcgttgcgcagaaggcggcggcggtggtggcttgtggtgcggcctcaccatacaggaacagggcagacgttagcgtgagtgatcactctcaatcccggggacctggtggccttagtctttcaggtggaacggtgtgcgacatgggaaagaaaaccaagcggacagctgacagttcttcttcagaggatgaggaggagtatgttgtggagaaggtgctagacaggcgcgtggttaagggacaagtggaatatctactgaagtggaaaggcttttctgaggagcacaatacttgggaacctgagaaaaacttggattgccctgagctaatttctgaatttatgaaaaagtataagaagatgaaggagggtgaaaataataaacccagggagaagtcagaaagtaacaagaggaaatccaatttctcaaacagtgccgatgacatcaaatctaaaaaaaagagagagcagagcaatgatatcgctcggggctttgagagaggactggaaccagaaaagatcattggggcaacagattcctgtggtgatttaatgttcctaatgaaatggaaagacacagatgaagctgacctggttcttgcaaaagaagctaatgtgaaatgtccacaaattgtgatagcattttatgaagagagactgacatggcatgcatatcctgaggatgcggaaaacaaagagaaagaaacagcaaagagctaaaggaggggatggtctctgtcatttctctttgtacataatacattcacctccctgcctcctctcctttctacccacccctttctatcctaaacacatccataaaaaatgtgcttatcactgtgctccacaggagaaatgttggtattggttctcttgtaacataactgatggtctgattaatgataagtgtctctctgtgaagaccaggcatttacatactgagtgtaatacccacaatttttttttcctttgccctgatctcttccttctgcttccctgtgacctcaagatgagtttcaactttttaatcaccttagagtcttgatcttttcagggttggtcgctttttaggttgggggattttgttacaatgatgttgaattttggtttcttgctttggttcttagaacatgttgctgactagctggcctttgttctgacatgttgagatggaaaggatgttgcccatctgttaaaaagccaatagcaactgcctacctgttggggctttcccaaccttgttcagctctacccaggagaatacagggtttctggtgtggtcttctgggccaccctctgttgttcatcctcactcatcctcccagaattactccatcctttggaagatttgaaattttacactgaaatctgtcaagacactctttttagccccaggactttcggtattgcttttagcactccccacttctgcttctgtaaagtgatatcaatttgtgataaaatgacaagattattaactgtgcagatttgtagctatagtacatgaggatgatggggtagggtacaattgtctttattatcatatatggtatgtatgtatgatttctttccattcctcatatttagactgtatatttatgtaggtgtgagtgattgcctggtgcttgcttgtgccaaggtgctaggcaccctccaaccctgccaacttttgtggcctcccaaagcattcctgttaccaaagaggcttcaaacctgaccctcacttctcagtggacccgagtttcccttccatgccattattttcagtggggaagttttagaggtgagctgttggccacaatatcaattttaagtgttcatagcagttatgtctcctgcattcttggctcctggatttaccaccaagagtccccaaaatattaatgctcttccctttttctaccctcaaacttatagttgtatcttattttttaaaatgaattttcatggccaggcacagtggctaccgcctgtaatcccagcactttgggaggctgagggcaggagaattgcttgaagccagaagtttgagaccagcctgggcaatgtagtgagaccccctgtctctaaaaaatataaataaaaataaaggcatgttcctgaaagactgtcaccttggaaagtgacaggccctggcattagcatgttgacacacccttttcttcttactcagcaaaatacttcgttttggtttcttcttgtgttgctattgagaaatttgtctgatcatatccttctgcctttgtcccccaagaaatgccctactttatccttttctttttgtagttgaggagggctagagaatcacaattaaaagtaaggaaatagcagggttttgaggatccttgtcccagccccaaagctgaggaaataagaataaatgcttaatatagccttaattctagagcgcaccagccatgaggctgcttttcttgttgtttttgatttttaaaacatacagctgtctggccaggagcatctaccatttctagattattcagagtaatgaggggaatggatggattgctccagtccacagatgagccacataatatgcaaatcatatacccattcatagcatttgttaacattgcttccctgctcagctgctgattgaattctgtgtgcttatataaattatgtcaaaaattatactgcataattgaggtgacagctgttgctgcagtgacatgacagactggaacaatgaagcttttggtttaagtcagccaggaaaatccttctgaatggtaatgtgattgggcaagagctcataaaccatacctcaagtgggtgggagttttatctctatattccttctctctctgaaggaattaaaggcctagatcaagtgctggataattgacaattgcttgtacttaatctgatcggtatctaaaagaaggaaaggatggtcaggaaacatttatcataaatgtagccaaggatatcaattagggtagacaagaataggacaaaaataggccagagctcctgaggaggtgatatgggtctcttgatttgcagaaaatgacagcctatccaagtggcccagtgtatgcctcccagtagcagtgggcatgtaaactgcagcgaccttatttttaaaaccaaaaacctagtatgtggacaaagaacatgacaatatttggtactgagattggttctgagaaacctggggcatgtggctgctgtggttataggtaatatttaagacattcataaaaatctgatattcttttaccgaaataaccccagtatcatctactacttaccatctgttaatagactttactctgtcttttttgtcttcggtttattgtactgagtgccgccaaaacaacttttgttctcttcctgcctacctgcagctggttctataggaatgtagggagccagaggccagtattgatttcagcccttagcacaaaggaaatcagatgcctgcttccagcatttgttagtgttgagtagatgttcttgccctagaagaattacagcctcaaacagaaacctgtttcatggagctttctcccctcagaagagttaatagttaagagctaagcactcttaaacacctaagtctcaaatgctaaaaatttatttttcttgtgtttagtcctctttcaagacatctttctaagcctttcagtaatcaacattaaaagatctccctttcttcagagttatagcacagctttgcccagtagaggctaccaaggacagcttagcagccctttgattgctgggctgggcagatggccttcaagttaagatcaaatgccgggaaaatcagcctacatgggagcacccattttaaacctggagagaaccatgatgttttcttcttcaaataacaatctagttttttttcccccagtactaaaattgtattgtctttcagacaatataatttttatttaaaattggaacatactatcttcatgctttctaagctaaatcttcatttagatttcactcctcagtagatcccagagaagaagctatataggatccagattcaaatttaacagtgtcttctacttttttagttatgttttctatcaactcctgctgccttttcaaatacggatatttttcaggagactcttctacttgtccactgactgtattttttcctttttgatccgtagccctggttaaatggctgacatccttccgtggatgattcttggaggtagtctcagaattccaaagtgattgtctgtcttcttcttgtcttgatcctaatgcagacattcacctctattatttatttattttttttagacagagtctcgctctgtcaccaggctggagtgcagtggcacaatcttggcttactgtaccctccacctcctgggttcaagcgattctcctgcctcagcctctcgagtagctgggactacaggtgtgtgccaccatgcccagctaatttttgtatttttggtagagatggggttttaccatgtttgccaggatggtctcgatttcctgaccttgtgatctgcccaccttggcctcccaaagtgctggaattacaggcatgagccaccgtgcctggccacctctattaaatttttgtggacaaaaataaaattgtcattatttgtttgctctcatggagcactttcagtaatacaattttttttaaattccagttgccctctttgttgctctgtcctctgtaatacctgactttgctaaagacttgaggggtggtttcagaggagggtcaggtgatgggaaggcaggatgagaaaagccctggacttgcatgtttgagaaggcttccaaccacatcttcactcagactcttggaattcctgtccccaaaacaagcttctgttttttgctcacaatgctatatttctaaatttttcctgaattactgagaagcagtcattagctttgttaagtttggtttggggacattgttggtatcaaaaatcgaagtcttattcatttgatgtaggccatgaatcatcaataatttcatactggtgtatgatgaactgaccattaatagtttaagtgcttacaagctatgtttctgttcaaaaaaaaaatagtttggtataataaatgctataaaccaatacacatttctgacttgggggcagagacagactggctgatgttgtatagtttgtagccctggagtaagaagttgacattaatttcggcctatatgtggaaaagacctataacattgggtgaactgagccagctggccatagaacacaagaacatattccaggaaataaatatagctggagggttggaaatgctgttattactgagagagaaaacaggtgagttgggattgagaactcctgattttcatccctggtttagattcttggccaaagtagtggtagagttaatctttgcttgtggaaagcattaactatgttgcagattcagttgtgttacattattgtgggttctataacaacatattcctcatggacactttaccagagttgctcacacctttttcaatttctcatcccttttggaggaatgaacatgagacttaactgcctttaagcctaaaacggacatgctttccaatgacaagagattttctaaagagaagtcttggagcacatctgttaatacctgagcatctactctgagcagtgcagttttattcaatactggagagagggtgatttctttttttttgagacggagtcttgctctgtctcccaggctggagtgcagtggcgcaatctcggctcactgcaagctccacctcccgggttcacgccattctcctgcctcagcctcccgaggagctgggactacaggcgccggccaccacgcccggctaattttttgtatttttagtagagacggggtttcaccttgttagccaggatggtctcaatctcctgacctcatgatccacccacctcggcctcccagagtgctgggattacaggcgtgagccaccgccgggccgagagggtgatttctaagcagagaattgtatcagttatgtggaaacctttgccagaaatacatataccttgtatattaaatctgagtctcagatttaatcatcgaagcgtagctgggttaagaaacagtctgatcgtaaggatgttgtcgattctgacccatggatgaccacaagaaaaagatatttatttctgcctggataattgagagttgactaactttggaagtcagaattcccaggaattagagtaactgctctggaaagttaaagtgtgaagttttttagatagtttcataaaaacaattctggtttctttttgcttgtgctgactttcttggattttaatctacctcatcttgtctttttagagttacttcaacttgtcactttaacattgtgcttgactttggttgttttctaagatggaatttttcctgttcattgacagcttgttctcttgccttttcattctgatcctcatttcatctaacatcatctcatattgctcctctgtcaagagaaatgttttaaaatagtttaaagtcttgttttatgggaagaaagtgatcctccaatgctatttgtttctgaggtcagtaagagaaggagttaaaacaaggcagtggggaagggaatgaatcctgcactggaggcaaaagctgacaaggaaagagccattaattaagacaatttcaaagtcaactgattgtgatcattaatgtcacaatagatcaaaacctaattatcacagcctaggtaagagccatcagtattaatcggaaaatctaataggaaactattatcaagaaattaggccaaattgaatgcagtgaactttttatcttggcattctctatttttttgtgatgtcccctggcattggcaggtgtgaccctaacagtcgattcaaggccaagtggtcagtttgtcagccttttttaagggatttctttttatttttaggaattccaaacagagttaacctaaactgtcattgccaaaagatcagtcttaaactttcttagcacctgtacctgtttaatgtgatcagctatcagtgaggaaaaaaaaaaaaatctatttaggtcttggaatggttcctgtacctagagtatccatattga

SEQ ID NO: 72415 - DNA, 8098 bp, Homo sapiens
cagggaaggatccgttttggcgggcggttggcgttgcgcagaaggcggcggcggtggtggcttgtggtgcggcctcaccatacaggaacagggcagacgttagcgtgagtgatcactctcaatcccggggacctggtggccttagtctttcaggtggaacggtgtgcgacatgggaaagaaaaccaagcggacagctgacagttcttcttcagaggatgaggaggagtatgttgtggagaaggtgctagacaggcgcgtggttaagggacaagtggaatatctactgaagtggaaaggcttttctgaggagcacaatacttgggaacctgagaaaaacttggattgccctgagctaatttctgaatttatgaaaaagtataagaagatgaaggagggtgaaaataataaacccagggagaagtcagaaagtaacaagaggaaatccaatttctcaaacagtgccgatgacatcaaatctaaaaaaaagagagagcagagcaatgatatcgctcggggctttgagagaggactggaaccagaaaagatcattggggcaacagattcctgtggtgatttaatgttcctaatgaaatggaaagacacagatgaagctgacctggttcttgcaaaagaagctaatgtgaaatgtccacaaattgtgatagcattttatgaagagagactgacatggcatgcatatcctgaggatgcggaaaacaaagagaaagaaacagcaaagagctaaaggaggggatggtctctgtcatttctctttgtacataatacattcacctccctgcctcctctcctttctacccacccctttctatcctaaacacatccataaaaaatgtgcttatcactgtgctccacaggagaaatgttggtattggttctcttgtaacataactgatggtctgattaatgataagtgtctctctgtgaagaccaggcatttacatactgagtgtaatacccacaatttttttttcctttgccctgatctcttccttctgcttccctgtgacctcaagatgagtttcaactttttaatcaccttagagtcttgatcttttcagggttggtcgctttttaggttgggggattttgttacaatgatgttgaattttggtttcttgctttggttcttagaacatgttgctgactagctggcctttgttctgacatgttgagatggaaaggatgttgcccatctgttaaaaagccaatagcaactgcctacctgttggggctttcccaaccttgttcagctctacccaggagaatacagggtttctggtgtggtcttctgggccaccctctgttgttcatcctcactcatcctcccagaattactccatcctttggaagatttgaaattttacactgaaatctgtcaagacactctttttagccccaggactttcggtattgcttttagcactccccacttctgcttctgtaaagtgatatcaatttgtgataaaatgacaagattattaactgtgcagatttgtagctatagtacatgaggatgatggggtagggtacaattgtctttattatcatatatggtatgtatgtatgatttctttccattcctcatatttagactgtatatttatgtaggtgtgagtgattgcctggtgcttgcttgtgccaaggtgctaggcaccctccaaccctgccaacttttgtggcctcccaaagcattcctgttaccaaagaggcttcaaacctgaccctcacttctcagtggacccgagtttcccttccatgccattattttcagtggggaagttttagaggtgagctgttggccacaatatcaattttaagtgttcatagcagttatgtctcctgcattcttggctcctggatttaccaccaagagtccccaaaatattaatgctcttccctttttctaccctcaaacttatagttgtatcttattttttaaaatgaattttcatggccaggcacagtggctaccgcctgtaatcccagcactttgggaggctgagggcaggagaattgcttgaagccagaagtttgagaccagcctgggcaatgtagtgagaccccctgtctctaaaaaatataaataaaaataaaggcatgttcctgaaagactgtcaccttggaaagtgacaggccctggcattagcatgttgacacacccttttcttcttactcagcaaaatacttcgttttggtttcttcttgtgttgctattgagaaatttgtctgatcatatccttctgcctttgtcccccaagaaatgccctactttatccttttctttttgtagttgaggagggctagagaatcacaattaaaagtaaggaaatagcagggttttgaggatccttgtcccagccccaaagctgaggaaataagaataaatgcttaatatagccttaattctagagcgcaccagccatgaggctgcttttcttgttgtttttgatttttaaaacatacagctgtctggccaggagcatctaccatttctagattattcagagtaatgaggggaatggatggattgctccagtccacagatgagccacataatatgcaaatcatatacccattcatagcatttgttaacattgcttccctgctcagctgctgattgaattctgtgtgcttatataaattatgtcaaaaattatactgcataattgaggtgacagctgttgctgcagtgacatgacagactggaacaatgaagcttttggtttaagtcagccaggaaaatccttctgaatggtaatgtgattgggcaagagctcataaaccatacctcaagtgggtgggagttttatctctatattccttctctctctgaaggaattaaaggcctagatcaagtgctggataattgacaattgcttgtacttaatctgatcggtatctaaaagaaggaaaggatggtcaggaaacatttatcataaatgtagccaaggatatcaattagggtagacaagaataggacaaaaataggccagagctcctgaggaggtgatatgggtctcttgatttgcagaaaatgacagcctatccaagtggcccagtgtatgcctcccagtagcagtgggcatgtaaactgcagcgaccttatttttaaaaccaaaaacctagtatgtggacaaagaacatgacaatatttggtactgagattggttctgagaaacctggggcatgtggctgctgtggttataggtaatatttaagacattcataaaaatctgatattcttttaccgaaataaccccagtatcatctactacttaccatctgttaatagactttactctgtcttttttgtcttcggtttattgtactgagtgccgccaaaacaacttttgttctcttcctgcctacctgcagctggttctataggaatgtagggagccagaggccagtattgatttcagcccttagcacaaaggaaatcagatgcctgcttccagcatttgttagtgttgagtagatgttcttgccctagaagaattacagcctcaaacagaaacctgtttcatggagctttctcccctcagaagagttaatagttaagagctaagcactcttaaacacctaagtctcaaatgctaaaaatttatttttcttgtgtttagtcctctttcaagacatctttctaagcctttcagtaatcaacattaaaagatctccctttcttcagagttatagcacagctttgcccagtagaggctaccaaggacagcttagcagccctttgattgctgggctgggcagatggccttcaagttaagatcaaatgccgggaaaatcagcctacatgggagcacccattttaaacctggagagaaccatgatgttttcttcttcaaataacaatctagttttttttcccccagtactaaaattgtattgtctttcagacaatataatttttatttaaaattggaacatactatcttcatgctttctaagctaaatcttcatttagatttcactcctcagtagatcccagagaagaagctatataggatccagattcaaatttaacagtgtcttctacttttttagttatgttttctatcaactcctgctgccttttcaaatacggatatttttcaggagactcttctacttgtccactgactgtattttttcctttttgatccgtagccctggttaaatggctgacatccttccgtggatgattcttggaggtagtctcagaattccaaagtgattgtctgtcttcttcttgtcttgatcctaatgcagacattcacctctattatttatttattttttttagacagagtctcgctctgtcaccaggctggagtgcagtggcacaatcttggcttactgtaccctccacctcctgggttcaagcgattctcctgcctcagcctctcgagtagctgggactacaggtgtgtgccaccatgcccagctaatttttgtatttttggtagagatggggttttaccatgtttgccaggatggtctcgatttcctgaccttgtgatctgcccaccttggcctcccaaagtgctggaattacaggcatgagccaccgtgcctggccacctctattaaatttttgtggacaaaaataaaattgtcattatttgtttgctctcatggagcactttcagtaatacaattttttttaaattccagttgccctctttgttgctctgtcctctgtaatacctgactttgctaaagacttgaggggtggtttcagaggagggtcaggtgatgggaaggcaggatgagaaaagccctggacttgcatgtttgagaaggcttccaaccacatcttcactcagactcttggaattcctgtccccaaaacaagcttctgttttttgctcacaatgctatatttctaaatttttcctgaattactgagaagcagtcattagctttgttaagtttggtttggggacattgttggtatcaaaaatcgaagtcttattcatttgatgtaggccatgaatcatcaataactggttgctggaaagcttgactaccatccactggggtgctattttgagaaggatttttgggtatctttatagtctgcaattagttgatgattgctttctagtttatcaactgcatttatatttgcttttctgttcatggaaaatcctttatttgctggggttttttgtttgtttgtttgtttttcccacttacagcaagtaaaagtggtctgaggttatccttgtttttcttcgcggtttgccatgtgtgaaagtagatttcctgctattgatatattctcattatagacagaatagtggagaacagtgttgccatggacaaaatccagttttggtccactctggggagcatttggacctgtggtgcttctaacaattaaaagtctagatggtccttgactgtcccccagccatactgcatactactttgtgcattctactttgtgtcattaatgaaagattggttctgtccctgtaacttaggcatttattattcttaactcttcattcctgttctgtagccacccagcagtccattttccctatgttcaggccaaaccacagggcattggggaaggtttttgggattttcttattgagattttgttgaatctgtagtttaccccagctttcctaaggtacagtgaggggttggagggatctgtgtttggcccggggagcaattgtctctaccttaaggttcagttttgagggcataaaatactactttgcaatgtcatgagaacaccattagatctgaaatgtggaaatggtttctcacaatttaaaggaaaaacccactttgcacccatgatcccatcattttggttgagattttagaataaaaaatatagtgttgagatccgtacttttgtaatcagaccaccaagcatgcctgtggcaaggcagagaggaaaggtctggagccagtgtattgcagtttcatgctacctttacctgctaatcataaaaattatgttttcaaaagtagatgatactagccttacacccaaaaacatgttctgaattagatgccccctcacccaatttttattaagctttctaaattccagccacattgctgtacatcaacattggtttcattcaacagacatttttttggcctgaagatacaaggttcagaaagaggccatccctgccctcaaataactttcatactggtgtatgatgaactgaccattaatagtttaagtgcttacaagctatgtttctgttcaaaaaaaaaatagtttggtataataaatgctataaaccaatacacatttctgacttgggggcagagacagactggctgatgttgtatagtttgtagccctggagtaagaagttgacattaatttcggcctatatgtggaaaagacctataacattgggtgaactgagccagctggccatagaacacaagaacatattccaggaaataaatatagctggagggttggaaatgctgttattactgagagagaaaacaggtgagttgggattgagaactcctgattttcatccctggtttagattcttggccaaagtagtggtagagttaatctttgcttgtggaaagcattaactatgttgcagattcagttgtgttacattattgtgggttctataacaacatattcctcatggacactttaccagagttgctcacacctttttcaatttctcatcccttttggaggaatgaacatgagacttaactgcctttaagcctaaaacggacatgctttccaatgacaagagattttctaaagagaagtcttggagcacatctgttaatacctgagcatctactctgtctcaagaaaaaaaaaacaaaaacaaaaacagaactctgcctcatagcgtcttttaagttatacactggacctatcctttcctcactgacagacattttaaaaattttttggtaaggcctagttcatataaaatgtaatccaagccaaaagttaacaagaataaggggaggaaaggggactccaatagcagagaaaggtatttacctgggatatacactgcaagaaaatcaaagctataagaaacgtccatgaatagtagccataaggcatcagagtgataaaattcctgtccctaggagggaatattggagtttgccagagaaacagaatgagagagacagagaggtttattgtaggaattggctcatatgattacggaggctgagaagacccacgatctgccatctgcaagctggagaatcaggaaagctggaggtgtaattcagtcaagtccaatggccagagaagcaagtgtactgatatccaagagcaggagaaaatagatgtcccagaacaagcagagaggctgattttgtccttcctctgcctttttgtttcatatggggcactgaatggactgatgcccatccacattagtgagggtggatcttctttactcagtctaccagtagaaatgtcaatgacttccagaaacaccctcaccaacacacgtggaaataatgttttaccaggtatctgggcatcccttggttcactcaagttgacacaaaattaaccatcacagaaggagactggccttactctgaaattaggaaactaaagaagtgaccagaatggagactaggtagagacaactagttctctaccaaacatgtacagttattcgttggtatctgaaggggattggttccaggaactctcagggataccaaaatctgcaggtgctcaagtcatttatataaaatattacagtatttgcatataacctttgcacatcttccatatactttaaatcatctctacattacttataataatgaatgtgtaaatgctatgaaaatagttactacactattgtttatttgtatttttattgaattgttttggggtggggggcagctgtatctttcttagtaatagaacccctggttttagctgggcacatgactgccctcaataaagattaaagtaccccagccttccttgagattgtggccatgtgactgaactttagacagtgagatataagcagatatcttctgtggcagtgttaggaaactattaaagacagtaagaac

SEQ ID NO: 72416 - DNA, 8222 bp, Homo sapiens
ctgggaggggaggcccctcctgttagcccagagggaaagaaagaactggggcgatccgggacctggtggccttagtctttcaggtggaacggtgtgcgacatgggaaagaaaaccaagcggacagctgacagttcttcttcagaggatgaggaggagtatgttgtggagaaggtgctagacaggcgcgtggttaagggacaagtggaatatctactgaagtggaaaggcttttctgaggagcacaatacttgggaacctgagaaaaacttggattgccctgagctaatttctgaatttatgaaaaagtataagaagatgaaggagggtgaaaataataaacccagggagaagtcagaaagtaacaagaggaaatccaatttctcaaacagtgccgatgacatcaaatctaaaaaaaagagagagcagagcaatgatatcgctcggggctttgagagaggactggaaccagaaaagatcattggggcaacagattcctgtggtgatttaatgttcctaatgaaatggaaagacacagatgaagctgacctggttcttgcaaaagaagctaatgtgaaatgtccacaaattgtgatagcattttatgaagagagactgacatggcatgcatatcctgaggatgcggaaaacaaagagaaagaaacagcaaagagctaaaggaggggatggtctctgtcatttctctttgtacataatacattcacctccctgcctcctctcctttctacccacccctttctatcctaaacacatccataaaaaatgtgcttatcactgtgctccacaggagaaatgttggtattggttctcttgtaacataactgatggtctgattaatgataagtgtctctctgtgaagaccaggcatttacatactgagtgtaatacccacaatttttttttcctttgccctgatctcttccttctgcttccctgtgacctcaagatgagtttcaactttttaatcaccttagagtcttgatcttttcagggttggtcgctttttaggttgggggattttgttacaatgatgttgaattttggtttcttgctttggttcttagaacatgttgctgactagctggcctttgttctgacatgttgagatggaaaggatgttgcccatctgttaaaaagccaatagcaactgcctacctgttggggctttcccaaccttgttcagctctacccaggagaatacagggtttctggtgtggtcttctgggccaccctctgttgttcatcctcactcatcctcccagaattactccatcctttggaagatttgaaattttacactgaaatctgtcaagacactctttttagccccaggactttcggtattgcttttagcactccccacttctgcttctgtaaagtgatatcaatttgtgataaaatgacaagattattaactgtgcagatttgtagctatagtacatgaggatgatggggtagggtacaattgtctttattatcatatatggtatgtatgtatgatttctttccattcctcatatttagactgtatatttatgtaggtgtgagtgattgcctggtgcttgcttgtgccaaggtgctaggcaccctccaaccctgccaacttttgtggcctcccaaagcattcctgttaccaaagaggcttcaaacctgaccctcacttctcagtggacccgagtttcccttccatgccattattttcagtggggaagttttagaggtgagctgttggccacaatatcaattttaagtgttcatagcagttatgtctcctgcattcttggctcctggatttaccaccaagagtccccaaaatattaatgctcttccctttttctaccctcaaacttatagttgtatcttattttttaaaatgaattttcatggccaggcacagtggctaccgcctgtaatcccagcactttgggaggctgagggcaggagaattgcttgaagccagaagtttgagaccagcctgggcaatgtagtgagaccccctgtctctaaaaaatataaataaaaataaaggcatgttcctgaaagactgtcaccttggaaagtgacaggccctggcattagcatgttgacacacccttttcttcttactcagcaaaatacttcgttttggtttcttcttgtgttgctattgagaaatttgtctgatcatatccttctgcctttgtcccccaagaaatgccctactttatccttttctttttgtagttgaggagggctagagaatcacaattaaaagtaaggaaatagcagggttttgaggatccttgtcccagccccaaagctgaggaaataagaataaatgcttaatatagccttaattctagagcgcaccagccatgaggctgcttttcttgttgtttttgatttttaaaacatacagctgtctggccaggagcatctaccatttctagattattcagagtaatgaggggaatggatggattgctccagtccacagatgagccacataatatgcaaatcatatacccattcatagcatttgttaacattgcttccctgctcagctgctgattgaattctgtgtgcttatataaattatgtcaaaaattatactgcataattgaggtgacagctgttgctgcagtgacatgacagactggaacaatgaagcttttggtttaagtcagccaggaaaatccttctgaatggtaatgtgattgggcaagagctcataaaccatacctcaagtgggtgggagttttatctctatattccttctctctctgaaggaattaaaggcctagatcaagtgctggataattgacaattgcttgtacttaatctgatcggtatctaaaagaaggaaaggatggtcaggaaacatttatcataaatgtagccaaggatatcaattagggtagacaagaataggacaaaaataggccagagctcctgaggaggtgatatgggtctcttgatttgcagaaaatgacagcctatccaagtggcccagtgtatgcctcccagtagcagtgggcatgtaaactgcagcgaccttatttttaaaaccaaaaacctagtatgtggacaaagaacatgacaatatttggtactgagattggttctgagaaacctggggcatgtggctgctgtggttataggtaatatttaagacattcataaaaatctgatattcttttaccgaaataaccccagtatcatctactacttaccatctgttaatagactttactctgtcttttttgtcttcggtttattgtactgagtgccgccaaaacaacttttgttctcttcctgcctacctgcagctggttctataggaatgtagggagccagaggccagtattgatttcagcccttagcacaaaggaaatcagatgcctgcttccagcatttgttagtgttgagtagatgttcttgccctagaagaattacagcctcaaacagaaacctgtttcatggagctttctcccctcagaagagttaatagttaagagctaagcactcttaaacacctaagtctcaaatgctaaaaatttatttttcttgtgtttagtcctctttcaagacatctttctaagcctttcagtaatcaacattaaaagatctccctttcttcagagttatagcacagctttgcccagtagaggctaccaaggacagcttagcagccctttgattgctgggctgggcagatggccttcaagttaagatcaaatgccgggaaaatcagcctacatgggagcacccattttaaacctggagagaaccatgatgttttcttcttcaaataacaatctagttttttttcccccagtactaaaattgtattgtctttcagacaatataatttttatttaaaattggaacatactatcttcatgctttctaagctaaatcttcatttagatttcactcctcagtagatcccagagaagaagctatataggatccagattcaaatttaacagtgtcttctacttttttagttatgttttctatcaactcctgctgccttttcaaatacggatatttttcaggagactcttctacttgtccactgactgtattttttcctttttgatccgtagccctggttaaatggctgacatccttccgtggatgattcttggaggtagtctcagaattccaaagtgattgtctgtcttcttcttgtcttgatcctaatgcagacattcacctctattatttatttattttttttagacagagtctcgctctgtcaccaggctggagtgcagtggcacaatcttggcttactgtaccctccacctcctgggttcaagcgattctcctgcctcagcctctcgagtagctgggactacaggtgtgtgccaccatgcccagctaatttttgtatttttggtagagatggggttttaccatgtttgccaggatggtctcgatttcctgaccttgtgatctgcccaccttggcctcccaaagtgctggaattacaggcatgagccaccgtgcctggccacctctattaaatttttgtggacaaaaataaaattgtcattatttgtttgctctcatggagcactttcagtaatacaattttttttaaattccagttgccctctttgttgctctgtcctctgtaatacctgactttgctaaagacttgaggggtggtttcagaggagggtcaggtgatgggaaggcaggatgagaaaagccctggacttgcatgtttgagaaggcttccaaccacatcttcactcagactcttggaattcctgtccccaaaacaagcttctgttttttgctcacaatgctatatttctaaatttttcctgaattactgagaagcagtcattagctttgttaagtttggtttggggacattgttggtatcaaaaatcgaagtcttattcatttgatgtaggccatgaatcatcaataactggttgctggaaagcttgactaccatccactggggtgctattttgagaaggatttttgggtatctttatagtctgcaattagttgatgattgctttctagtttatcaactgcatttatatttgcttttctgttcatggaaaatcctttatttgctggggttttttgtttgtttgtttgtttttcccacttacagcaagtaaaagtggtctgaggttatccttgtttttcttcgcggtttgccatgtgtgaaagtagatttcctgctattgatatattctcattatagacagaatagtggagaacagtgttgccatggacaaaatccagttttggtccactctggggagcatttggacctgtggtgcttctaacaattaaaagtctagatggtccttgactgtcccccagccatactgcatactactttgtgcattctactttgtgtcattaatgaaagattggttctgtccctgtaacttaggcatttattattcttaactcttcattcctgttctgtagccacccagcagtccattttccctatgttcaggccaaaccacagggcattggggaaggtttttgggattttcttattgagattttgttgaatctgtagtttaccccagctttcctaaggtacagtgaggggttggagggatctgtgtttggcccggggagcaattgtctctaccttaaggttcagttttgagggcataaaatactactttgcaatgtcatgagaacaccattagatctgaaatgtggaaatggtttctcacaatttaaaggaaaaacccactttgcacccatgatcccatcattttggttgagattttagaataaaaaatatagtgttgagatccgtacttttgtaatcagaccaccaagcatgcctgtggcaaggcagagaggaaaggtctggagccagtgtattgcagtttcatgctacctttacctgctaatcataaaaattatgttttcaaaagtagatgatactagccttacacccaaaaacatgttctgaattagatgccccctcacccaatttttattaagctttctaaattccagccacattgctgtacatcaacattggtttcattcaacagacatttttttggcctgaagatacaaggttcagaaagaggccatccctgccctcaaataactttcatactggtgtatgatgaactgaccattaatagtttaagtgcttacaagctatgtttctgttcaaaaaaaaaatagtttggtataataaatgctataaaccaatacacatttctgacttgggggcagagacagactggctgatgttgtatagtttgtagccctggagtaagaagttgacattaatttcggcctatatgtggaaaagacctataacattgggtgaactgagccagctggccatagaacacaagaacatattccaggaaataaatatagctggagggttggaaatgctgttattactgagagagaaaacaggtgagttgggattgagaactcctgattttcatccctggtttagattcttggccaaagtagtggtagagttaatctttgcttgtggaaagcattaactatgttgcagattcagttgtgttacattattgtgggttctataacaacatattcctcatggacactttaccagagttgctcacacctttttcaatttctcatcccttttggaggaatgaacatgagacttaactgcctttaagcctaaaacggacatgctttccaatgacaagagattttctaaagagaagtcttggagcacatctgttaatacctgagcatctactctgagcagtgcagttttattcaatactggagagagggtgatttctttttttttgagacggagtcttgctctgtctcccaggctggagtgcagtggcgcaatctcggctcactgcaagctccacctcccgggttcacgccattctcctgcctcagcctcccgaggagctgggactacaggcgccggccaccacgcccggctaattttttgtatttttagtagagacggggtttcaccttgttagccaggatggtctcaatctcctgacctcatgatccacccacctcggcctcccagagtgctgggattacaggcgtgagccaccgccgggccgagagggtgatttctaagcagagaattgtatcagttatgtggaaacctttgccagaaatacatataccttgtatattaaatctgagtctcagatttaatcatcgaagcgtagctgggttaagaaacagtctgatcgtaaggatgttgtcgattctgacccatggatgaccacaagaaaaagatatttatttctgcctggataattgagagttgactaactttggaagtcagaattcccaggaattagagtaactgctctggaaagttaaagtgtgaagttttttagatagtttcataaaaacaattctggtttctttttgcttgtgctgactttcttggattttaatctacctcatcttgtctttttagagttacttcaacttgtcactttaacattgtgcttgactttggttgttttctaagatggaatttttcctgttcattgacagcttgttctcttgccttttcattctgatcctcatttcatctaacatcatctcatattgctcctctgtcaagagaaatgttttaaaatagtttaaagtcttgttttatgggaagaaagtgatcctccaatgctatttgtttctgaggtcagtaagagaaggagttaaaacaaggcagtggggaagggaatgaatcctgcactggaggcaaaagctgacaaggaaagagccattaattaagacaatttcaaagtcaactgattgtgatcattaatgtcacaatagatcaaaacctaattatcacagcctaggtaagagccatcagtattaatcggaaaatctaataggaaactattatcaagaaattaggccaaattgaatgcagtgaactttttatcttggcattctctatttttttgtgatgtcccctggcattggcaggtgtgaccctaacagtcgattcaaggccaagtggtcagtttgtcagccttttttaagggatttctttttatttttaggaattccaaacagagttaacctaaactgtcattgccaaaagatcagtcttaaactttcttagcacctgtacctgtttaatgtgatcagctatcagtgaggaaaaaaaaaaaaatctatttaggtcttggaatggttcctgtacctagagtatccatattga

SEQ ID NO: 72417 - DNA, 8461 bp, Homo sapiens
ctgggaggggaggcccctcctgttagcccagagggaaagaaagaactggggcgatccggtaggtaaaggagggaacccccattcattttctacctttggggctcctcttctgcatgaaggtataaagggagattttccttgtctctccctcaaaatgaagaacacatgtaaatccttgtttttcctggtgaggcaggggaggccatagccacaatgcttaactgcatgcatctaacatggggctggttttaaccccagcgctctgacctaaactgctcagctcccggaaattccaagggacctggtggccttagtctttcaggtggaacggtgtgcgacatgggaaagaaaaccaagcggacagctgacagttcttcttcagaggatgaggaggagtatgttgtggagaaggtgctagacaggcgcgtggttaagggacaagtggaatatctactgaagtggaaaggcttttctgaggagcacaatacttgggaacctgagaaaaacttggattgccctgagctaatttctgaatttatgaaaaagtataagaagatgaaggagggtgaaaataataaacccagggagaagtcagaaagtaacaagaggaaatccaatttctcaaacagtgccgatgacatcaaatctaaaaaaaagagagagcagagcaatgatatcgctcggggctttgagagaggactggaaccagaaaagatcattggggcaacagattcctgtggtgatttaatgttcctaatgaaatggaaagacacagatgaagctgacctggttcttgcaaaagaagctaatgtgaaatgtccacaaattgtgatagcattttatgaagagagactgacatggcatgcatatcctgaggatgcggaaaacaaagagaaagaaacagcaaagagctaaaggaggggatggtctctgtcatttctctttgtacataatacattcacctccctgcctcctctcctttctacccacccctttctatcctaaacacatccataaaaaatgtgcttatcactgtgctccacaggagaaatgttggtattggttctcttgtaacataactgatggtctgattaatgataagtgtctctctgtgaagaccaggcatttacatactgagtgtaatacccacaatttttttttcctttgccctgatctcttccttctgcttccctgtgacctcaagatgagtttcaactttttaatcaccttagagtcttgatcttttcagggttggtcgctttttaggttgggggattttgttacaatgatgttgaattttggtttcttgctttggttcttagaacatgttgctgactagctggcctttgttctgacatgttgagatggaaaggatgttgcccatctgttaaaaagccaatagcaactgcctacctgttggggctttcccaaccttgttcagctctacccaggagaatacagggtttctggtgtggtcttctgggccaccctctgttgttcatcctcactcatcctcccagaattactccatcctttggaagatttgaaattttacactgaaatctgtcaagacactctttttagccccaggactttcggtattgcttttagcactccccacttctgcttctgtaaagtgatatcaatttgtgataaaatgacaagattattaactgtgcagatttgtagctatagtacatgaggatgatggggtagggtacaattgtctttattatcatatatggtatgtatgtatgatttctttccattcctcatatttagactgtatatttatgtaggtgtgagtgattgcctggtgcttgcttgtgccaaggtgctaggcaccctccaaccctgccaacttttgtggcctcccaaagcattcctgttaccaaagaggcttcaaacctgaccctcacttctcagtggacccgagtttcccttccatgccattattttcagtggggaagttttagaggtgagctgttggccacaatatcaattttaagtgttcatagcagttatgtctcctgcattcttggctcctggatttaccaccaagagtccccaaaatattaatgctcttccctttttctaccctcaaacttatagttgtatcttattttttaaaatgaattttcatggccaggcacagtggctaccgcctgtaatcccagcactttgggaggctgagggcaggagaattgcttgaagccagaagtttgagaccagcctgggcaatgtagtgagaccccctgtctctaaaaaatataaataaaaataaaggcatgttcctgaaagactgtcaccttggaaagtgacaggccctggcattagcatgttgacacacccttttcttcttactcagcaaaatacttcgttttggtttcttcttgtgttgctattgagaaatttgtctgatcatatccttctgcctttgtcccccaagaaatgccctactttatccttttctttttgtagttgaggagggctagagaatcacaattaaaagtaaggaaatagcagggttttgaggatccttgtcccagccccaaagctgaggaaataagaataaatgcttaatatagccttaattctagagcgcaccagccatgaggctgcttttcttgttgtttttgatttttaaaacatacagctgtctggccaggagcatctaccatttctagattattcagagtaatgaggggaatggatggattgctccagtccacagatgagccacataatatgcaaatcatatacccattcatagcatttgttaacattgcttccctgctcagctgctgattgaattctgtgtgcttatataaattatgtcaaaaattatactgcataattgaggtgacagctgttgctgcagtgacatgacagactggaacaatgaagcttttggtttaagtcagccaggaaaatccttctgaatggtaatgtgattgggcaagagctcataaaccatacctcaagtgggtgggagttttatctctatattccttctctctctgaaggaattaaaggcctagatcaagtgctggataattgacaattgcttgtacttaatctgatcggtatctaaaagaaggaaaggatggtcaggaaacatttatcataaatgtagccaaggatatcaattagggtagacaagaataggacaaaaataggccagagctcctgaggaggtgatatgggtctcttgatttgcagaaaatgacagcctatccaagtggcccagtgtatgcctcccagtagcagtgggcatgtaaactgcagcgaccttatttttaaaaccaaaaacctagtatgtggacaaagaacatgacaatatttggtactgagattggttctgagaaacctggggcatgtggctgctgtggttataggtaatatttaagacattcataaaaatctgatattcttttaccgaaataaccccagtatcatctactacttaccatctgttaatagactttactctgtcttttttgtcttcggtttattgtactgagtgccgccaaaacaacttttgttctcttcctgcctacctgcagctggttctataggaatgtagggagccagaggccagtattgatttcagcccttagcacaaaggaaatcagatgcctgcttccagcatttgttagtgttgagtagatgttcttgccctagaagaattacagcctcaaacagaaacctgtttcatggagctttctcccctcagaagagttaatagttaagagctaagcactcttaaacacctaagtctcaaatgctaaaaatttatttttcttgtgtttagtcctctttcaagacatctttctaagcctttcagtaatcaacattaaaagatctccctttcttcagagttatagcacagctttgcccagtagaggctaccaaggacagcttagcagccctttgattgctgggctgggcagatggccttcaagttaagatcaaatgccgggaaaatcagcctacatgggagcacccattttaaacctggagagaaccatgatgttttcttcttcaaataacaatctagttttttttcccccagtactaaaattgtattgtctttcagacaatataatttttatttaaaattggaacatactatcttcatgctttctaagctaaatcttcatttagatttcactcctcagtagatcccagagaagaagctatataggatccagattcaaatttaacagtgtcttctacttttttagttatgttttctatcaactcctgctgccttttcaaatacggatatttttcaggagactcttctacttgtccactgactgtattttttcctttttgatccgtagccctggttaaatggctgacatccttccgtggatgattcttggaggtagtctcagaattccaaagtgattgtctgtcttcttcttgtcttgatcctaatgcagacattcacctctattatttatttattttttttagacagagtctcgctctgtcaccaggctggagtgcagtggcacaatcttggcttactgtaccctccacctcctgggttcaagcgattctcctgcctcagcctctcgagtagctgggactacaggtgtgtgccaccatgcccagctaatttttgtatttttggtagagatggggttttaccatgtttgccaggatggtctcgatttcctgaccttgtgatctgcccaccttggcctcccaaagtgctggaattacaggcatgagccaccgtgcctggccacctctattaaatttttgtggacaaaaataaaattgtcattatttgtttgctctcatggagcactttcagtaatacaattttttttaaattccagttgccctctttgttgctctgtcctctgtaatacctgactttgctaaagacttgaggggtggtttcagaggagggtcaggtgatgggaaggcaggatgagaaaagccctggacttgcatgtttgagaaggcttccaaccacatcttcactcagactcttggaattcctgtccccaaaacaagcttctgttttttgctcacaatgctatatttctaaatttttcctgaattactgagaagcagtcattagctttgttaagtttggtttggggacattgttggtatcaaaaatcgaagtcttattcatttgatgtaggccatgaatcatcaataactggttgctggaaagcttgactaccatccactggggtgctattttgagaaggatttttgggtatctttatagtctgcaattagttgatgattgctttctagtttatcaactgcatttatatttgcttttctgttcatggaaaatcctttatttgctggggttttttgtttgtttgtttgtttttcccacttacagcaagtaaaagtggtctgaggttatccttgtttttcttcgcggtttgccatgtgtgaaagtagatttcctgctattgatatattctcattatagacagaatagtggagaacagtgttgccatggacaaaatccagttttggtccactctggggagcatttggacctgtggtgcttctaacaattaaaagtctagatggtccttgactgtcccccagccatactgcatactactttgtgcattctactttgtgtcattaatgaaagattggttctgtccctgtaacttaggcatttattattcttaactcttcattcctgttctgtagccacccagcagtccattttccctatgttcaggccaaaccacagggcattggggaaggtttttgggattttcttattgagattttgttgaatctgtagtttaccccagctttcctaaggtacagtgaggggttggagggatctgtgtttggcccggggagcaattgtctctaccttaaggttcagttttgagggcataaaatactactttgcaatgtcatgagaacaccattagatctgaaatgtggaaatggtttctcacaatttaaaggaaaaacccactttgcacccatgatcccatcattttggttgagattttagaataaaaaatatagtgttgagatccgtacttttgtaatcagaccaccaagcatgcctgtggcaaggcagagaggaaaggtctggagccagtgtattgcagtttcatgctacctttacctgctaatcataaaaattatgttttcaaaagtagatgatactagccttacacccaaaaacatgttctgaattagatgccccctcacccaatttttattaagctttctaaattccagccacattgctgtacatcaacattggtttcattcaacagacatttttttggcctgaagatacaaggttcagaaagaggccatccctgccctcaaataactttcatactggtgtatgatgaactgaccattaatagtttaagtgcttacaagctatgtttctgttcaaaaaaaaaatagtttggtataataaatgctataaaccaatacacatttctgacttgggggcagagacagactggctgatgttgtatagtttgtagccctggagtaagaagttgacattaatttcggcctatatgtggaaaagacctataacattgggtgaactgagccagctggccatagaacacaagaacatattccaggaaataaatatagctggagggttggaaatgctgttattactgagagagaaaacaggtgagttgggattgagaactcctgattttcatccctggtttagattcttggccaaagtagtggtagagttaatctttgcttgtggaaagcattaactatgttgcagattcagttgtgttacattattgtgggttctataacaacatattcctcatggacactttaccagagttgctcacacctttttcaatttctcatcccttttggaggaatgaacatgagacttaactgcctttaagcctaaaacggacatgctttccaatgacaagagattttctaaagagaagtcttggagcacatctgttaatacctgagcatctactctgagcagtgcagttttattcaatactggagagagggtgatttctttttttttgagacggagtcttgctctgtctcccaggctggagtgcagtggcgcaatctcggctcactgcaagctccacctcccgggttcacgccattctcctgcctcagcctcccgaggagctgggactacaggcgccggccaccacgcccggctaattttttgtatttttagtagagacggggtttcaccttgttagccaggatggtctcaatctcctgacctcatgatccacccacctcggcctcccagagtgctgggattacaggcgtgagccaccgccgggccgagagggtgatttctaagcagagaattgtatcagttatgtggaaacctttgccagaaatacatataccttgtatattaaatctgagtctcagatttaatcatcgaagcgtagctgggttaagaaacagtctgatcgtaaggatgttgtcgattctgacccatggatgaccacaagaaaaagatatttatttctgcctggataattgagagttgactaactttggaagtcagaattcccaggaattagagtaactgctctggaaagttaaagtgtgaagttttttagatagtttcataaaaacaattctggtttctttttgcttgtgctgactttcttggattttaatctacctcatcttgtctttttagagttacttcaacttgtcactttaacattgtgcttgactttggttgttttctaagatggaatttttcctgttcattgacagcttgttctcttgccttttcattctgatcctcatttcatctaacatcatctcatattgctcctctgtcaagagaaatgttttaaaatagtttaaagtcttgttttatgggaagaaagtgatcctccaatgctatttgtttctgaggtcagtaagagaaggagttaaaacaaggcagtggggaagggaatgaatcctgcactggaggcaaaagctgacaaggaaagagccattaattaagacaatttcaaagtcaactgattgtgatcattaatgtcacaatagatcaaaacctaattatcacagcctaggtaagagccatcagtattaatcggaaaatctaataggaaactattatcaagaaattaggccaaattgaatgcagtgaactttttatcttggcattctctatttttttgtgatgtcccctggcattggcaggtgtgaccctaacagtcgattcaaggccaagtggtcagtttgtcagccttttttaagggatttctttttatttttaggaattccaaacagagttaacctaaactgtcattgccaaaagatcagtcttaaactttcttagcacctgtacctgtttaatgtgatcagctatcagtgaggaaaaaaaaaaaaatctatttaggtcttggaatggttcctgtacctagagtatccatattga

SEQ ID NO: 72418 - DNA, 6709 bp, Homo sapiens
cagggaaggatccgttttggcgggcggttggcgttgcgcagaaggcggcggcggtggtggcttgtggtgcggcctcaccatacaggaacagggcagacgttagcgtgagtgatcactctcaatcccggggacctggtggccttagtctttcaggtggaacggtgtgcgacatgggaaagaaaaccaagcggacagctgacagttcttcttcagaggatgaggaggagtatgttgtggagaaggtgctagacaggcgcgtggttaagggacaagtggaatatctactgaagtggaaaggcttttctgaggagcacaatacttgggaacctgagaaaaacttggattgccctgagctaatttctgaatttatgaaaaagtataagaagatgaaggagggtgaaaataataaacccagggagaagtcagaaagtaacaagaggaaatccaatttctcaaacagtgccgatgacatcaaatctaaaaaaaagagagagcagagcaatgatatcgctcggggctttgagagaggactggaaccagaaaagatcattggggcaacagattcctgtggtgatttaatgttcctaatgaaatggaaagacacagatgaagctgacctggttcttgcaaaagaagctaatgtgaaatgtccacaaattgtgatagcattttatgaagagagactgacatggcatgcatatcctgaggatgcggaaaacaaagagaaagaaacagcaaagagctaaaggaggggatggtctctgtcatttctctttgtacataatacattcacctccctgcctcctctcctttctacccacccctttctatcctaaacacatccataaaaaatgtgcttatcactgtgctccacaggagaaatgttggtattggttctcttgtaacataactgatggtctgattaatgataagtgtctctctgtgaagaccaggcatttacatactgagtgtaatacccacaatttttttttcctttgccctgatctcttccttctgcttccctgtgacctcaagatgagtttcaactttttaatcaccttagagtcttgatcttttcagggttggtcgctttttaggttgggggattttgttacaatgatgttgaattttggtttcttgctttggttcttagaacatgttgctgactagctggcctttgttctgacatgttgagatggaaaggatgttgcccatctgttaaaaagccaatagcaactgcctacctgttggggctttcccaaccttgttcagctctacccaggagaatacagggtttctggtgtggtcttctgggccaccctctgttgttcatcctcactcatcctcccagaattactccatcctttggaagatttgaaattttacactgaaatctgtcaagacactctttttagccccaggactttcggtattgcttttagcactccccacttctgcttctgtaaagtgatatcaatttgtgataaaatgacaagattattaactgtgcagatttgtagctatagtacatgaggatgatggggtagggtacaattgtctttattatcatatatggtatgtatgtatgatttctttccattcctcatatttagactgtatatttatgtaggtgtgagtgattgcctggtgcttgcttgtgccaaggtgctaggcaccctccaaccctgccaacttttgtggcctcccaaagcattcctgttaccaaagaggcttcaaacctgaccctcacttctcagtggacccgagtttcccttccatgccattattttcagtggggaagttttagaggtgagctgttggccacaatatcaattttaagtgttcatagcagttatgtctcctgcattcttggctcctggatttaccaccaagagtccccaaaatattaatgctcttccctttttctaccctcaaacttatagttgtatcttattttttaaaatgaattttcatggccaggcacagtggctaccgcctgtaatcccagcactttgggaggctgagggcaggagaattgcttgaagccagaagtttgagaccagcctgggcaatgtagtgagaccccctgtctctaaaaaatataaataaaaataaaggcatgttcctgaaagactgtcaccttggaaagtgacaggccctggcattagcatgttgacacacccttttcttcttactcagcaaaatacttcgttttggtttcttcttgtgttgctattgagaaatttgtctgatcatatccttctgcctttgtcccccaagaaatgccctactttatccttttctttttgtagttgaggagggctagagaatcacaattaaaagtaaggaaatagcagggttttgaggatccttgtcccagccccaaagctgaggaaataagaataaatgcttaatatagccttaattctagagcgcaccagccatgaggctgcttttcttgttgtttttgatttttaaaacatacagctgtctggccaggagcatctaccatttctagattattcagagtaatgaggggaatggatggattgctccagtccacagatgagccacataatatgcaaatcatatacccattcatagcatttgttaacattgcttccctgctcagctgctgattgaattctgtgtgcttatataaattatgtcaaaaattatactgcataattgaggtgacagctgttgctgcagtgacatgacagactggaacaatgaagcttttggtttaagtcagccaggaaaatccttctgaatggtaatgtgattgggcaagagctcataaaccatacctcaagtgggtgggagttttatctctatattccttctctctctgaaggaattaaaggcctagatcaagtgctggataattgacaattgcttgtacttaatctgatcggtatctaaaagaaggaaaggatggtcaggaaacatttatcataaatgtagccaaggatatcaattagggtagacaagaataggacaaaaataggccagagctcctgaggaggtgatatgggtctcttgatttgcagaaaatgacagcctatccaagtggcccagtgtatgcctcccagtagcagtgggcatgtaaactgcagcgaccttatttttaaaaccaaaaacctagtatgtggacaaagaacatgacaatatttggtactgagattggttctgagaaacctggggcatgtggctgctgtggttataggtaatatttaagacattcataaaaatctgatattcttttaccgaaataaccccagtatcatctactacttaccatctgttaatagactttactctgtcttttttgtcttcggtttattgtactgagtgccgccaaaacaacttttgttctcttcctgcctacctgcagctggttctataggaatgtagggagccagaggccagtattgatttcagcccttagcacaaaggaaatcagatgcctgcttccagcatttgttagtgttgagtagatgttcttgccctagaagaattacagcctcaaacagaaacctgtttcatggagctttctcccctcagaagagttaatagttaagagctaagcactcttaaacacctaagtctcaaatgctaaaaatttatttttcttgtgtttagtcctctttcaagacatctttctaagcctttcagtaatcaacattaaaagatctccctttcttcagagttatagcacagctttgcccagtagaggctaccaaggacagcttagcagccctttgattgctgggctgggcagatggccttcaagttaagatcaaatgccgggaaaatcagcctacatgggagcacccattttaaacctggagagaaccatgatgttttcttcttcaaataacaatctagttttttttcccccagtactaaaattgtattgtctttcagacaatataatttttatttaaaattggaacatactatcttcatgctttctaagctaaatcttcatttagatttcactcctcagtagatcccagagaagaagctatataggatccagattcaaatttaacagtgtcttctacttttttagttatgttttctatcaactcctgctgccttttcaaatacggatatttttcaggagactcttctacttgtccactgactgtattttttcctttttgatccgtagccctggttaaatggctgacatccttccgtggatgattcttggaggtagtctcagaattccaaagtgattgtctgtcttcttcttgtcttgatcctaatgcagacattcacctctattatttatttattttttttagacagagtctcgctctgtcaccaggctggagtgcagtggcacaatcttggcttactgtaccctccacctcctgggttcaagcgattctcctgcctcagcctctcgagtagctgggactacaggtgtgtgccaccatgcccagctaatttttgtatttttggtagagatggggttttaccatgtttgccaggatggtctcgatttcctgaccttgtgatctgcccaccttggcctcccaaagtgctggaattacaggcatgagccaccgtgcctggccacctctattaaatttttgtggacaaaaataaaattgtcattatttgtttgctctcatggagcactttcagtaatacaattttttttaaattccagttgccctctttgttgctctgtcctctgtaatacctgactttgctaaagacttgaggggtggtttcagaggagggtcaggtgatgggaaggcaggatgagaaaagccctggacttgcatgtttgagaaggcttccaaccacatcttcactcagactcttggaattcctgtccccaaaacaagcttctgttttttgctcacaatgctatatttctaaatttttcctgaattactgagaagcagtcattagctttgttaagtttggtttggggacattgttggtatcaaaaatcgaagtcttattcatttgatgtaggccatgaatcatcaataactggttgctggaaagcttgactaccatccactggggtgctattttgagaaggatttttgggtatctttatagtctgcaattagttgatgattgctttctagtttatcaactgcatttatatttgcttttctgttcatggaaaatcctttatttgctggggttttttgtttgtttgtttgtttttcccacttacagcaagtaaaagtggtctgaggttatccttgtttttcttcgcggtttgccatgtgtgaaagtagatttcctgctattgatatattctcattatagacagaatagtggagaacagtgttgccatggacaaaatccagttttggtccactctggggagcatttggacctgtggtgcttctaacaattaaaagtctagatggtccttgactgtcccccagccatactgcatactactttgtgcattctactttgtgtcattaatgaaagattggttctgtccctgtaacttaggcatttattattcttaactcttcattcctgttctgtagccacccagcagtccattttccctatgttcaggccaaaccacagggcattggggaaggtttttgggattttcttattgagattttgttgaatctgtagtttaccccagctttcctaaggtacagtgaggggttggagggatctgtgtttggcccggggagcaattgtctctaccttaaggttcagttttgagggcataaaatactactttgcaatgtcatgagaacaccattagatctgaaatgtggaaatggtttctcacaatttaaaggaaaaacccactttgcacccatgatcccatcattttggttgagattttagaataaaaaatatagtgttgagatccgtacttttgtaatcagaccaccaagcatgcctgtggcaaggcagagaggaaaggtctggagccagtgtattgcagtttcatgctacctttacctgctaatcataaaaattatgttttcaaaagtagatgatactagccttacacccaaaaacatgttctgaattagatgccccctcacccaatttttattaagctttctaaattccagccacattgctgtacatcaacattggtttcattcaacagacatttttttggcctgaagatacaaggttcagaaagaggccatccctgccctcaaataactttcatactggtgtatgatgaactgaccattaatagtttaagtgcttacaagctatgtttctgttcaaaaaaaaaatagtttggtataataaatgctataaaccaatacacatttctgacttgggggcagagacagactggctgatgttgtatagtttgtagccctggagtaagaagttgacattaatttcggcctatatgtggaaaagacctataacattgggtgaactgagccagctggccatagaacacaagaacatattccaggaaataaatatagctggagggttggaaatgctgttattactgagagagaaaacaggtgagttgggattgagaactcctgattttcatccctggtttagattcttggccaaagtagtggtagagttaatctttgcttgtggaaagcattaactatgttgcagattcagttgtgttacattattgtgggttctgcaccaggcgtttcttcatgtgtttcctcttctcctactcggaaagtggggtccgagctga

SEQ ID NO: 72419 - DNA, 8255 bp, Homo sapiens
cagggaaggatccgttttggcgggcggttggcgttgcgcagaaggcggcggcggtggtggcttgtggtgcggcctcaccatacaggaacagggcagacgttagcgtgagtgatcactctcaatcccggggacctggtggccttagtctttcaggtggaacggtgtgcgacatgggaaagaaaaccaagcggacagctgacagttcttcttcagaggatgaggaggagtatgttgtggagaaggtgctagacaggcgcgtggttaagggacaagtggaatatctactgaagtggaaaggcttttctgaggagcacaatacttgggaacctgagaaaaacttggattgccctgagctaatttctgaatttatgaaaaagtataagaagatgaaggagggtgaaaataataaacccagggagaagtcagaaagtaacaagaggaaatccaatttctcaaacagtgccgatgacatcaaatctaaaaaaaagagagagtggaaccagaaaagatcattggggcaacagattcctgtggtgatttaatgttcctaatgaaatggaaagacacagatgaagctgacctggttcttgcaaaagaagctaatgtgaaatgtccacaaattgtgatagcattttatgaagagagactgacatggcatgcatatcctgaggatgcggaaaacaaagagaaagaaacagcaaagagctaaaggaggggatggtctctgtcatttctctttgtacataatacattcacctccctgcctcctctcctttctacccacccctttctatcctaaacacatccataaaaaatgtgcttatcactgtgctccacaggagaaatgttggtattggttctcttgtaacataactgatggtctgattaatgataagtgtctctctgtgaagaccaggcatttacatactgagtgtaatacccacaatttttttttcctttgccctgatctcttccttctgcttccctgtgacctcaagatgagtttcaactttttaatcaccttagagtcttgatcttttcagggttggtcgctttttaggttgggggattttgttacaatgatgttgaattttggtttcttgctttggttcttagaacatgttgctgactagctggcctttgttctgacatgttgagatggaaaggatgttgcccatctgttaaaaagccaatagcaactgcctacctgttggggctttcccaaccttgttcagctctacccaggagaatacagggtttctggtgtggtcttctgggccaccctctgttgttcatcctcactcatcctcccagaattactccatcctttggaagatttgaaattttacactgaaatctgtcaagacactctttttagccccaggactttcggtattgcttttagcactccccacttctgcttctgtaaagtgatatcaatttgtgataaaatgacaagattattaactgtgcagatttgtagctatagtacatgaggatgatggggtagggtacaattgtctttattatcatatatggtatgtatgtatgatttctttccattcctcatatttagactgtatatttatgtaggtgtgagtgattgcctggtgcttgcttgtgccaaggtgctaggcaccctccaaccctgccaacttttgtggcctcccaaagcattcctgttaccaaagaggcttcaaacctgaccctcacttctcagtggacccgagtttcccttccatgccattattttcagtggggaagttttagaggtgagctgttggccacaatatcaattttaagtgttcatagcagttatgtctcctgcattcttggctcctggatttaccaccaagagtccccaaaatattaatgctcttccctttttctaccctcaaacttatagttgtatcttattttttaaaatgaattttcatggccaggcacagtggctaccgcctgtaatcccagcactttgggaggctgagggcaggagaattgcttgaagccagaagtttgagaccagcctgggcaatgtagtgagaccccctgtctctaaaaaatataaataaaaataaaggcatgttcctgaaagactgtcaccttggaaagtgacaggccctggcattagcatgttgacacacccttttcttcttactcagcaaaatacttcgttttggtttcttcttgtgttgctattgagaaatttgtctgatcatatccttctgcctttgtcccccaagaaatgccctactttatccttttctttttgtagttgaggagggctagagaatcacaattaaaagtaaggaaatagcagggttttgaggatccttgtcccagccccaaagctgaggaaataagaataaatgcttaatatagccttaattctagagcgcaccagccatgaggctgcttttcttgttgtttttgatttttaaaacatacagctgtctggccaggagcatctaccatttctagattattcagagtaatgaggggaatggatggattgctccagtccacagatgagccacataatatgcaaatcatatacccattcatagcatttgttaacattgcttccctgctcagctgctgattgaattctgtgtgcttatataaattatgtcaaaaattatactgcataattgaggtgacagctgttgctgcagtgacatgacagactggaacaatgaagcttttggtttaagtcagccaggaaaatccttctgaatggtaatgtgattgggcaagagctcataaaccatacctcaagtgggtgggagttttatctctatattccttctctctctgaaggaattaaaggcctagatcaagtgctggataattgacaattgcttgtacttaatctgatcggtatctaaaagaaggaaaggatggtcaggaaacatttatcataaatgtagccaaggatatcaattagggtagacaagaataggacaaaaataggccagagctcctgaggaggtgatatgggtctcttgatttgcagaaaatgacagcctatccaagtggcccagtgtatgcctcccagtagcagtgggcatgtaaactgcagcgaccttatttttaaaaccaaaaacctagtatgtggacaaagaacatgacaatatttggtactgagattggttctgagaaacctggggcatgtggctgctgtggttataggtaatatttaagacattcataaaaatctgatattcttttaccgaaataaccccagtatcatctactacttaccatctgttaatagactttactctgtcttttttgtcttcggtttattgtactgagtgccgccaaaacaacttttgttctcttcctgcctacctgcagctggttctataggaatgtagggagccagaggccagtattgatttcagcccttagcacaaaggaaatcagatgcctgcttccagcatttgttagtgttgagtagatgttcttgccctagaagaattacagcctcaaacagaaacctgtttcatggagctttctcccctcagaagagttaatagttaagagctaagcactcttaaacacctaagtctcaaatgctaaaaatttatttttcttgtgtttagtcctctttcaagacatctttctaagcctttcagtaatcaacattaaaagatctccctttcttcagagttatagcacagctttgcccagtagaggctaccaaggacagcttagcagccctttgattgctgggctgggcagatggccttcaagttaagatcaaatgccgggaaaatcagcctacatgggagcacccattttaaacctggagagaaccatgatgttttcttcttcaaataacaatctagttttttttcccccagtactaaaattgtattgtctttcagacaatataatttttatttaaaattggaacatactatcttcatgctttctaagctaaatcttcatttagatttcactcctcagtagatcccagagaagaagctatataggatccagattcaaatttaacagtgtcttctacttttttagttatgttttctatcaactcctgctgccttttcaaatacggatatttttcaggagactcttctacttgtccactgactgtattttttcctttttgatccgtagccctggttaaatggctgacatccttccgtggatgattcttggaggtagtctcagaattccaaagtgattgtctgtcttcttcttgtcttgatcctaatgcagacattcacctctattatttatttattttttttagacagagtctcgctctgtcaccaggctggagtgcagtggcacaatcttggcttactgtaccctccacctcctgggttcaagcgattctcctgcctcagcctctcgagtagctgggactacaggtgtgtgccaccatgcccagctaatttttgtatttttggtagagatggggttttaccatgtttgccaggatggtctcgatttcctgaccttgtgatctgcccaccttggcctcccaaagtgctggaattacaggcatgagccaccgtgcctggccacctctattaaatttttgtggacaaaaataaaattgtcattatttgtttgctctcatggagcactttcagtaatacaattttttttaaattccagttgccctctttgttgctctgtcctctgtaatacctgactttgctaaagacttgaggggtggtttcagaggagggtcaggtgatgggaaggcaggatgagaaaagccctggacttgcatgtttgagaaggcttccaaccacatcttcactcagactcttggaattcctgtccccaaaacaagcttctgttttttgctcacaatgctatatttctaaatttttcctgaattactgagaagcagtcattagctttgttaagtttggtttggggacattgttggtatcaaaaatcgaagtcttattcatttgatgtaggccatgaatcatcaataactggttgctggaaagcttgactaccatccactggggtgctattttgagaaggatttttgggtatctttatagtctgcaattagttgatgattgctttctagtttatcaactgcatttatatttgcttttctgttcatggaaaatcctttatttgctggggttttttgtttgtttgtttgtttttcccacttacagcaagtaaaagtggtctgaggttatccttgtttttcttcgcggtttgccatgtgtgaaagtagatttcctgctattgatatattctcattatagacagaatagtggagaacagtgttgccatggacaaaatccagttttggtccactctggggagcatttggacctgtggtgcttctaacaattaaaagtctagatggtccttgactgtcccccagccatactgcatactactttgtgcattctactttgtgtcattaatgaaagattggttctgtccctgtaacttaggcatttattattcttaactcttcattcctgttctgtagccacccagcagtccattttccctatgttcaggccaaaccacagggcattggggaaggtttttgggattttcttattgagattttgttgaatctgtagtttaccccagctttcctaaggtacagtgaggggttggagggatctgtgtttggcccggggagcaattgtctctaccttaaggttcagttttgagggcataaaatactactttgcaatgtcatgagaacaccattagatctgaaatgtggaaatggtttctcacaatttaaaggaaaaacccactttgcacccatgatcccatcattttggttgagattttagaataaaaaatatagtgttgagatccgtacttttgtaatcagaccaccaagcatgcctgtggcaaggcagagaggaaaggtctggagccagtgtattgcagtttcatgctacctttacctgctaatcataaaaattatgttttcaaaagtagatgatactagccttacacccaaaaacatgttctgaattagatgccccctcacccaatttttattaagctttctaaattccagccacattgctgtacatcaacattggtttcattcaacagacatttttttggcctgaagatacaaggttcagaaagaggccatccctgccctcaaataactttcatactggtgtatgatgaactgaccattaatagtttaagtgcttacaagctatgtttctgttcaaaaaaaaaatagtttggtataataaatgctataaaccaatacacatttctgacttgggggcagagacagactggctgatgttgtatagtttgtagccctggagtaagaagttgacattaatttcggcctatatgtggaaaagacctataacattgggtgaactgagccagctggccatagaacacaagaacatattccaggaaataaatatagctggagggttggaaatgctgttattactgagagagaaaacaggtgagttgggattgagaactcctgattttcatccctggtttagattcttggccaaagtagtggtagagttaatctttgcttgtggaaagcattaactatgttgcagattcagttgtgttacattattgtgggttctataacaacatattcctcatggacactttaccagagttgctcacacctttttcaatttctcatcccttttggaggaatgaacatgagacttaactgcctttaagcctaaaacggacatgctttccaatgacaagagattttctaaagagaagtcttggagcacatctgttaatacctgagcatctactctgagcagtgcagttttattcaatactggagagagggtgatttctttttttttgagacggagtcttgctctgtctcccaggctggagtgcagtggcgcaatctcggctcactgcaagctccacctcccgggttcacgccattctcctgcctcagcctcccgaggagctgggactacaggcgccggccaccacgcccggctaattttttgtatttttagtagagacggggtttcaccttgttagccaggatggtctcaatctcctgacctcatgatccacccacctcggcctcccagagtgctgggattacaggcgtgagccaccgccgggccgagagggtgatttctaagcagagaattgtatcagttatgtggaaacctttgccagaaatacatataccttgtatattaaatctgagtctcagatttaatcatcgaagcgtagctgggttaagaaacagtctgatcgtaaggatgttgtcgattctgacccatggatgaccacaagaaaaagatatttatttctgcctggataattgagagttgactaactttggaagtcagaattcccaggaattagagtaactgctctggaaagttaaagtgtgaagttttttagatagtttcataaaaacaattctggtttctttttgcttgtgctgactttcttggattttaatctacctcatcttgtctttttagagttacttcaacttgtcactttaacattgtgcttgactttggttgttttctaagatggaatttttcctgttcattgacagcttgttctcttgccttttcattctgatcctcatttcatctaacatcatctcatattgctcctctgtcaagagaaatgttttaaaatagtttaaagtcttgttttatgggaagaaagtgatcctccaatgctatttgtttctgaggtcagtaagagaaggagttaaaacaaggcagtggggaagggaatgaatcctgcactggaggcaaaagctgacaaggaaagagccattaattaagacaatttcaaagtcaactgattgtgatcattaatgtcacaatagatcaaaacctaattatcacagcctaggtaagagccatcagtattaatcggaaaatctaataggaaactattatcaagaaattaggccaaattgaatgcagtgaactttttatcttggcattctctatttttttgtgatgtcccctggcattggcaggtgtgaccctaacagtcgattcaaggccaagtggtcagtttgtcagccttttttaagggatttctttttatttttaggaattccaaacagagttaacctaaactgtcattgccaaaagatcagtcttaaactttcttagcacctgtacctgtttaatgtgatcagctatcagtgaggaaaaaaaaaaaaatctatttaggtcttggaatggttcctgtacctagagtatccatattga

SEQ ID NO: 72420 - DNA, 6419 bp, Homo sapiens
agatggggtttcaccatgttggccaggctggtcttgaactcctgagcttgtgattcgcctgccttggcctcccaaagtgctgagattacaggcgtgacagcacccggccacagtatctttattacagctcactgcagcctcaatctgctgagggcaggagaattgcttgaagccagaagtttgagaccagcctgggcaatgtagtgagaccccctgtctctaaaaaatataaataaaaataaaggcatgttcctgaaagactgtcaccttggaaagtgacaggccctggcattagcatgttgacacacccttttcttcttactcagcaaaatacttcgttttggtttcttcttgtgttgctattgagaaatttgtctgatcatatccttctgcctttgtcccccaagaaatgccctactttatccttttctttttgtagttgaggagggctagagaatcacaattaaaagtaaggaaatagcagggttttgaggatccttgtcccagccccaaagctgaggaaataagaataaatgcttaatatagccttaattctagagcgcaccagccatgaggctgcttttcttgttgtttttgatttttaaaacatacagctgtctggccaggagcatctaccatttctagattattcagagtaatgaggggaatggatggattgctccagtccacagatgagccacataatatgcaaatcatatacccattcatagcatttgttaacattgcttccctgctcagctgctgattgaattctgtgtgcttatataaattatgtcaaaaattatactgcataattgaggtgacagctgttgctgcagtgacatgacagactggaacaatgaagcttttggtttaagtcagccaggaaaatccttctgaatggtaatgtgattgggcaagagctcataaaccatacctcaagtgggtgggagttttatctctatattccttctctctctgaaggaattaaaggcctagatcaagtgctggataattgacaattgcttgtacttaatctgatcggtatctaaaagaaggaaaggatggtcaggaaacatttatcataaatgtagccaaggatatcaattagggtagacaagaataggacaaaaataggccagagctcctgaggaggtgatatgggtctcttgatttgcagaaaatgacagcctatccaagtggcccagtgtatgcctcccagtagcagtgggcatgtaaactgcagcgaccttatttttaaaaccaaaaacctagtatgtggacaaagaacatgacaatatttggtactgagattggttctgagaaacctggggcatgtggctgctgtggttataggtaatatttaagacattcataaaaatctgatattcttttaccgaaataaccccagtatcatctactacttaccatctgttaatagactttactctgtcttttttgtcttcggtttattgtactgagtgccgccaaaacaacttttgttctcttcctgcctacctgcagctggttctataggaatgtagggagccagaggccagtattgatttcagcccttagcacaaaggaaatcagatgcctgcttccagcatttgttagtgttgagtagatgttcttgccctagaagaattacagcctcaaacagaaacctgtttcatggagctttctcccctcagaagagttaatagttaagagctaagcactcttaaacacctaagtctcaaatgctaaaaatttatttttcttgtgtttagtcctctttcaagacatctttctaagcctttcagtaatcaacattaaaagatctccctttcttcagagttatagcacagctttgcccagtagaggctaccaaggacagcttagcagccctttgattgctgggctgggcagatggccttcaagttaagatcaaatgccgggaaaatcagcctacatgggagcacccattttaaacctggagagaaccatgatgttttcttcttcaaataacaatctagttttttttcccccagtactaaaattgtattgtctttcagacaatataatttttatttaaaattggaacatactatcttcatgctttctaagctaaatcttcatttagatttcactcctcagtagatcccagagaagaagctatataggatccagattcaaatttaacagtgtcttctacttttttagttatgttttctatcaactcctgctgccttttcaaatacggatatttttcaggagactcttctacttgtccactgactgtattttttcctttttgatccgtagccctggttaaatggctgacatccttccgtggatgattcttggaggtagtctcagaattccaaagtgattgtctgtcttcttcttgtcttgatcctaatgcagacattcacctctattatttatttattttttttagacagagtctcgctctgtcaccaggctggagtgcagtggcacaatcttggcttactgtaccctccacctcctgggttcaagcgattctcctgcctcagcctctcgagtagctgggactacaggtgtgtgccaccatgcccagctaatttttgtatttttggtagagatggggttttaccatgtttgccaggatggtctcgatttcctgaccttgtgatctgcccaccttggcctcccaaagtgctggaattacaggcatgagccaccgtgcctggccacctctattaaatttttgtggacaaaaataaaattgtcattatttgtttgctctcatggagcactttcagtaatacaattttttttaaattccagttgccctctttgttgctctgtcctctgtaatacctgactttgctaaagacttgaggggtggtttcagaggagggtcaggtgatgggaaggcaggatgagaaaagccctggacttgcatgtttgagaaggcttccaaccacatcttcactcagactcttggaattcctgtccccaaaacaagcttctgttttttgctcacaatgctatatttctaaatttttcctgaattactgagaagcagtcattagctttgttaagtttggtttggggacattgttggtatcaaaaatcgaagtcttattcatttgatgtaggccatgaatcatcaataactggttgctggaaagcttgactaccatccactggggtgctattttgagaaggatttttgggtatctttatagtctgcaattagttgatgattgctttctagtttatcaactgcatttatatttgcttttctgttcatggaaaatcctttatttgctggggttttttgtttgtttgtttgtttttcccacttacagcaagtaaaagtggtctgaggttatccttgtttttcttcgcggtttgccatgtgtgaaagtagatttcctgctattgatatattctcattatagacagaatagtggagaacagtgttgccatggacaaaatccagttttggtccactctggggagcatttggacctgtggtgcttctaacaattaaaagtctagatggtccttgactgtcccccagccatactgcatactactttgtgcattctactttgtgtcattaatgaaagattggttctgtccctgtaacttaggcatttattattcttaactcttcattcctgttctgtagccacccagcagtccattttccctatgttcaggccaaaccacagggcattggggaaggtttttgggattttcttattgagattttgttgaatctgtagtttaccccagctttcctaaggtacagtgaggggttggagggatctgtgtttggcccggggagcaattgtctctaccttaaggttcagttttgagggcataaaatactactttgcaatgtcatgagaacaccattagatctgaaatgtggaaatggtttctcacaatttaaaggaaaaacccactttgcacccatgatcccatcattttggttgagattttagaataaaaaatatagtgttgagatccgtacttttgtaatcagaccaccaagcatgcctgtggcaaggcagagaggaaaggtctggagccagtgtattgcagtttcatgctacctttacctgctaatcataaaaattatgttttcaaaagtagatgatactagccttacacccaaaaacatgttctgaattagatgccccctcacccaatttttattaagctttctaaattccagccacattgctgtacatcaacattggtttcattcaacagacatttttttggcctgaagatacaaggttcagaaagaggccatccctgccctcaaataactttcatactggtgtatgatgaactgaccattaatagtttaagtgcttacaagctatgtttctgttcaaaaaaaaaatagtttggtataataaatgctataaaccaatacacatttctgacttgggggcagagacagactggctgatgttgtatagtttgtagccctggagtaagaagttgacattaatttcggcctatatgtggaaaagacctataacattgggtgaactgagccagctggccatagaacacaagaacatattccaggaaataaatatagctggagggttggaaatgctgttattactgagagagaaaacaggtgagttgggattgagaactcctgattttcatccctggtttagattcttggccaaagtagtggtagagttaatctttgcttgtggaaagcattaactatgttgcagattcagttgtgttacattattgtgggttctataacaacatattcctcatggacactttaccagagttgctcacacctttttcaatttctcatcccttttggaggaatgaacatgagacttaactgcctttaagcctaaaacggacatgctttccaatgacaagagattttctaaagagaagtcttggagcacatctgttaatacctgagcatctactctgagcagtgcagttttattcaatactggagagagggtgatttctttttttttgagacggagtcttgctctgtctcccaggctggagtgcagtggcgcaatctcggctcactgcaagctccacctcccgggttcacgccattctcctgcctcagcctcccgaggagctgggactacaggcgccggccaccacgcccggctaattttttgtatttttagtagagacggggtttcaccttgttagccaggatggtctcaatctcctgacctcatgatccacccacctcggcctcccagagtgctgggattacaggcgtgagccaccgccgggccgagagggtgatttctaagcagagaattgtatcagttatgtggaaacctttgccagaaatacatataccttgtatattaaatctgagtctcagatttaatcatcgaagcgtagctgggttaagaaacagtctgatcgtaaggatgttgtcgattctgacccatggatgaccacaagaaaaagatatttatttctgcctggataattgagagttgactaactttggaagtcagaattcccaggaattagagtaactgctctggaaagttaaagtgtgaagttttttagatagtttcataaaaacaattctggtttctttttgcttgtgctgactttcttggattttaatctacctcatcttgtctttttagagttacttcaacttgtcactttaacattgtgcttgactttggttgttttctaagatggaatttttcctgttcattgacagcttgttctcttgccttttcattctgatcctcatttcatctaacatcatctcatattgctcctctgtcaagagaaatgttttaaaatagtttaaagtcttgttttatgggaagaaagtgatcctccaatgctatttgtttctgaggtcagtaagagaaggagttaaaacaaggcagtggggaagggaatgaatcctgcactggaggcaaaagctgacaaggaaagagccattaattaagacaatttcaaagtcaactgattgtgatcattaatgtcacaatagatcaaaacctaattatcacagcctaggtaagagccatcagtattaatcggaaaatctaataggaaactattatcaagaaattaggccaaattgaatgcagtgaactttttatcttggcattctctatttttttgtgatgtcccctggcattggcaggtgtgaccctaacagtcgattcaaggccaagtggtcagtttgtcagccttttttaagggatttctttttatttttaggaattccaaacagagttaacctaaactgtcattgccaaaagatcagtcttaaactttcttagcacctgtacctgtttaatgtgatcagctatcagtgaggaaaaaaaaaaaaatctatttaggtcttggaatggttcctgtacctagagtatccatattga

SEQ ID NO: 72421 - DNA, 6416 bp, Homo sapiens
gatcacttgaggtcaggagttcgagaccagcctggccaacatggtgaaaccccgtctctactaaaaatacaaaattagcccagcctggtggtgcatgcctgtaatcccaagcagctgggactacaggcgcacaccacggtgtctggctaattttattatttaaaaaatgttttgtagagacagtctccctgggcaatgtagtgagaccccctgtctctaaaaaatataaataaaaataaaggcatgttcctgaaagactgtcaccttggaaagtgacaggccctggcattagcatgttgacacacccttttcttcttactcagcaaaatacttcgttttggtttcttcttgtgttgctattgagaaatttgtctgatcatatccttctgcctttgtcccccaagaaatgccctactttatccttttctttttgtagttgaggagggctagagaatcacaattaaaagtaaggaaatagcagggttttgaggatccttgtcccagccccaaagctgaggaaataagaataaatgcttaatatagccttaattctagagcgcaccagccatgaggctgcttttcttgttgtttttgatttttaaaacatacagctgtctggccaggagcatctaccatttctagattattcagagtaatgaggggaatggatggattgctccagtccacagatgagccacataatatgcaaatcatatacccattcatagcatttgttaacattgcttccctgctcagctgctgattgaattctgtgtgcttatataaattatgtcaaaaattatactgcataattgaggtgacagctgttgctgcagtgacatgacagactggaacaatgaagcttttggtttaagtcagccaggaaaatccttctgaatggtaatgtgattgggcaagagctcataaaccatacctcaagtgggtgggagttttatctctatattccttctctctctgaaggaattaaaggcctagatcaagtgctggataattgacaattgcttgtacttaatctgatcggtatctaaaagaaggaaaggatggtcaggaaacatttatcataaatgtagccaaggatatcaattagggtagacaagaataggacaaaaataggccagagctcctgaggaggtgatatgggtctcttgatttgcagaaaatgacagcctatccaagtggcccagtgtatgcctcccagtagcagtgggcatgtaaactgcagcgaccttatttttaaaaccaaaaacctagtatgtggacaaagaacatgacaatatttggtactgagattggttctgagaaacctggggcatgtggctgctgtggttataggtaatatttaagacattcataaaaatctgatattcttttaccgaaataaccccagtatcatctactacttaccatctgttaatagactttactctgtcttttttgtcttcggtttattgtactgagtgccgccaaaacaacttttgttctcttcctgcctacctgcagctggttctataggaatgtagggagccagaggccagtattgatttcagcccttagcacaaaggaaatcagatgcctgcttccagcatttgttagtgttgagtagatgttcttgccctagaagaattacagcctcaaacagaaacctgtttcatggagctttctcccctcagaagagttaatagttaagagctaagcactcttaaacacctaagtctcaaatgctaaaaatttatttttcttgtgtttagtcctctttcaagacatctttctaagcctttcagtaatcaacattaaaagatctccctttcttcagagttatagcacagctttgcccagtagaggctaccaaggacagcttagcagccctttgattgctgggctgggcagatggccttcaagttaagatcaaatgccgggaaaatcagcctacatgggagcacccattttaaacctggagagaaccatgatgttttcttcttcaaataacaatctagttttttttcccccagtactaaaattgtattgtctttcagacaatataatttttatttaaaattggaacatactatcttcatgctttctaagctaaatcttcatttagatttcactcctcagtagatcccagagaagaagctatataggatccagattcaaatttaacagtgtcttctacttttttagttatgttttctatcaactcctgctgccttttcaaatacggatatttttcaggagactcttctacttgtccactgactgtattttttcctttttgatccgtagccctggttaaatggctgacatccttccgtggatgattcttggaggtagtctcagaattccaaagtgattgtctgtcttcttcttgtcttgatcctaatgcagacattcacctctattatttatttattttttttagacagagtctcgctctgtcaccaggctggagtgcagtggcacaatcttggcttactgtaccctccacctcctgggttcaagcgattctcctgcctcagcctctcgagtagctgggactacaggtgtgtgccaccatgcccagctaatttttgtatttttggtagagatggggttttaccatgtttgccaggatggtctcgatttcctgaccttgtgatctgcccaccttggcctcccaaagtgctggaattacaggcatgagccaccgtgcctggccacctctattaaatttttgtggacaaaaataaaattgtcattatttgtttgctctcatggagcactttcagtaatacaattttttttaaattccagttgccctctttgttgctctgtcctctgtaatacctgactttgctaaagacttgaggggtggtttcagaggagggtcaggtgatgggaaggcaggatgagaaaagccctggacttgcatgtttgagaaggcttccaaccacatcttcactcagactcttggaattcctgtccccaaaacaagcttctgttttttgctcacaatgctatatttctaaatttttcctgaattactgagaagcagtcattagctttgttaagtttggtttggggacattgttggtatcaaaaatcgaagtcttattcatttgatgtaggccatgaatcatcaataactggttgctggaaagcttgactaccatccactggggtgctattttgagaaggatttttgggtatctttatagtctgcaattagttgatgattgctttctagtttatcaactgcatttatatttgcttttctgttcatggaaaatcctttatttgctggggttttttgtttgtttgtttgtttttcccacttacagcaagtaaaagtggtctgaggttatccttgtttttcttcgcggtttgccatgtgtgaaagtagatttcctgctattgatatattctcattatagacagaatagtggagaacagtgttgccatggacaaaatccagttttggtccactctggggagcatttggacctgtggtgcttctaacaattaaaagtctagatggtccttgactgtcccccagccatactgcatactactttgtgcattctactttgtgtcattaatgaaagattggttctgtccctgtaacttaggcatttattattcttaactcttcattcctgttctgtagccacccagcagtccattttccctatgttcaggccaaaccacagggcattggggaaggtttttgggattttcttattgagattttgttgaatctgtagtttaccccagctttcctaaggtacagtgaggggttggagggatctgtgtttggcccggggagcaattgtctctaccttaaggttcagttttgagggcataaaatactactttgcaatgtcatgagaacaccattagatctgaaatgtggaaatggtttctcacaatttaaaggaaaaacccactttgcacccatgatcccatcattttggttgagattttagaataaaaaatatagtgttgagatccgtacttttgtaatcagaccaccaagcatgcctgtggcaaggcagagaggaaaggtctggagccagtgtattgcagtttcatgctacctttacctgctaatcataaaaattatgttttcaaaagtagatgatactagccttacacccaaaaacatgttctgaattagatgccccctcacccaatttttattaagctttctaaattccagccacattgctgtacatcaacattggtttcattcaacagacatttttttggcctgaagatacaaggttcagaaagaggccatccctgccctcaaataactttcatactggtgtatgatgaactgaccattaatagtttaagtgcttacaagctatgtttctgttcaaaaaaaaaatagtttggtataataaatgctataaaccaatacacatttctgacttgggggcagagacagactggctgatgttgtatagtttgtagccctggagtaagaagttgacattaatttcggcctatatgtggaaaagacctataacattgggtgaactgagccagctggccatagaacacaagaacatattccaggaaataaatatagctggagggttggaaatgctgttattactgagagagaaaacaggtgagttgggattgagaactcctgattttcatccctggtttagattcttggccaaagtagtggtagagttaatctttgcttgtggaaagcattaactatgttgcagattcagttgtgttacattattgtgggttctataacaacatattcctcatggacactttaccagagttgctcacacctttttcaatttctcatcccttttggaggaatgaacatgagacttaactgcctttaagcctaaaacggacatgctttccaatgacaagagattttctaaagagaagtcttggagcacatctgttaatacctgagcatctactctgagcagtgcagttttattcaatactggagagagggtgatttctttttttttgagacggagtcttgctctgtctcccaggctggagtgcagtggcgcaatctcggctcactgcaagctccacctcccgggttcacgccattctcctgcctcagcctcccgaggagctgggactacaggcgccggccaccacgcccggctaattttttgtatttttagtagagacggggtttcaccttgttagccaggatggtctcaatctcctgacctcatgatccacccacctcggcctcccagagtgctgggattacaggcgtgagccaccgccgggccgagagggtgatttctaagcagagaattgtatcagttatgtggaaacctttgccagaaatacatataccttgtatattaaatctgagtctcagatttaatcatcgaagcgtagctgggttaagaaacagtctgatcgtaaggatgttgtcgattctgacccatggatgaccacaagaaaaagatatttatttctgcctggataattgagagttgactaactttggaagtcagaattcccaggaattagagtaactgctctggaaagttaaagtgtgaagttttttagatagtttcataaaaacaattctggtttctttttgcttgtgctgactttcttggattttaatctacctcatcttgtctttttagagttacttcaacttgtcactttaacattgtgcttgactttggttgttttctaagatggaatttttcctgttcattgacagcttgttctcttgccttttcattctgatcctcatttcatctaacatcatctcatattgctcctctgtcaagagaaatgttttaaaatagtttaaagtcttgttttatgggaagaaagtgatcctccaatgctatttgtttctgaggtcagtaagagaaggagttaaaacaaggcagtggggaagggaatgaatcctgcactggaggcaaaagctgacaaggaaagagccattaattaagacaatttcaaagtcaactgattgtgatcattaatgtcacaatagatcaaaacctaattatcacagcctaggtaagagccatcagtattaatcggaaaatctaataggaaactattatcaagaaattaggccaaattgaatgcagtgaactttttatcttggcattctctatttttttgtgatgtcccctggcattggcaggtgtgaccctaacagtcgattcaaggccaagtggtcagtttgtcagccttttttaagggatttctttttatttttaggaattccaaacagagttaacctaaactgtcattgccaaaagatcagtcttaaactttcttagcacctgtacctgtttaatgtgatcagctatcagtgaggaaaaaaaaaaaaatctatttaggtcttggaatggttcctgtacctagagtatccatattga

SEQ ID NO: 72422 - DNA, 892 bp, Homo sapiens
cagggaaggatccgttttggcgggcggttggcgttgcgcagaaggcggcggcggtggtggcttgtggtgcggcctcaccatacaggaacagggcagacgttagcgtgagtgatcactctcaatcccggggacctggtggccttagtctttcaggtggaacggtgtgcgacatgggaaagaaaaccaagcggacagctgacagttcttcttcagaggatgaggaggagtatgttgtggagaaggtgctagacaggcgcgtggttaagggacaagtggaatatctactgaagtggaaaggcttttctgaggagcacaatacttgggaacctgagaaaaacttggattgccctgagctaatttctgaatttatgaaaaagtataagaagatgaaggagggtgaaaataataaacccagggagaagtcagaaagtaacaagaggaaatccaatttctcaaacagtgccgatgacatcaaatctaaaaaaaagagagagcagagcaatgatatcgctcggggctttgagagaggactggaaccagaaaagatcattggggcaacagattcctgtggtgatttaatgttcctaatgaaatggaaagacacagatgaagctgacctggttcttgcaaaagaagctaatgtgaaatgtccacaaattgtgatagcattttatgaagagagactgacatggcatgcatatcctgaggatgcggaaaacaaagagaaagaaacagcaaagagctaaaggaggggatggtctctgtcatttctctttgtacataatacattcacctccctgcctcctctcctttctacccacccctttctatcctaaacacatccataaaaaatgtgcttatcaccggtcttatctcaatccgggatcctcta

SEQ ID NO: 72423 - DNA, 7849 bp, Homo sapiens
agaggggtaccatacatgtgtgatgacatcaaatctaaaaaaaagagagagcagagcaatgatatcgctcggggctttgagagaggactggaaccagaaaagatcattggggcaacagattcctgtggtgatttaatgttcctaatgaaatggaaagacacagatgaagctgacctggttcttgcaaaagaagctaatgtgaaatgtccacaaattgtgatagcattttatgaagagagactgacatggcatgcatatcctgaggatgcggaaaacaaagagaaagaaacagcaaagagctaaaggaggggatggtctctgtcatttctctttgtacataatacattcacctccctgcctcctctcctttctacccacccctttctatcctaaacacatccataaaaaatgtgcttatcactgtgctccacaggagaaatgttggtattggttctcttgtaacataactgatggtctgattaatgataagtgtctctctgtgaagaccaggcatttacatactgagtgtaatacccacaatttttttttcctttgccctgatctcttccttctgcttccctgtgacctcaagatgagtttcaactttttaatcaccttagagtcttgatcttttcagggttggtcgctttttaggttgggggattttgttacaatgatgttgaattttggtttcttgctttggttcttagaacatgttgctgactagctggcctttgttctgacatgttgagatggaaaggatgttgcccatctgttaaaaagccaatagcaactgcctacctgttggggctttcccaaccttgttcagctctacccaggagaatacagggtttctggtgtggtcttctgggccaccctctgttgttcatcctcactcatcctcccagaattactccatcctttggaagatttgaaattttacactgaaatctgtcaagacactctttttagccccaggactttcggtattgcttttagcactccccacttctgcttctgtaaagtgatatcaatttgtgataaaatgacaagattattaactgtgcagatttgtagctatagtacatgaggatgatggggtagggtacaattgtctttattatcatatatggtatgtatgtatgatttctttccattcctcatatttagactgtatatttatgtaggtgtgagtgattgcctggtgcttgcttgtgccaaggtgctaggcaccctccaaccctgccaacttttgtggcctcccaaagcattcctgttaccaaagaggcttcaaacctgaccctcacttctcagtggacccgagtttcccttccatgccattattttcagtggggaagttttagaggtgagctgttggccacaatatcaattttaagtgttcatagcagttatgtctcctgcattcttggctcctggatttaccaccaagagtccccaaaatattaatgctcttccctttttctaccctcaaacttatagttgtatcttattttttaaaatgaattttcatggccaggcacagtggctaccgcctgtaatcccagcactttgggaggctgagggcaggagaattgcttgaagccagaagtttgagaccagcctgggcaatgtagtgagaccccctgtctctaaaaaatataaataaaaataaaggcatgttcctgaaagactgtcaccttggaaagtgacaggccctggcattagcatgttgacacacccttttcttcttactcagcaaaatacttcgttttggtttcttcttgtgttgctattgagaaatttgtctgatcatatccttctgcctttgtcccccaagaaatgccctactttatccttttctttttgtagttgaggagggctagagaatcacaattaaaagtaaggaaatagcagggttttgaggatccttgtcccagccccaaagctgaggaaataagaataaatgcttaatatagccttaattctagagcgcaccagccatgaggctgcttttcttgttgtttttgatttttaaaacatacagctgtctggccaggagcatctaccatttctagattattcagagtaatgaggggaatggatggattgctccagtccacagatgagccacataatatgcaaatcatatacccattcatagcatttgttaacattgcttccctgctcagctgctgattgaattctgtgtgcttatataaattatgtcaaaaattatactgcataattgaggtgacagctgttgctgcagtgacatgacagactggaacaatgaagcttttggtttaagtcagccaggaaaatccttctgaatggtaatgtgattgggcaagagctcataaaccatacctcaagtgggtgggagttttatctctatattccttctctctctgaaggaattaaaggcctagatcaagtgctggataattgacaattgcttgtacttaatctgatcggtatctaaaagaaggaaaggatggtcaggaaacatttatcataaatgtagccaaggatatcaattagggtagacaagaataggacaaaaataggccagagctcctgaggaggtgatatgggtctcttgatttgcagaaaatgacagcctatccaagtggcccagtgtatgcctcccagtagcagtgggcatgtaaactgcagcgaccttatttttaaaaccaaaaacctagtatgtggacaaagaacatgacaatatttggtactgagattggttctgagaaacctggggcatgtggctgctgtggttataggtaatatttaagacattcataaaaatctgatattcttttaccgaaataaccccagtatcatctactacttaccatctgttaatagactttactctgtcttttttgtcttcggtttattgtactgagtgccgccaaaacaacttttgttctcttcctgcctacctgcagctggttctataggaatgtagggagccagaggccagtattgatttcagcccttagcacaaaggaaatcagatgcctgcttccagcatttgttagtgttgagtagatgttcttgccctagaagaattacagcctcaaacagaaacctgtttcatggagctttctcccctcagaagagttaatagttaagagctaagcactcttaaacacctaagtctcaaatgctaaaaatttatttttcttgtgtttagtcctctttcaagacatctttctaagcctttcagtaatcaacattaaaagatctccctttcttcagagttatagcacagctttgcccagtagaggctaccaaggacagcttagcagccctttgattgctgggctgggcagatggccttcaagttaagatcaaatgccgggaaaatcagcctacatgggagcacccattttaaacctggagagaaccatgatgttttcttcttcaaataacaatctagttttttttcccccagtactaaaattgtattgtctttcagacaatataatttttatttaaaattggaacatactatcttcatgctttctaagctaaatcttcatttagatttcactcctcagtagatcccagagaagaagctatataggatccagattcaaatttaacagtgtcttctacttttttagttatgttttctatcaactcctgctgccttttcaaatacggatatttttcaggagactcttctacttgtccactgactgtattttttcctttttgatccgtagccctggttaaatggctgacatccttccgtggatgattcttggaggtagtctcagaattccaaagtgattgtctgtcttcttcttgtcttgatcctaatgcagacattcacctctattatttatttattttttttagacagagtctcgctctgtcaccaggctggagtgcagtggcacaatcttggcttactgtaccctccacctcctgggttcaagcgattctcctgcctcagcctctcgagtagctgggactacaggtgtgtgccaccatgcccagctaatttttgtatttttggtagagatggggttttaccatgtttgccaggatggtctcgatttcctgaccttgtgatctgcccaccttggcctcccaaagtgctggaattacaggcatgagccaccgtgcctggccacctctattaaatttttgtggacaaaaataaaattgtcattatttgtttgctctcatggagcactttcagtaatacaattttttttaaattccagttgccctctttgttgctctgtcctctgtaatacctgactttgctaaagacttgaggggtggtttcagaggagggtcaggtgatgggaaggcaggatgagaaaagccctggacttgcatgtttgagaaggcttccaaccacatcttcactcagactcttggaattcctgtccccaaaacaagcttctgttttttgctcacaatgctatatttctaaatttttcctgaattactgagaagcagtcattagctttgttaagtttggtttggggacattgttggtatcaaaaatcgaagtcttattcatttgatgtaggccatgaatcatcaataactggttgctggaaagcttgactaccatccactggggtgctattttgagaaggatttttgggtatctttatagtctgcaattagttgatgattgctttctagtttatcaactgcatttatatttgcttttctgttcatggaaaatcctttatttgctggggttttttgtttgtttgtttgtttttcccacttacagcaagtaaaagtggtctgaggttatccttgtttttcttcgcggtttgccatgtgtgaaagtagatttcctgctattgatatattctcattatagacagaatagtggagaacagtgttgccatggacaaaatccagttttggtccactctggggagcatttggacctgtggtgcttctaacaattaaaagtctagatggtccttgactgtcccccagccatactgcatactactttgtgcattctactttgtgtcattaatgaaagattggttctgtccctgtaacttaggcatttattattcttaactcttcattcctgttctgtagccacccagcagtccattttccctatgttcaggccaaaccacagggcattggggaaggtttttgggattttcttattgagattttgttgaatctgtagtttaccccagctttcctaaggtacagtgaggggttggagggatctgtgtttggcccggggagcaattgtctctaccttaaggttcagttttgagggcataaaatactactttgcaatgtcatgagaacaccattagatctgaaatgtggaaatggtttctcacaatttaaaggaaaaacccactttgcacccatgatcccatcattttggttgagattttagaataaaaaatatagtgttgagatccgtacttttgtaatcagaccaccaagcatgcctgtggcaaggcagagaggaaaggtctggagccagtgtattgcagtttcatgctacctttacctgctaatcataaaaattatgttttcaaaagtagatgatactagccttacacccaaaaacatgttctgaattagatgccccctcacccaatttttattaagctttctaaattccagccacattgctgtacatcaacattggtttcattcaacagacatttttttggcctgaagatacaaggttcagaaagaggccatccctgccctcaaataactttcatactggtgtatgatgaactgaccattaatagtttaagtgcttacaagctatgtttctgttcaaaaaaaaaatagtttggtataataaatgctataaaccaatacacatttctgacttgggggcagagacagactggctgatgttgtatagtttgtagccctggagtaagaagttgacattaatttcggcctatatgtggaaaagacctataacattgggtgaactgagccagctggccatagaacacaagaacatattccaggaaataaatatagctggagggttggaaatgctgttattactgagagagaaaacaggtgagttgggattgagaactcctgattttcatccctggtttagattcttggccaaagtagtggtagagttaatctttgcttgtggaaagcattaactatgttgcagattcagttgtgttacattattgtgggttctataacaacatattcctcatggacactttaccagagttgctcacacctttttcaatttctcatcccttttggaggaatgaacatgagacttaactgcctttaagcctaaaacggacatgctttccaatgacaagagattttctaaagagaagtcttggagcacatctgttaatacctgagcatctactctgagcagtgcagttttattcaatactggagagagggtgatttctttttttttgagacggagtcttgctctgtctcccaggctggagtgcagtggcgcaatctcggctcactgcaagctccacctcccgggttcacgccattctcctgcctcagcctcccgaggagctgggactacaggcgccggccaccacgcccggctaattttttgtatttttagtagagacggggtttcaccttgttagccaggatggtctcaatctcctgacctcatgatccacccacctcggcctcccagagtgctgggattacaggcgtgagccaccgccgggccgagagggtgatttctaagcagagaattgtatcagttatgtggaaacctttgccagaaatacatataccttgtatattaaatctgagtctcagatttaatcatcgaagcgtagctgggttaagaaacagtctgatcgtaaggatgttgtcgattctgacccatggatgaccacaagaaaaagatatttatttctgcctggataattgagagttgactaactttggaagtcagaattcccaggaattagagtaactgctctggaaagttaaagtgtgaagttttttagatagtttcataaaaacaattctggtttctttttgcttgtgctgactttcttggattttaatctacctcatcttgtctttttagagttacttcaacttgtcactttaacattgtgcttgactttggttgttttctaagatggaatttttcctgttcattgacagcttgttctcttgccttttcattctgatcctcatttcatctaacatcatctcatattgctcctctgtcaagagaaatgttttaaaatagtttaaagtcttgttttatgggaagaaagtgatcctccaatgctatttgtttctgaggtcagtaagagaaggagttaaaacaaggcagtggggaagggaatgaatcctgcactggaggcaaaagctgacaaggaaagagccattaattaagacaatttcaaagtcaactgattgtgatcattaatgtcacaatagatcaaaacctaattatcacagcctaggtaagagccatcagtattaatcggaaaatctaataggaaactattatcaagaaattaggccaaattgaatgcagtgaactttttatcttggcattctctatttttttgtgatgtcccctggcattggcaggtgtgaccctaacagtcgattcaaggccaagtggtcagtttgtcagccttttttaagggatttctttttatttttaggaattccaaacagagttaacctaaactgtcattgccaaaagatcagtcttaaactttcttagcacctgtacctgtttaatgtgatcagctatcagtgaggaaaaaaaaaaaaatctatttaggtcttggaatggttcctgtacctagagtatccatattga

SEQ ID NO: 72424 - DNA, 8068 bp, Homo sapiens
cagggaaggatccgttttggcgggcggttggcgttgcgcagaaggcggcggcggtggtggcttgtggtgcggcctcaccatacaggaacagggcagacgttagcgtgagtgatcactctcaatcccggggacctggtggccttagtctttcaggtggaacggtgtgcgacatgggaaagaaaaccaagcggacagctgacagttcttcttcagaggatgaggaggagtatgttgtggagaaggtgctagacaggcgcgtggttaagggacaagtggaatatctactgaagtggaaaggcttttctgatggaaccagaaaagatcattggggcaacagattcctgtggtgatttaatgttcctaatgaaatggaaagacacagatgaagctgacctggttcttgcaaaagaagctaatgtgaaatgtccacaaattgtgatagcattttatgaagagagactgacatggcatgcatatcctgaggatgcggaaaacaaagagaaagaaacagcaaagagctaaaggaggggatggtctctgtcatttctctttgtacataatacattcacctccctgcctcctctcctttctacccacccctttctatcctaaacacatccataaaaaatgtgcttatcactgtgctccacaggagaaatgttggtattggttctcttgtaacataactgatggtctgattaatgataagtgtctctctgtgaagaccaggcatttacatactgagtgtaatacccacaatttttttttcctttgccctgatctcttccttctgcttccctgtgacctcaagatgagtttcaactttttaatcaccttagagtcttgatcttttcagggttggtcgctttttaggttgggggattttgttacaatgatgttgaattttggtttcttgctttggttcttagaacatgttgctgactagctggcctttgttctgacatgttgagatggaaaggatgttgcccatctgttaaaaagccaatagcaactgcctacctgttggggctttcccaaccttgttcagctctacccaggagaatacagggtttctggtgtggtcttctgggccaccctctgttgttcatcctcactcatcctcccagaattactccatcctttggaagatttgaaattttacactgaaatctgtcaagacactctttttagccccaggactttcggtattgcttttagcactccccacttctgcttctgtaaagtgatatcaatttgtgataaaatgacaagattattaactgtgcagatttgtagctatagtacatgaggatgatggggtagggtacaattgtctttattatcatatatggtatgtatgtatgatttctttccattcctcatatttagactgtatatttatgtaggtgtgagtgattgcctggtgcttgcttgtgccaaggtgctaggcaccctccaaccctgccaacttttgtggcctcccaaagcattcctgttaccaaagaggcttcaaacctgaccctcacttctcagtggacccgagtttcccttccatgccattattttcagtggggaagttttagaggtgagctgttggccacaatatcaattttaagtgttcatagcagttatgtctcctgcattcttggctcctggatttaccaccaagagtccccaaaatattaatgctcttccctttttctaccctcaaacttatagttgtatcttattttttaaaatgaattttcatggccaggcacagtggctaccgcctgtaatcccagcactttgggaggctgagggcaggagaattgcttgaagccagaagtttgagaccagcctgggcaatgtagtgagaccccctgtctctaaaaaatataaataaaaataaaggcatgttcctgaaagactgtcaccttggaaagtgacaggccctggcattagcatgttgacacacccttttcttcttactcagcaaaatacttcgttttggtttcttcttgtgttgctattgagaaatttgtctgatcatatccttctgcctttgtcccccaagaaatgccctactttatccttttctttttgtagttgaggagggctagagaatcacaattaaaagtaaggaaatagcagggttttgaggatccttgtcccagccccaaagctgaggaaataagaataaatgcttaatatagccttaattctagagcgcaccagccatgaggctgcttttcttgttgtttttgatttttaaaacatacagctgtctggccaggagcatctaccatttctagattattcagagtaatgaggggaatggatggattgctccagtccacagatgagccacataatatgcaaatcatatacccattcatagcatttgttaacattgcttccctgctcagctgctgattgaattctgtgtgcttatataaattatgtcaaaaattatactgcataattgaggtgacagctgttgctgcagtgacatgacagactggaacaatgaagcttttggtttaagtcagccaggaaaatccttctgaatggtaatgtgattgggcaagagctcataaaccatacctcaagtgggtgggagttttatctctatattccttctctctctgaaggaattaaaggcctagatcaagtgctggataattgacaattgcttgtacttaatctgatcggtatctaaaagaaggaaaggatggtcaggaaacatttatcataaatgtagccaaggatatcaattagggtagacaagaataggacaaaaataggccagagctcctgaggaggtgatatgggtctcttgatttgcagaaaatgacagcctatccaagtggcccagtgtatgcctcccagtagcagtgggcatgtaaactgcagcgaccttatttttaaaaccaaaaacctagtatgtggacaaagaacatgacaatatttggtactgagattggttctgagaaacctggggcatgtggctgctgtggttataggtaatatttaagacattcataaaaatctgatattcttttaccgaaataaccccagtatcatctactacttaccatctgttaatagactttactctgtcttttttgtcttcggtttattgtactgagtgccgccaaaacaacttttgttctcttcctgcctacctgcagctggttctataggaatgtagggagccagaggccagtattgatttcagcccttagcacaaaggaaatcagatgcctgcttccagcatttgttagtgttgagtagatgttcttgccctagaagaattacagcctcaaacagaaacctgtttcatggagctttctcccctcagaagagttaatagttaagagctaagcactcttaaacacctaagtctcaaatgctaaaaatttatttttcttgtgtttagtcctctttcaagacatctttctaagcctttcagtaatcaacattaaaagatctccctttcttcagagttatagcacagctttgcccagtagaggctaccaaggacagcttagcagccctttgattgctgggctgggcagatggccttcaagttaagatcaaatgccgggaaaatcagcctacatgggagcacccattttaaacctggagagaaccatgatgttttcttcttcaaataacaatctagttttttttcccccagtactaaaattgtattgtctttcagacaatataatttttatttaaaattggaacatactatcttcatgctttctaagctaaatcttcatttagatttcactcctcagtagatcccagagaagaagctatataggatccagattcaaatttaacagtgtcttctacttttttagttatgttttctatcaactcctgctgccttttcaaatacggatatttttcaggagactcttctacttgtccactgactgtattttttcctttttgatccgtagccctggttaaatggctgacatccttccgtggatgattcttggaggtagtctcagaattccaaagtgattgtctgtcttcttcttgtcttgatcctaatgcagacattcacctctattatttatttattttttttagacagagtctcgctctgtcaccaggctggagtgcagtggcacaatcttggcttactgtaccctccacctcctgggttcaagcgattctcctgcctcagcctctcgagtagctgggactacaggtgtgtgccaccatgcccagctaatttttgtatttttggtagagatggggttttaccatgtttgccaggatggtctcgatttcctgaccttgtgatctgcccaccttggcctcccaaagtgctggaattacaggcatgagccaccgtgcctggccacctctattaaatttttgtggacaaaaataaaattgtcattatttgtttgctctcatggagcactttcagtaatacaattttttttaaattccagttgccctctttgttgctctgtcctctgtaatacctgactttgctaaagacttgaggggtggtttcagaggagggtcaggtgatgggaaggcaggatgagaaaagccctggacttgcatgtttgagaaggcttccaaccacatcttcactcagactcttggaattcctgtccccaaaacaagcttctgttttttgctcacaatgctatatttctaaatttttcctgaattactgagaagcagtcattagctttgttaagtttggtttggggacattgttggtatcaaaaatcgaagtcttattcatttgatgtaggccatgaatcatcaataactggttgctggaaagcttgactaccatccactggggtgctattttgagaaggatttttgggtatctttatagtctgcaattagttgatgattgctttctagtttatcaactgcatttatatttgcttttctgttcatggaaaatcctttatttgctggggttttttgtttgtttgtttgtttttcccacttacagcaagtaaaagtggtctgaggttatccttgtttttcttcgcggtttgccatgtgtgaaagtagatttcctgctattgatatattctcattatagacagaatagtggagaacagtgttgccatggacaaaatccagttttggtccactctggggagcatttggacctgtggtgcttctaacaattaaaagtctagatggtccttgactgtcccccagccatactgcatactactttgtgcattctactttgtgtcattaatgaaagattggttctgtccctgtaacttaggcatttattattcttaactcttcattcctgttctgtagccacccagcagtccattttccctatgttcaggccaaaccacagggcattggggaaggtttttgggattttcttattgagattttgttgaatctgtagtttaccccagctttcctaaggtacagtgaggggttggagggatctgtgtttggcccggggagcaattgtctctaccttaaggttcagttttgagggcataaaatactactttgcaatgtcatgagaacaccattagatctgaaatgtggaaatggtttctcacaatttaaaggaaaaacccactttgcacccatgatcccatcattttggttgagattttagaataaaaaatatagtgttgagatccgtacttttgtaatcagaccaccaagcatgcctgtggcaaggcagagaggaaaggtctggagccagtgtattgcagtttcatgctacctttacctgctaatcataaaaattatgttttcaaaagtagatgatactagccttacacccaaaaacatgttctgaattagatgccccctcacccaatttttattaagctttctaaattccagccacattgctgtacatcaacattggtttcattcaacagacatttttttggcctgaagatacaaggttcagaaagaggccatccctgccctcaaataactttcatactggtgtatgatgaactgaccattaatagtttaagtgcttacaagctatgtttctgttcaaaaaaaaaatagtttggtataataaatgctataaaccaatacacatttctgacttgggggcagagacagactggctgatgttgtatagtttgtagccctggagtaagaagttgacattaatttcggcctatatgtggaaaagacctataacattgggtgaactgagccagctggccatagaacacaagaacatattccaggaaataaatatagctggagggttggaaatgctgttattactgagagagaaaacaggtgagttgggattgagaactcctgattttcatccctggtttagattcttggccaaagtagtggtagagttaatctttgcttgtggaaagcattaactatgttgcagattcagttgtgttacattattgtgggttctataacaacatattcctcatggacactttaccagagttgctcacacctttttcaatttctcatcccttttggaggaatgaacatgagacttaactgcctttaagcctaaaacggacatgctttccaatgacaagagattttctaaagagaagtcttggagcacatctgttaatacctgagcatctactctgagcagtgcagttttattcaatactggagagagggtgatttctttttttttgagacggagtcttgctctgtctcccaggctggagtgcagtggcgcaatctcggctcactgcaagctccacctcccgggttcacgccattctcctgcctcagcctcccgaggagctgggactacaggcgccggccaccacgcccggctaattttttgtatttttagtagagacggggtttcaccttgttagccaggatggtctcaatctcctgacctcatgatccacccacctcggcctcccagagtgctgggattacaggcgtgagccaccgccgggccgagagggtgatttctaagcagagaattgtatcagttatgtggaaacctttgccagaaatacatataccttgtatattaaatctgagtctcagatttaatcatcgaagcgtagctgggttaagaaacagtctgatcgtaaggatgttgtcgattctgacccatggatgaccacaagaaaaagatatttatttctgcctggataattgagagttgactaactttggaagtcagaattcccaggaattagagtaactgctctggaaagttaaagtgtgaagttttttagatagtttcataaaaacaattctggtttctttttgcttgtgctgactttcttggattttaatctacctcatcttgtctttttagagttacttcaacttgtcactttaacattgtgcttgactttggttgttttctaagatggaatttttcctgttcattgacagcttgttctcttgccttttcattctgatcctcatttcatctaacatcatctcatattgctcctctgtcaagagaaatgttttaaaatagtttaaagtcttgttttatgggaagaaagtgatcctccaatgctatttgtttctgaggtcagtaagagaaggagttaaaacaaggcagtggggaagggaatgaatcctgcactggaggcaaaagctgacaaggaaagagccattaattaagacaatttcaaagtcaactgattgtgatcattaatgtcacaatagatcaaaacctaattatcacagcctaggtaagagccatcagtattaatcggaaaatctaataggaaactattatcaagaaattaggccaaattgaatgcagtgaactttttatcttggcattctctatttttttgtgatgtcccctggcattggcaggtgtgaccctaacagtcgattcaaggccaagtggtcagtttgtcagccttttttaagggatttctttttatttttaggaattccaaacagagttaacctaaactgtcattgccaaaagatcagtcttaaactttcttagcacctgtacctgtttaatgtgatcagctatcagtgaggaaaaaaaaaaaaatctatttaggtcttggaatggttcctgtacctagagtatccatattga

SEQ ID NO: 72425 - DNA, 7690 bp, Homo sapiens
cagggaaggatccgttttggcgggcggttggcgttgcgcagaaggcggcggcggtggtggcttgtggtgcggcctcaccatacaggaacagggcagacgttagcgtgagtgatcactctcaatcccggggacctggtggccttagtctttcaggtggaacggtgtgcgacatgggaaagaaaaccaagcggacagctgacagttctcctttctacccacccctttctatcctaaacacatccataaaaaatgtgcttatcactgtgctccacaggagaaatgttggtattggttctcttgtaacataactgatggtctgattaatgataagtgtctctctgtgaagaccaggcatttacatactgagtgtaatacccacaatttttttttcctttgccctgatctcttccttctgcttccctgtgacctcaagatgagtttcaactttttaatcaccttagagtcttgatcttttcagggttggtcgctttttaggttgggggattttgttacaatgatgttgaattttggtttcttgctttggttcttagaacatgttgctgactagctggcctttgttctgacatgttgagatggaaaggatgttgcccatctgttaaaaagccaatagcaactgcctacctgttggggctttcccaaccttgttcagctctacccaggagaatacagggtttctggtgtggtcttctgggccaccctctgttgttcatcctcactcatcctcccagaattactccatcctttggaagatttgaaattttacactgaaatctgtcaagacactctttttagccccaggactttcggtattgcttttagcactccccacttctgcttctgtaaagtgatatcaatttgtgataaaatgacaagattattaactgtgcagatttgtagctatagtacatgaggatgatggggtagggtacaattgtctttattatcatatatggtatgtatgtatgatttctttccattcctcatatttagactgtatatttatgtaggtgtgagtgattgcctggtgcttgcttgtgccaaggtgctaggcaccctccaaccctgccaacttttgtggcctcccaaagcattcctgttaccaaagaggcttcaaacctgaccctcacttctcagtggacccgagtttcccttccatgccattattttcagtggggaagttttagaggtgagctgttggccacaatatcaattttaagtgttcatagcagttatgtctcctgcattcttggctcctggatttaccaccaagagtccccaaaatattaatgctcttccctttttctaccctcaaacttatagttgtatcttattttttaaaatgaattttcatggccaggcacagtggctaccgcctgtaatcccagcactttgggaggctgagggcaggagaattgcttgaagccagaagtttgagaccagcctgggcaatgtagtgagaccccctgtctctaaaaaatataaataaaaataaaggcatgttcctgaaagactgtcaccttggaaagtgacaggccctggcattagcatgttgacacacccttttcttcttactcagcaaaatacttcgttttggtttcttcttgtgttgctattgagaaatttgtctgatcatatccttctgcctttgtcccccaagaaatgccctactttatccttttctttttgtagttgaggagggctagagaatcacaattaaaagtaaggaaatagcagggttttgaggatccttgtcccagccccaaagctgaggaaataagaataaatgcttaatatagccttaattctagagcgcaccagccatgaggctgcttttcttgttgtttttgatttttaaaacatacagctgtctggccaggagcatctaccatttctagattattcagagtaatgaggggaatggatggattgctccagtccacagatgagccacataatatgcaaatcatatacccattcatagcatttgttaacattgcttccctgctcagctgctgattgaattctgtgtgcttatataaattatgtcaaaaattatactgcataattgaggtgacagctgttgctgcagtgacatgacagactggaacaatgaagcttttggtttaagtcagccaggaaaatccttctgaatggtaatgtgattgggcaagagctcataaaccatacctcaagtgggtgggagttttatctctatattccttctctctctgaaggaattaaaggcctagatcaagtgctggataattgacaattgcttgtacttaatctgatcggtatctaaaagaaggaaaggatggtcaggaaacatttatcataaatgtagccaaggatatcaattagggtagacaagaataggacaaaaataggccagagctcctgaggaggtgatatgggtctcttgatttgcagaaaatgacagcctatccaagtggcccagtgtatgcctcccagtagcagtgggcatgtaaactgcagcgaccttatttttaaaaccaaaaacctagtatgtggacaaagaacatgacaatatttggtactgagattggttctgagaaacctggggcatgtggctgctgtggttataggtaatatttaagacattcataaaaatctgatattcttttaccgaaataaccccagtatcatctactacttaccatctgttaatagactttactctgtcttttttgtcttcggtttattgtactgagtgccgccaaaacaacttttgttctcttcctgcctacctgcagctggttctataggaatgtagggagccagaggccagtattgatttcagcccttagcacaaaggaaatcagatgcctgcttccagcatttgttagtgttgagtagatgttcttgccctagaagaattacagcctcaaacagaaacctgtttcatggagctttctcccctcagaagagttaatagttaagagctaagcactcttaaacacctaagtctcaaatgctaaaaatttatttttcttgtgtttagtcctctttcaagacatctttctaagcctttcagtaatcaacattaaaagatctccctttcttcagagttatagcacagctttgcccagtagaggctaccaaggacagcttagcagccctttgattgctgggctgggcagatggccttcaagttaagatcaaatgccgggaaaatcagcctacatgggagcacccattttaaacctggagagaaccatgatgttttcttcttcaaataacaatctagttttttttcccccagtactaaaattgtattgtctttcagacaatataatttttatttaaaattggaacatactatcttcatgctttctaagctaaatcttcatttagatttcactcctcagtagatcccagagaagaagctatataggatccagattcaaatttaacagtgtcttctacttttttagttatgttttctatcaactcctgctgccttttcaaatacggatatttttcaggagactcttctacttgtccactgactgtattttttcctttttgatccgtagccctggttaaatggctgacatccttccgtggatgattcttggaggtagtctcagaattccaaagtgattgtctgtcttcttcttgtcttgatcctaatgcagacattcacctctattatttatttattttttttagacagagtctcgctctgtcaccaggctggagtgcagtggcacaatcttggcttactgtaccctccacctcctgggttcaagcgattctcctgcctcagcctctcgagtagctgggactacaggtgtgtgccaccatgcccagctaatttttgtatttttggtagagatggggttttaccatgtttgccaggatggtctcgatttcctgaccttgtgatctgcccaccttggcctcccaaagtgctggaattacaggcatgagccaccgtgcctggccacctctattaaatttttgtggacaaaaataaaattgtcattatttgtttgctctcatggagcactttcagtaatacaattttttttaaattccagttgccctctttgttgctctgtcctctgtaatacctgactttgctaaagacttgaggggtggtttcagaggagggtcaggtgatgggaaggcaggatgagaaaagccctggacttgcatgtttgagaaggcttccaaccacatcttcactcagactcttggaattcctgtccccaaaacaagcttctgttttttgctcacaatgctatatttctaaatttttcctgaattactgagaagcagtcattagctttgttaagtttggtttggggacattgttggtatcaaaaatcgaagtcttattcatttgatgtaggccatgaatcatcaataactggttgctggaaagcttgactaccatccactggggtgctattttgagaaggatttttgggtatctttatagtctgcaattagttgatgattgctttctagtttatcaactgcatttatatttgcttttctgttcatggaaaatcctttatttgctggggttttttgtttgtttgtttgtttttcccacttacagcaagtaaaagtggtctgaggttatccttgtttttcttcgcggtttgccatgtgtgaaagtagatttcctgctattgatatattctcattatagacagaatagtggagaacagtgttgccatggacaaaatccagttttggtccactctggggagcatttggacctgtggtgcttctaacaattaaaagtctagatggtccttgactgtcccccagccatactgcatactactttgtgcattctactttgtgtcattaatgaaagattggttctgtccctgtaacttaggcatttattattcttaactcttcattcctgttctgtagccacccagcagtccattttccctatgttcaggccaaaccacagggcattggggaaggtttttgggattttcttattgagattttgttgaatctgtagtttaccccagctttcctaaggtacagtgaggggttggagggatctgtgtttggcccggggagcaattgtctctaccttaaggttcagttttgagggcataaaatactactttgcaatgtcatgagaacaccattagatctgaaatgtggaaatggtttctcacaatttaaaggaaaaacccactttgcacccatgatcccatcattttggttgagattttagaataaaaaatatagtgttgagatccgtacttttgtaatcagaccaccaagcatgcctgtggcaaggcagagaggaaaggtctggagccagtgtattgcagtttcatgctacctttacctgctaatcataaaaattatgttttcaaaagtagatgatactagccttacacccaaaaacatgttctgaattagatgccccctcacccaatttttattaagctttctaaattccagccacattgctgtacatcaacattggtttcattcaacagacatttttttggcctgaagatacaaggttcagaaagaggccatccctgccctcaaataactttcatactggtgtatgatgaactgaccattaatagtttaagtgcttacaagctatgtttctgttcaaaaaaaaaatagtttggtataataaatgctataaaccaatacacatttctgacttgggggcagagacagactggctgatgttgtatagtttgtagccctggagtaagaagttgacattaatttcggcctatatgtggaaaagacctataacattgggtgaactgagccagctggccatagaacacaagaacatattccaggaaataaatatagctggagggttggaaatgctgttattactgagagagaaaacaggtgagttgggattgagaactcctgattttcatccctggtttagattcttggccaaagtagtggtagagttaatctttgcttgtggaaagcattaactatgttgcagattcagttgtgttacattattgtgggttctataacaacatattcctcatggacactttaccagagttgctcacacctttttcaatttctcatcccttttggaggaatgaacatgagacttaactgcctttaagcctaaaacggacatgctttccaatgacaagagattttctaaagagaagtcttggagcacatctgttaatacctgagcatctactctgagcagtgcagttttattcaatactggagagagggtgatttctttttttttgagacggagtcttgctctgtctcccaggctggagtgcagtggcgcaatctcggctcactgcaagctccacctcccgggttcacgccattctcctgcctcagcctcccgaggagctgggactacaggcgccggccaccacgcccggctaattttttgtatttttagtagagacggggtttcaccttgttagccaggatggtctcaatctcctgacctcatgatccacccacctcggcctcccagagtgctgggattacaggcgtgagccaccgccgggccgagagggtgatttctaagcagagaattgtatcagttatgtggaaacctttgccagaaatacatataccttgtatattaaatctgagtctcagatttaatcatcgaagcgtagctgggttaagaaacagtctgatcgtaaggatgttgtcgattctgacccatggatgaccacaagaaaaagatatttatttctgcctggataattgagagttgactaactttggaagtcagaattcccaggaattagagtaactgctctggaaagttaaagtgtgaagttttttagatagtttcataaaaacaattctggtttctttttgcttgtgctgactttcttggattttaatctacctcatcttgtctttttagagttacttcaacttgtcactttaacattgtgcttgactttggttgttttctaagatggaatttttcctgttcattgacagcttgttctcttgccttttcattctgatcctcatttcatctaacatcatctcatattgctcctctgtcaagagaaatgttttaaaatagtttaaagtcttgttttatgggaagaaagtgatcctccaatgctatttgtttctgaggtcagtaagagaaggagttaaaacaaggcagtggggaagggaatgaatcctgcactggaggcaaaagctgacaaggaaagagccattaattaagacaatttcaaagtcaactgattgtgatcattaatgtcacaatagatcaaaacctaattatcacagcctaggtaagagccatcagtattaatcggaaaatctaataggaaactattatcaagaaattaggccaaattgaatgcagtgaactttttatcttggcattctctatttttttgtgatgtcccctggcattggcaggtgtgaccctaacagtcgattcaaggccaagtggtcagtttgtcagccttttttaagggatttctttttatttttaggaattccaaacagagttaacctaaactgtcattgccaaaagatcagtcttaaactttcttagcacctgtacctgtttaatgtgatcagctatcagtgaggaaaaaaaaaaaaatctatttaggtcttggaatggttcctgtacctagagtatccatattga

SEQ ID NO: 72426 - DNA, 5237 bp, Homo sapiens
cagggaaggatccgttttggcgggcggttggcgttgcgcagaaggcggcggcggtggtggcttgtggtgcggcctcaccatacaggaacagggcagacgttagcgtgagtgatcactctcaatcccggggacctggtggccttagtctttcaggtggaacggtgtgcgacatgggaaagaaaaccaagcggacagctgacagttcttcttcagaggatgaggaggagtatgttgtggagaaggtgctagacaggcgcgtggttaagggacaagtggaatatctactgaagtggaaaggcttttctgaggagcacaatacttgggaacctgagaaaaacttggattgccctgagctaatttctgaatttatgaaaaagtataagaagatgaaggagggtgaaaataataaacccagggagaagtcagaaagtaacaagaggaaatccaatttctcaaacagtgccgatgacatcaaatctaaaaaaaagagagagcagagcaatgatatcgctcggggctttgagagaggactggaaccagaaaagatcattggggcaacagattcctgtggtgatttaatgttcctaatgaaatggaaagacacagatgaagctgacctggttcttgcaaaagaagctaatgtgaaatgtccacaaattgtgatagcattttatgaagagagactgacatggcatgcatatcctgaggatgcggaaaacaaagagaaagaaacagcaaagagctaaaggaggggatggtctctgtcatttctctttgtacataatacattcacctccctgcctcctctcctttctacccacccctttctatcctaaacacatccataaaaaatgtgcttatcactgtgctccacaggagaaatgttggtattggttctcttgtaacataactgatggtctgattaatgataagtgtctctctgtgaagaccaggcatttacatactgagtgtaatacccacaatttttttttcctttgccctgatctcttccttctgcttccctgtgacctcaagatgagtttcaactttttaatcaccttagagtcttgatcttttcagggttggtcgctttttaggttgggggattttgttacaatgatgttgaattttggtttcttgctttggttcttagaacatgttgctgactagctggcctttgttctgacatgttgagatggaaaggatgttgcccatctgttaaaaagccaatagcaactgcctacctgttggggctttcccaaccttgttcagctctacccaggagaatacagggtttctggtgtggtcttctgggccaccctctgttgttcatcctcactcatcctcccagaattactccatcctttggaagatttgaaattttacactgaaatctgtcaagacactctttttagccccaggactttcggtattgcttttagcactccccacttctgcttctgtaaagtgatatcaatttgtgataaaatgacaagattattaactgtgcagatttgtagctatagtacatgaggatgatggggtagggtacaattgtctttattatcatatatggtatgtatgtatgatttctttccattcctcatatttagactgtatatttatgtaggtgtgagtgattgcctggtgcttgcttgtgccaaggtgctaggcaccctccaaccctgccaacttttgtggcctcccaaagcattcctgttaccaaagaggcttcaaacctgaccctcacttctcagtggacccgagtttcccttccatgccattattttcagtggggaagttttagaggtgagctgttggccacaatatcaattttaagtgttcatagcagttatgtctcctgcattcttggctcctggatttaccaccaagagtccccaaaatattaatgctcttccctttttctaccctcaaacttatagttgtatcttattttttaaaatgaattttcatggccaggcacagtggctaccgcctgtaatcccagcactttgggaggctgagggcaggagaattgcttgaagccagaagtttgagaccagcctgggcaatgtagtgagaccccctgtctctaaaaaatataaataaaaataaaggcatgttcctgaaagactgtcaccttggaaagtgacaggccctggcattagcatgttgacacacccttttcttcttactcagcaaaatacttcgttttggtttcttcttgtgttgctattgagaaatttgtctgatcatatccttctgcctttgtcccccaagaaatgccctactttatccttttctttttgtagttgaggagggctagagaatcacaattaaaagtaaggaaatagcagggttttgaggatccttgtcccagccccaaagctgaggaaataagaataaatgcttaatatagccttaattctagagcgcaccagccatgaggctgcttttcttgttgtttttgatttttaaaacatacagctgtctggccaggagcatctaccatttctagattattcagagtaatgaggggaatggatggattgctccagtccacagatgagccacataatatgcaaatcatatacccattcatagcatttgttaacattgcttccctgctcagctgctgattgaattctgtgtgcttatataaattatgtcaaaaattatactgcataattgaggtgacagctgttgctgcagtgacatgacagactggaacaatgaagcttttggtttaagtcagccaggaaaatccttctgaatggtaatgtgattgggcaagagctcataaaccatacctcaagtgggtgggagttttatctctatattccttctctctctgaaggaattaaaggcctagatcaagtgctggataattgacaattgcttgtacttaatctgatcggtatctaaaagaaggaaaggatggtcaggaaacatttatcataaatgtagccaaggatatcaattagggtagacaagaataggacaaaaataggccagagctcctgaggaggtgatatgggtctcttgatttgcagaaaatgacagcctatccaagtggcccagtgtatgcctcccagtagcagtgggcatgtaaactgcagcgaccttatttttaaaaccaaaaacctagtatgtggacaaagaacatgacaatatttggtactgagattggttctgagaaacctggggcatgtggctgctgtggttataggtaatatttaagacattcataaaaatctgatattcttttaccgaaataaccccagtatcatctactacttaccatctgttaatagactttactctgtcttttttgtcttcggtttattgtactgagtgccgccaaaacaacttttgttctcttcctgcctacctgcagctggttctataggaatgtagggagccagaggccagtattgatttcagcccttagcacaaaggaaatcagatgcctgcttccagcatttgttagtgttgagtagatgttcttgccctagaagaattacagcctcaaacagaaacctgtttcatggagctttctcccctcagaagagttaatagttaagagctaagcactcttaaacacctaagtctcaaatgctaaaaatttatttttcttgtgtttagtcctctttcaagacatctttctaagcctttcagtaatcaacattaaaagatctccctttcttcagagttatagcacagctttgcccagtagaggctaccaaggacagcttagcagccctttgattgctgggctgggcagatggccttcaagttaagatcaaatgccgggaaaatcagcctacatgggagcacccattttaaacctggagagaaccatgatgttttcttcttcaaataacaatctagttttttttcccccagtactaaaattgtattgtctttcagacaatataatttttatttaaaattggaacatactatcttcatgctttctaagctaaatcttcatttagatttcactcctcagtagatcccagagaagaagctatataggatccagattcaaatttaacagtgtcttctacttttttagttatgttttctatcaactcctgctgccttttcaaatacggatatttttcaggagactcttctacttgtccactgactgtattttttcctttttgatccgtagccctggttaaatggctgacatccttccgtggatgattcttggaggtagtctcagaattccaaagtgattgtctgtcttcttcttgtcttgatcctaatgcagacattcacctctattatttatttattttttttagacagagtctcgctctgtcaccaggctggagtgcagtggcacaatcttggcttactgtaccctccacctcctgggttcaagcgattctcctgcctcagcctctcgagtagctgggactacaggtgtgtgccaccatgcccagctaatttttgtatttttggtagagatggggttttaccatgtttgccaggatggtctcgatttcctgaccttgtgatctgcccaccttggcctcccaaagtgctggaattacaggcatgagccaccgtgcctggccacctctattaaatttttgtggacaaaaataaaattgtcattatttgtttgctctcatggagcactttcagtaatacaattttttttaaattccagttgccctctttgttgctctgtcctctgtaatacctgactttgctaaagacttgaggggtggtttcagaggagggtcaggtgatgggaaggcaggatgagaaaagccctggacttgcatgtttgagaaggcttccaaccacatcttcactcagactcttggaattcctgtccccaaaacaagcttctgttttttgctcacaatgctatatttctaaatttttcctgaattactgagaagcagtcattagctttgttaagtttggtttggggacattgttggtatcaaaaatcgaagtcttattcatttgatgtaggccatgaatcatcaataactggttgctggaaagcttgactaccatccactggggtgctattttgagaaggatttttgggtatctttatagtctgcaattagttgatgattgctttctagtttatcaactgcatttatatttgcttttctgttcatggaaaatcctttatttgctggggttttttgtttgtttgtttgtttttcccacttacagcaagtaaaagtggtctgaggtta

SEQ ID NO: 72427 - DNA, 4537 bp, Homo sapiens
aggaggaggagggtgagagagaagctgggagagcagagaaaaggggccaccggtcgcccccccgcttccccgcacgcgctctccagccgcggccgcccgcctgccgcggtcaccccggcctctgcctctgtcccccagtgatcggatcaaggcgctgagcgaggccctgcctgcggggcggccatgcggcggtgacaggagcgcgaccgacacgcacgggcccctcgccccctctcgcctcccgtccgctcgccagctcccctcagccgaggctgctccgcggcggccgcagcccgcgcgcggcccacactcgcctcccctcggcacccccggccccggagctgcctggaggcggccgcactcggggatcatggcccaagttgcaatgtccaccctccccgttgaagatgaggagtcctcggagagcaggatggtggtgacattcctcatgtcagctctcgagtccatgtgtaaagaactggccaagtccaaagccgaagtggcctgcattgcagtgtatgaaacagacgtgtttgtcgtcggaactgaaagaggacgtgcttttgtcaataccagaaaggattttcaaaaagattttgtaaaatattgtgttgaagaagaagaaaaagctgcagagatgcataaaatgaaatctacaacccaggcaaatcggatgagtgtagatgctgtagaaattgaaacactcagaaaaacagttgaggactatttctgcttttgctatgggaaagctttaggcaaatccacagtggtacctgtaccatatgagaagatgctgcgagaccagtcggctgtggtagtgcaggggcttccggaaggtgttgcctttaaacaccccgagaactatgatcttgcaaccctgaaatggattttggagaacaaagcagggatttcattcatcattaagagaccttttttagagccaaagaagcatgtaggtggtcgtgtgatggtaacagatgctgacaggtcaatactatctccaggtggaagttgtggccccatcaaagtgaaaactgaacccacagaagattctggcatttccctggaaatggcagctgtgacagtaaaggaagaatcagaagatcctgattattatcaatataacattcaagcaggcccttctgaaactgatgatgttgatgaaaaacagcccctatcgaagcctttgcaaggaagccaccattcttcagagggcaatgaaggcacagaaatggaagtaccagcagaagattctactcaacatgtcccttcagaaacaagtgaggaccctgaagttgaggtgactattgaagatgatgattattctccaccgtctaagagaccaaaggccaatgagctaccgcagccaccagtcccggaacccgccaatgctgggaagcggaaagtgagggagttcaacttcgagaaatggaatgctcgcatcactgatctacgtaaacaagttgaagaattgtttgaaaggaaatatgctcaagccataaaagccaaaggtccggtgacgatcccgtaccctcttttccagtctcatgttgaagatctttatgtagaaggacttcctgaaggaattccttttagaaggccatctacttacggaattcctcgcctggagaggatattacttgcaaaggaaaggattcgttttgtgattaagaaacatgagcttctgaattcaacacgtgaagatttacagcttgataagccagcttcaggagtaaaggaagaatggtatgccagaatcactaaattaagaaagatggtggatcagcttttctgcaaaaaatttgcggaagccttggggagcactgaagccaaggctgtaccgtaccaaaaatttgaggcacacccgaatgatctgtacgtggaaggactgccagaaaacattcctttccgaagtccctcatggtatggaatcccaaggctggaaaaaatcattcaagtgggcaatcgaattaaatttgttattaaaagaccagaacttctgactcacagtaccactgaagttactcagccaagaacgaatacaccagtcaaggaagattggaatgtcagaattaccaagctacggaagcaagtggaagagatttttaatttgaaatttgctcaagctcttggactcaccgaggcagtaaaagtaccatatcctgtgtttgaatcaaacccggagttcttgtatgtggaaggcttgccagaggggattcccttccgaagccctacctggtttggaattccacgacttgaaaggatcgtccgcgggagtaataaaatcaagttcgttgttaaaaaacctgaactagttatttcctacttgcctcctgggatggctagtaaaataaacactaaagctttgcagtcccccaaaagaccacgaagtcctgggagtaattcaaaggttcctgaaattgaggtcaccgtggaaggccctaataacaacaatcctcaaacctcagctgttcgaaccccgacccagactaacggttctaacgttcccttcaagccacgagggagagagttttcctttgaggcctggaatgccaaaatcacggacctaaaacagaaagttgaaaatctcttcaatgagaaatgtggggaagctcttggccttaaacaagctgtgaaggtgccgttcgcgttatttgagtctttcccggaagacttttatgtggaaggcttacctgagggtgtgccattccgaagaccatcgacttttggcattccgaggctggagaagatactcagaaacaaagccaaaattaagttcatcattaaaaagcccgaaatgtttgagacggcgattaaggagagcacctcctctaagagccctcccagaaaaataaattcatcacccaatgttaatactactgcatcaggtgttgaagaccttaacatcattcaggtgacaattccagatgatgataatgaaagactctcgaaagttgaaaaagctagacagctaagagaacaagtgaatgacctctttagtcggaaatttggtgaagctattggtatgggttttcctgtgaaagttccctacaggaaaatcacaattaaccctggctgtgtggtggttgatggcatgcccccgggggtgtccttcaaagcccccagctacctggaaatcagctccatgagaaggatcttagactctgccgagtttatcaaattcacggtcattagaccatttccaggacttgtgattaataaccagctggttgatcagagtgagtcagaaggccccgtgatacaagaatcagctgaaccaagccagttggaagttccagccacagaagaaataaaagagactgatggaagctctcagatcaagcaagaaccagaccccacgtggtagacctcttccctcctaggcttaaagtatcagtggttgagaagagcttttcggacctgttactaccccaagctgtgtaatatacttgtataacagaaataccttctatacaaacctttttttctacttttagatagaaatgtctactttttcagcagttctgtgaattaaagagcagagtgactgtgggtctggaatggctggtgtacttgggaatgtactatcaggattttacagcaatgctgggaaatgacagggaaaatgacaggaatgaatctcaccagattttttatgtactcagcagagccttgagttacggtgtttattttccaatcaagtgaagatatctcctacttctcctactggaacatctcagcttctgcagtgaagaaaaattcctgtgatagttcagttctttagtttttctatttgaaaaaaaaaaatcatttaaatgatcctttgttcacggctctccttaatgactgagtgaacagttcctatctgtatatttgactaaaccttttcctaagctatctctcatggttcctatgtttttttatcataattaaaagcaaaaccatctggatcacctaacagtcagaggtcagtatctcagcgtgtgaattatagaggaaatacagagagaacctcttccacttttacttttcgtccaaataaaatgcatggtgtaccagaagttgaagatcgggttgaggattggggctagctcgatgacactaaggccccaacatcgcgggacctgctgtggcgcggattcttaggaacgctgttctagccggccccctctccaggggtcgcgtggccggcattatttcctagttcttcttgtaaccctgaggtgccagcgcggggagtgaggaggggtcagggggctaaggatgcaacctctgacgttctgcgccttcctaggagagtcttacatgtgttgagatttcacaagcaatgcgagttgtaaaataccagctctacaagaagctaggctctgtgacggcatagttttcagtagctttatcacaatattcacaatggagaattatatgacatggtagcagaaataggcccttttatgtgttgcttctattttacctcaaattgtagatatagggtaatcaataaaatccatccatgcctttcacacactaaaaagtcgga

SEQ ID NO: 72428 - DNA, 4477 bp, Homo sapiens
aggaggaggagggtgagagagaagctgggagagcagagaaaaggggccaccggtcgcccccccgcttccccgcacgcgctctccagccgcggccgcccgcctgccgcggtcaccccggcctctgcctctgtcccccagtgatcggatcaaggcgctgagcgaggccctgcctgcggggcggccatgcggcggtgacaggagcgcgaccgacacgcacgggcccctcgccccctctcgcctcccgtccgctcgccagctcccctcagccgaggctgctccgcggcggccgcagcccgcgcgcggcccacactcgcctcccctcggcacccccggccccggagctgcctggaggcggccgcactcggggatcatggcccaagttgcaatgtccaccctccccgttgaagatgaggagtcctcggagagcaggatggtggtgacattcctcatgtcagctctcgagtccatgtgtaaagaactggccaagtccaaagccgaagtggcctgcattgcagtgtatgaaacagacgtgtttgtcgtcggaactgaaagaggacgtgcttttgtcaataccagaaaggattttcaaaaagattttgtaaaatattgtgttgaagaagaagaaaaagctgcagagatgcataaaatgaaatctacaacccaggcaaatcggatgagtgtagatgctgtagaaattgaaacactcagaaaaacagttgaggactatttctgcttttgctatgggaaagctttaggcaaatccacagtggtacctgtaccatatgagaagatgctgcgagaccagtcggctgtggtagtgcaggggcttccggaaggtgttgcctttaaacaccccgagaactatgatcttgcaaccctgaaatggattttggagaacaaagcagggatttcattcatcattaagagaccttttttagagccaaagaagcatgtaggtggtcgtgtgatggtaacagatgctgacaggtcaatactatctccaggtggaagttgtggccccatcaaagtgaaaactgaacccacagaagattctggcatttccctggaaatggcagctgtgacagtaaaggaagaatcagaagatcctgattattatcaatataacattcaaggaagccaccattcttcagagggcaatgaaggcacagaaatggaagtaccagcagaagattctactcaacatgtcccttcagaaacaagtgaggaccctgaagttgaggtgactattgaagatgatgattattctccaccgtctaagagaccaaaggccaatgagctaccgcagccaccagtcccggaacccgccaatgctgggaagcggaaagtgagggagttcaacttcgagaaatggaatgctcgcatcactgatctacgtaaacaagttgaagaattgtttgaaaggaaatatgctcaagccataaaagccaaaggtccggtgacgatcccgtaccctcttttccagtctcatgttgaagatctttatgtagaaggacttcctgaaggaattccttttagaaggccatctacttacggaattcctcgcctggagaggatattacttgcaaaggaaaggattcgttttgtgattaagaaacatgagcttctgaattcaacacgtgaagatttacagcttgataagccagcttcaggagtaaaggaagaatggtatgccagaatcactaaattaagaaagatggtggatcagcttttctgcaaaaaatttgcggaagccttggggagcactgaagccaaggctgtaccgtaccaaaaatttgaggcacacccgaatgatctgtacgtggaaggactgccagaaaacattcctttccgaagtccctcatggtatggaatcccaaggctggaaaaaatcattcaagtgggcaatcgaattaaatttgttattaaaagaccagaacttctgactcacagtaccactgaagttactcagccaagaacgaatacaccagtcaaggaagattggaatgtcagaattaccaagctacggaagcaagtggaagagatttttaatttgaaatttgctcaagctcttggactcaccgaggcagtaaaagtaccatatcctgtgtttgaatcaaacccggagttcttgtatgtggaaggcttgccagaggggattcccttccgaagccctacctggtttggaattccacgacttgaaaggatcgtccgcgggagtaataaaatcaagttcgttgttaaaaaacctgaactagttatttcctacttgcctcctgggatggctagtaaaataaacactaaagctttgcagtcccccaaaagaccacgaagtcctgggagtaattcaaaggttcctgaaattgaggtcaccgtggaaggccctaataacaacaatcctcaaacctcagctgttcgaaccccgacccagactaacggttctaacgttcccttcaagccacgagggagagagttttcctttgaggcctggaatgccaaaatcacggacctaaaacagaaagttgaaaatctcttcaatgagaaatgtggggaagctcttggccttaaacaagctgtgaaggtgccgttcgcgttatttgagtctttcccggaagacttttatgtggaaggcttacctgagggtgtgccattccgaagaccatcgacttttggcattccgaggctggagaagatactcagaaacaaagccaaaattaagttcatcattaaaaagcccgaaatgtttgagacggcgattaaggagagcacctcctctaagagccctcccagaaaaataaattcatcacccaatgttaatactactgcatcaggtgttgaagaccttaacatcattcaggtgacaattccagatgatgataatgaaagactctcgaaagttgaaaaagctagacagctaagagaacaagtgaatgacctctttagtcggaaatttggtgaagctattggtatgggttttcctgtgaaagttccctacaggaaaatcacaattaaccctggctgtgtggtggttgatggcatgcccccgggggtgtccttcaaagcccccagctacctggaaatcagctccatgagaaggatcttagactctgccgagtttatcaaattcacggtcattagaccatttccaggacttgtgattaataaccagctggttgatcagagtgagtcagaaggccccgtgatacaagaatcagctgaaccaagccagttggaagttccagccacagaagaaataaaagagactgatggaagctctcagatcaagcaagaaccagaccccacgtggtagacctcttccctcctaggcttaaagtatcagtggttgagaagagcttttcggacctgttactaccccaagctgtgtaatatacttgtataacagaaataccttctatacaaacctttttttctacttttagatagaaatgtctactttttcagcagttctgtgaattaaagagcagagtgactgtgggtctggaatggctggtgtacttgggaatgtactatcaggattttacagcaatgctgggaaatgacagggaaaatgacaggaatgaatctcaccagattttttatgtactcagcagagccttgagttacggtgtttattttccaatcaagtgaagatatctcctacttctcctactggaacatctcagcttctgcagtgaagaaaaattcctgtgatagttcagttctttagtttttctatttgaaaaaaaaaaatcatttaaatgatcctttgttcacggctctccttaatgactgagtgaacagttcctatctgtatatttgactaaaccttttcctaagctatctctcatggttcctatgtttttttatcataattaaaagcaaaaccatctggatcacctaacagtcagaggtcagtatctcagcgtgtgaattatagaggaaatacagagagaacctcttccacttttacttttcgtccaaataaaatgcatggtgtaccagaagttgaagatcgggttgaggattggggctagctcgatgacactaaggccccaacatcgcgggacctgctgtggcgcggattcttaggaacgctgttctagccggccccctctccaggggtcgcgtggccggcattatttcctagttcttcttgtaaccctgaggtgccagcgcggggagtgaggaggggtcagggggctaaggatgcaacctctgacgttctgcgccttcctaggagagtcttacatgtgttgagatttcacaagcaatgcgagttgtaaaataccagctctacaagaagctaggctctgtgacggcatagttttcagtagctttatcacaatattcacaatggagaattatatgacatggtagcagaaataggcccttttatgtgttgcttctattttacctcaaattgtagatatagggtaatcaataaaatccatccatgcctttcacacactaaaaagtcgga

SEQ ID NO: 72429 - DNA, 3154 bp, Homo sapiens
aggaggaggagggtgagagagaagctgggagagcagagaaaaggggccaccggtcgcccccccgcttccccgcacgcgctctccagccgcggccgcccgcctgccgcggtcaccccggcctctgcctctgtcccccagtgatcggatcaaggcgctgagcgaggccctgcctgcggggcggccatgcggcggtgacaggagcgcgaccgacacgcacgggcccctcgccccctctcgcctcccgtccgctcgccagctcccctcagccgaggctgctccgcggcggccgcagcccgcgcgcggcccacactcgcctcccctcggcacccccggccccggagctgcctggaggcggccgcactcggggatcatggcccaagttgcaatgtccaccctccccgttgaagatgaggagtcctcggagagcaggatggtggtgacattcctcatgtcagctctcgagtccatgtgtaaagaactggccaagtccaaagccgaagtggcctgcattgcagtgtatgaaacagacgtgtttgtcgtcggaactgaaagaggacgtgcttttgtcaataccagaaaggattttcaaaaagattttgtaaaatattgtgttgaagaagaagaaaaagctgcagagatgcataaaatgaaatctacaacccaggcaaatcggatgagtgtagatgctgtagaaattgaaacactcagaaaaacagttgaggactatttctgcttttgctatgggaaagctttaggcaaatccacagtggtacctgtaccatatgagaagatgctgcgagaccagtcggctgtggtagtgcaggggcttccggaaggtgttgcctttaaacaccccgagaactatgatcttgcaaccctgaaatggattttggagaacaaagcagggatttcattcatcattaagagaccttttttagagccaaagaagcatgtaggtggtcgtgtgatggtaacagatgctgacaggtcaatactatctccaggtggaagttgtggccccatcaaagtgaaaactgaacccacagaagattctggcatttccctggaaatggcagctgtgacagtaaaggaagaatcagaagatcctgattattatcaatataacattcaaggaagccaccattcttcagagggcaatgaaggcacagaaatggaagtaccagcagaagatgatgattattctccaccgtctaagagaccaaaggccaatgagctaccgcagccaccagtcccggaacccgccaatgctgggaagcggaaagtgagggagttcaacttcgagaaatggaatgctcgcatcactgatctacgtaaacaagttgaagaattgtttgaaaggaaatatgctcaagccataaaagccaaaggtccggtgacgatcccgtaccctcttttccagtctcatgttgaagatctttatgtagaaggacttcctgaaggaattccttttagaaggccatctacttacggaattcctcgcctggagaggatattacttgcaaaggaaaggattcgttttgtgattaagaaacatgagcttctgaattcaacacgtgaagatttacagcttgataagccagcttcaggagtaaaggaagaatggtatgccagaatcactaaattaagaaagatggtggatcagcttttctgcaaaaaatttgcggaagccttggggagcactgaagccaaggctgtaccgtaccaaaaatttgaggcacacccgaatgatctgtacgtggaaggactgccagaaaacattcctttccgaagtccctcatggtatggaatcccaaggctggaaaaaatcattcaagtgggcaatcgaattaaatttgttattaaaagaccagaacttctgactcacagtaccactgaagttactcagccaagaacgaatacaccagaaataaaagagactgatggaagctctcagatcaagcaagaaccagaccccacgtggtagacctcttccctcctaggcttaaagtatcagtggttgagaagagcttttcggacctgttactaccccaagctgtgtaatatacttgtataacagaaataccttctatacaaacctttttttctacttttagatagaaatgtctactttttcagcagttctgtgaattaaagagcagagtgactgtgggtctggaatggctggtgtacttgggaatgtactatcaggattttacagcaatgctgggaaatgacagggaaaatgacaggaatgaatctcaccagattttttatgtactcagcagagccttgagttacggtgtttattttccaatcaagtgaagatatctcctacttctcctactggaacatctcagcttctgcagtgaagaaaaattcctgtgatagttcagttctttagtttttctatttgaaaaaaaaaaatcatttaaatgatcctttgttcacggctctccttaatgactgagtgaacagttcctatctgtatatttgactaaaccttttcctaagctatctctcatggttcctatgtttttttatcataattaaaagcaaaaccatctggatcacctaacagtcagaggtcagtatctcagcgtgtgaattatagaggaaatacagagagaacctcttccacttttacttttcgtccaaataaaatgcatggtgtaccagaagttgaagatcgggttgaggattggggctagctcgatgacactaaggccccaacatcgcgggacctgctgtggcgcggattcttaggaacgctgttctagccggccccctctccaggggtcgcgtggccggcattatttcctagttcttcttgtaaccctgaggtgccagcgcggggagtgaggaggggtcagggggctaaggatgcaacctctgacgttctgcgccttcctaggagagtcttacatgtgttgagatttcacaagcaatgcgagttgtaaaataccagctctacaagaagctaggctctgtgacggcatagttttcagtagctttatcacaatattcacaatggagaattatatgacatggtagcagaaataggcccttttatgtgttgcttctattttacctcaaattgtagatatagggtaatcaataaaatccatccatgcctttcacacactaaaaagtcgga

SEQ ID NO: 72430 - DNA, 4414 bp, Homo sapiens
aggaggaggagggtgagagagaagctgggagagcagagaaaaggggccaccggtcgcccccccgcttccccgcacgcgctctccagccgcggccgcccgcctgccgcggtcaccccggcctctgcctctgtcccccagtgatcggatcaaggcgctgagcgaggccctgcctgcggggcggccatgcggcggtgacaggagcgcgaccgacacgcacgggcccctcgccccctctcgcctcccgtccgctcgccagctcccctcagccgaggctgctccgcggcggccgcagcccgcgcgcggcccacactcgcctcccctcggcacccccggccccggagctgcctggaggcggccgcactcggggatcatggcccaagttgcaatgtccaccctccccgttgaagatgaggagtcctcggagagcaggatggtggtgacattcctcatgtcagctctcgagtccatgtgtaaagaactggccaagtccaaagccgaagtggcctgcattgcagtgtatgaaacagacgtgtttgtcgtcggaactgaaagaggacgtgcttttgtcaataccagaaaggattttcaaaaagattttgtaaaatattgtgttgaagaagaagaaaaagctgcagagatgcataaaatgaaatctacaacccaggcaaatcggatgagtgtagatgctgtagaaattgaaacactcagaaaaacagttgaggactatttctgcttttgctatgggaaagctttaggcaaatccacagtggtacctgtaccatatgagaagatgctgcgagaccagtcggctgtggtagtgcaggggcttccggaaggtgttgcctttaaacaccccgagaactatgatcttgcaaccctgaaatggattttggagaacaaagcagggatttcattcatcattaagagaccttttttagagccaaagaagcatgtaggtggtcgtgtgatggtaacagatgctgacaggtcaatactatctccaggtggaagttgtggccccatcaaagtgaaaactgaacccacagaagattctggcatttccctggaaatggcagctgtgacagtaaaggaagaatcagaagatcctgattattatcaatataacattcaaggaagccaccattcttcagagggcaatgaaggcacagaaatggaagtaccagcagaagatgatgattattctccaccgtctaagagaccaaaggccaatgagctaccgcagccaccagtcccggaacccgccaatgctgggaagcggaaagtgagggagttcaacttcgagaaatggaatgctcgcatcactgatctacgtaaacaagttgaagaattgtttgaaaggaaatatgctcaagccataaaagccaaaggtccggtgacgatcccgtaccctcttttccagtctcatgttgaagatctttatgtagaaggacttcctgaaggaattccttttagaaggccatctacttacggaattcctcgcctggagaggatattacttgcaaaggaaaggattcgttttgtgattaagaaacatgagcttctgaattcaacacgtgaagatttacagcttgataagccagcttcaggagtaaaggaagaatggtatgccagaatcactaaattaagaaagatggtggatcagcttttctgcaaaaaatttgcggaagccttggggagcactgaagccaaggctgtaccgtaccaaaaatttgaggcacacccgaatgatctgtacgtggaaggactgccagaaaacattcctttccgaagtccctcatggtatggaatcccaaggctggaaaaaatcattcaagtgggcaatcgaattaaatttgttattaaaagaccagaacttctgactcacagtaccactgaagttactcagccaagaacgaatacaccagtcaaggaagattggaatgtcagaattaccaagctacggaagcaagtggaagagatttttaatttgaaatttgctcaagctcttggactcaccgaggcagtaaaagtaccatatcctgtgtttgaatcaaacccggagttcttgtatgtggaaggcttgccagaggggattcccttccgaagccctacctggtttggaattccacgacttgaaaggatcgtccgcgggagtaataaaatcaagttcgttgttaaaaaacctgaactagttatttcctacttgcctcctgggatggctagtaaaataaacactaaagctttgcagtcccccaaaagaccacgaagtcctgggagtaattcaaaggttcctgaaattgaggtcaccgtggaaggccctaataacaacaatcctcaaacctcagctgttcgaaccccgacccagactaacggttctaacgttcccttcaagccacgagggagagagttttcctttgaggcctggaatgccaaaatcacggacctaaaacagaaagttgaaaatctcttcaatgagaaatgtggggaagctcttggccttaaacaagctgtgaaggtgccgttcgcgttatttgagtctttcccggaagacttttatgtggaaggcttacctgagggtgtgccattccgaagaccatcgacttttggcattccgaggctggagaagatactcagaaacaaagccaaaattaagttcatcattaaaaagcccgaaatgtttgagacggcgattaaggagagcacctcctctaagagccctcccagaaaaataaattcatcacccaatgttaatactactgcatcaggtgttgaagaccttaacatcattcaggtgacaattccagatgatgataatgaaagactctcgaaagttgaaaaagctagacagctaagagaacaagtgaatgacctctttagtcggaaatttggtgaagctattggtatgggttttcctgtgaaagttccctacaggaaaatcacaattaaccctggctgtgtggtggttgatggcatgcccccgggggtgtccttcaaagcccccagctacctggaaatcagctccatgagaaggatcttagactctgccgagtttatcaaattcacggtcattagaccatttccaggacttgtgattaataaccagctggttgatcagagtgagtcagaaggccccgtgatacaagaatcagctgaaccaagccagttggaagttccagccacagaagaaataaaagagactgatggaagctctcagatcaagcaagaaccagaccccacgtggtagacctcttccctcctaggcttaaagtatcagtggttgagaagagcttttcggacctgttactaccccaagctgtgtaatatacttgtataacagaaataccttctatacaaacctttttttctacttttagatagaaatgtctactttttcagcagttctgtgaattaaagagcagagtgactgtgggtctggaatggctggtgtacttgggaatgtactatcaggattttacagcaatgctgggaaatgacagggaaaatgacaggaatgaatctcaccagattttttatgtactcagcagagccttgagttacggtgtttattttccaatcaagtgaagatatctcctacttctcctactggaacatctcagcttctgcagtgaagaaaaattcctgtgatagttcagttctttagtttttctatttgaaaaaaaaaaatcatttaaatgatcctttgttcacggctctccttaatgactgagtgaacagttcctatctgtatatttgactaaaccttttcctaagctatctctcatggttcctatgtttttttatcataattaaaagcaaaaccatctggatcacctaacagtcagaggtcagtatctcagcgtgtgaattatagaggaaatacagagagaacctcttccacttttacttttcgtccaaataaaatgcatggtgtaccagaagttgaagatcgggttgaggattggggctagctcgatgacactaaggccccaacatcgcgggacctgctgtggcgcggattcttaggaacgctgttctagccggccccctctccaggggtcgcgtggccggcattatttcctagttcttcttgtaaccctgaggtgccagcgcggggagtgaggaggggtcagggggctaaggatgcaacctctgacgttctgcgccttcctaggagagtcttacatgtgttgagatttcacaagcaatgcgagttgtaaaataccagctctacaagaagctaggctctgtgacggcatagttttcagtagctttatcacaatattcacaatggagaattatatgacatggtagcagaaataggcccttttatgtgttgcttctattttacctcaaattgtagatatagggtaatcaataaaatccatccatgcctttcacacactaaaaagtcgga

SEQ ID NO: 72431 - DNA, 4474 bp, Homo sapiens
aggaggaggagggtgagagagaagctgggagagcagagaaaaggggccaccggtcgcccccccgcttccccgcacgcgctctccagccgcggccgcccgcctgccgcggtcaccccggcctctgcctctgtcccccagtgatcggatcaaggcgctgagcgaggccctgcctgcggggcggccatgcggcggtgacaggagcgcgaccgacacgcacgggcccctcgccccctctcgcctcccgtccgctcgccagctcccctcagccgaggctgctccgcggcggccgcagcccgcgcgcggcccacactcgcctcccctcggcacccccggccccggagctgcctggaggcggccgcactcggggatcatggcccaagttgcaatgtccaccctccccgttgaagatgaggagtcctcggagagcaggatggtggtgacattcctcatgtcagctctcgagtccatgtgtaaagaactggccaagtccaaagccgaagtggcctgcattgcagtgtatgaaacagacgtgtttgtcgtcggaactgaaagaggacgtgcttttgtcaataccagaaaggattttcaaaaagattttgtaaaatattgtgttgaagaagaagaaaaagctgcagagatgcataaaatgaaatctacaacccaggcaaatcggatgagtgtagatgctgtagaaattgaaacactcagaaaaacagttgaggactatttctgcttttgctatgggaaagctttaggcaaatccacagtggtacctgtaccatatgagaagatgctgcgagaccagtcggctgtggtagtgcaggggcttccggaaggtgttgcctttaaacaccccgagaactatgatcttgcaaccctgaaatggattttggagaacaaagcagggatttcattcatcattaagagaccttttttagagccaaagaagcatgtaggtggtcgtgtgatggtaacagatgctgacaggtcaatactatctccaggtggaagttgtggccccatcaaagtgaaaactgaacccacagaagattctggcatttccctggaaatggcagctgtgacagtaaaggaagaatcagaagatcctgattattatcaatataacattcaagcaggcccttctgaaactgatgatgttgatgaaaaacagcccctatcgaagcctttgcaaggaagccaccattcttcagagggcaatgaaggcacagaaatggaagtaccagcagaagatgatgattattctccaccgtctaagagaccaaaggccaatgagctaccgcagccaccagtcccggaacccgccaatgctgggaagcggaaagtgagggagttcaacttcgagaaatggaatgctcgcatcactgatctacgtaaacaagttgaagaattgtttgaaaggaaatatgctcaagccataaaagccaaaggtccggtgacgatcccgtaccctcttttccagtctcatgttgaagatctttatgtagaaggacttcctgaaggaattccttttagaaggccatctacttacggaattcctcgcctggagaggatattacttgcaaaggaaaggattcgttttgtgattaagaaacatgagcttctgaattcaacacgtgaagatttacagcttgataagccagcttcaggagtaaaggaagaatggtatgccagaatcactaaattaagaaagatggtggatcagcttttctgcaaaaaatttgcggaagccttggggagcactgaagccaaggctgtaccgtaccaaaaatttgaggcacacccgaatgatctgtacgtggaaggactgccagaaaacattcctttccgaagtccctcatggtatggaatcccaaggctggaaaaaatcattcaagtgggcaatcgaattaaatttgttattaaaagaccagaacttctgactcacagtaccactgaagttactcagccaagaacgaatacaccagtcaaggaagattggaatgtcagaattaccaagctacggaagcaagtggaagagatttttaatttgaaatttgctcaagctcttggactcaccgaggcagtaaaagtaccatatcctgtgtttgaatcaaacccggagttcttgtatgtggaaggcttgccagaggggattcccttccgaagccctacctggtttggaattccacgacttgaaaggatcgtccgcgggagtaataaaatcaagttcgttgttaaaaaacctgaactagttatttcctacttgcctcctgggatggctagtaaaataaacactaaagctttgcagtcccccaaaagaccacgaagtcctgggagtaattcaaaggttcctgaaattgaggtcaccgtggaaggccctaataacaacaatcctcaaacctcagctgttcgaaccccgacccagactaacggttctaacgttcccttcaagccacgagggagagagttttcctttgaggcctggaatgccaaaatcacggacctaaaacagaaagttgaaaatctcttcaatgagaaatgtggggaagctcttggccttaaacaagctgtgaaggtgccgttcgcgttatttgagtctttcccggaagacttttatgtggaaggcttacctgagggtgtgccattccgaagaccatcgacttttggcattccgaggctggagaagatactcagaaacaaagccaaaattaagttcatcattaaaaagcccgaaatgtttgagacggcgattaaggagagcacctcctctaagagccctcccagaaaaataaattcatcacccaatgttaatactactgcatcaggtgttgaagaccttaacatcattcaggtgacaattccagatgatgataatgaaagactctcgaaagttgaaaaagctagacagctaagagaacaagtgaatgacctctttagtcggaaatttggtgaagctattggtatgggttttcctgtgaaagttccctacaggaaaatcacaattaaccctggctgtgtggtggttgatggcatgcccccgggggtgtccttcaaagcccccagctacctggaaatcagctccatgagaaggatcttagactctgccgagtttatcaaattcacggtcattagaccatttccaggacttgtgattaataaccagctggttgatcagagtgagtcagaaggccccgtgatacaagaatcagctgaaccaagccagttggaagttccagccacagaagaaataaaagagactgatggaagctctcagatcaagcaagaaccagaccccacgtggtagacctcttccctcctaggcttaaagtatcagtggttgagaagagcttttcggacctgttactaccccaagctgtgtaatatacttgtataacagaaataccttctatacaaacctttttttctacttttagatagaaatgtctactttttcagcagttctgtgaattaaagagcagagtgactgtgggtctggaatggctggtgtacttgggaatgtactatcaggattttacagcaatgctgggaaatgacagggaaaatgacaggaatgaatctcaccagattttttatgtactcagcagagccttgagttacggtgtttattttccaatcaagtgaagatatctcctacttctcctactggaacatctcagcttctgcagtgaagaaaaattcctgtgatagttcagttctttagtttttctatttgaaaaaaaaaaatcatttaaatgatcctttgttcacggctctccttaatgactgagtgaacagttcctatctgtatatttgactaaaccttttcctaagctatctctcatggttcctatgtttttttatcataattaaaagcaaaaccatctggatcacctaacagtcagaggtcagtatctcagcgtgtgaattatagaggaaatacagagagaacctcttccacttttacttttcgtccaaataaaatgcatggtgtaccagaagttgaagatcgggttgaggattggggctagctcgatgacactaaggccccaacatcgcgggacctgctgtggcgcggattcttaggaacgctgttctagccggccccctctccaggggtcgcgtggccggcattatttcctagttcttcttgtaaccctgaggtgccagcgcggggagtgaggaggggtcagggggctaaggatgcaacctctgacgttctgcgccttcctaggagagtcttacatgtgttgagatttcacaagcaatgcgagttgtaaaataccagctctacaagaagctaggctctgtgacggcatagttttcagtagctttatcacaatattcacaatggagaattatatgacatggtagcagaaataggcccttttatgtgttgcttctattttacctcaaattgtagatatagggtaatcaataaaatccatccatgcctttcacacactaaaaagtcgga

SEQ ID NO: 72432 - DNA, 533 bp, Homo sapiens
tattagagatgttgaccgtgttttctacaaattctgattttaaatgtatattttcaggaaaaataaattcatcacccaatgttaatactactgcatcaggtgttgaagaccttaacatcattcaggtgacaattccaggtatgagttctctgcttccatcagagtttttgggggtctcttcagggcctcttggactttcccaactagagaggtttgctcagctcatccggggactcggatacattacacgttgcctggtgctcctcccagactcctacagcagttgccttccaaatacagttgctctccaaacagcaacggcaagttttggcacttggcatgagctaaatcctgttaaccacccaaatggctagtctgttccttaaaaaaagtctatatgagaccgggcacggtggctcacgcctgtaatcccagcactttgggaggctgaggcaggaggatcgcttgaggtcaggaattcaaaaccagcctagccaacgtggtgaaaccctgactctactaaacatacaaga

SEQ ID NO: 72433 - DNA, 514 bp, Homo sapiens
aggtcatataccagttaaactgccccattttgcctcttagtgtacattgtgagcccactcaaccagttcctgagatactactgggaagctgctgatcaccagtttcaggttttttccatctgttgggaaactgcctatcccttgtgctcgctgcaaccaattattattttagggagacagttaaccgcctgaccatcacccgatgatcgcctgatgttcatgcatccatgactacataaactttttggccgtttgaccaaatggggacatctggcatactgctatcaaccaatataaaactactggagggtggttccaagatggccaaataggaacagctccagtctacagctcccagcatgagtgatgcagaagacgaatgatttctgcatttccaactcagttcacagatcttcaactccagagaactgagtttaaggagctgtacctgggaaattgtgcctgaagctgttcctgaggaatctgcacctggatctaatgtacatgctgagat

SEQ ID NO: 72434 - DNA, 799 bp, Homo sapiens
gtgctaaatagccaacagatattagccttcgtttttcttagtgaagagctcataatcaaaagagaaggtaagcacaaagacaaaaacaagacttaaaaactgtttgattcctgttcactgaatgccatttctttcagggtagatttaaggactttccccttaaagtacagtgctactgactctagattgagggttcaagccaccccgtgggttaacttcaacagatgaaaatttttccttggctacagcaacatccctaatcctgaccagccatggagaggttcggttcttacaaggaaaatgagtgaatgtgggaatggctcaccacattgtgaaaacaaaactcacatcctgctgatggttggctgaggactgtcatgtccacatacaaagaaaagcatgtggcacagttttaggacaaaggtgagcagagatccaccgtggaaaggggcatattttcttatagagagaccatccaaggcatgcccctcggtaagcagtgttggtgggtgaccacggtcacacgcatggaggcttgctttcccctgctcctcatacccactccctagcagtttctggtattgagcacccccttagtcgtgccttgcccagttagccattgatcagcctgtttccagagcaagccatgggtattagattgcagacaggacttagtctccctgttcagtgaagatgtttggaatacagaagtgaccctaagctgttctgaaaagagttgaggtaaatcctattcagtagaacataacagagcaaagggcagacttggtgtttgggacca

SEQ ID NO: 72435 - DNA, 479 bp, Homo sapiens
ctgagctgtggccaacgtttgcagaccaggaatccacactagctctaatcagagagcccttggtgtgcgggaactgccagtctgccgacgtgaaaagagtcccagactgggtaatggtgagccctgaagtcgcaccccagctctgccactcagtgagcacggcaacatccctaatcctgaccagccatggagaggttcggttcttacaaggaaaatgagtgaatgtgggaatggctcaccacattgtgaaaacaaaactcacatcctgctgatggttggctgaggactgtcatgtccacatacaaagtctgcgtgatgcagatgatgctgtttatgaactgaatggcaaagacctttgtggtgagcgagtaattgttgagcatgcccgcggcccacggcgagatggcagttacggttctggacgcagtaagcattcaaagggcatacttttatcagtaacgtgcttttgttatcatgct

SEQ ID NO: 72436 - DNA, 143 bp, Homo sapiens
gatcgagctcggtaccactagtccacggttggctagtgaagagctcataatcaaaagagaaggtaagcacaaagacaaaaacaagacttaaaaagctacagaaacatgactgggcacagtggctcacgcctgtaatcccagca

SEQ ID NO: 72437 - DNA, 2305 bp, Homo sapiens
gtgctcgcgtacgtcgccggggttcggctgcgtccgtcccgccgcccgcccgttgccgccgccgccgctgccgccgtgctctcgctttgcccgccgccgcctaaggggggctggggccggggccagccatcactgccgttgccgggatgccgcgggtgtacatcggccgcctgagctaccaggcccgggagcgcgatgtggagcgcttctttaagggctacgggaagatcctggaggtggatctgaagaacggatatggttttgtggagtttgatgatctgcgtgatgcagatgatgctgtttatgaactgaatggcaaagacctttgtggtgagcgagtaattgttgagcatgcccgcggcccacggcgagatggcagttacggttctggacgcagtggatatggttatagaagaagtggccgagataaatatggccctcctactcgcacagagtacagacttattgtggagaatttgtcaagtcggtgcagctggcaagacctaaaggattatatgcgtcaggcaggagaagtgacttatgcagatgctcacaagggacgcaaaaatgaaggggtgattgaatttgtatcttattctgatatgaaaagagctttggaaaagttggatggaactgaagtcaatgggagaaaaatcagattagttgaagacaagccaggttccagacgacgccggtcctactccagaagccggagtcattcaaggtctcgctctcgaagcagacattcccgtaagagcagaagccgaagtggcagcagcaaaagcagtcattctaagagtagatctcggtccaggtcgggctcccgctcccggagcaagagccggagccggagccagagtcggagccggagcaagaaagagaaaagcaggagccccagcaaggacaagagccgcagccgcagccatagcgctggcaagagccgcagcaagagcaaagaccaagctgaagagaagatccaaaacaatgacaatgtcgggaaacccaagagccggagtcctagcaggcataaaagtaagagcaaaagtcggagcaggagtcaggagaggagagtggaggaggagaagcgagggagtgtgagcaggggcaggagccaggagaagagcctccgccagagtcggagccggagcaggagcaaagcgggcagcaggagccggagcaggagccgcagcaagagcaaggacaagaggaagagcaggaagagaagcagagaggagagccgcagtcgcagtcgcagccgcagcaagagtgagaggagcagaaagcgaggcagcaagcgagacagcaaggcgggcagcagcaagaagaagaagaaggaagacactgaccgctcccagtccagatctccatcccgctccgtgtcaaaggagcgggaacatgccaagtctgaatccagccagagggaaggtcgaggagagagtgagaatgctggcaccaatcaggagacccggtccaggtcgagatccaattccaaatcgaaaccaaaccttccatcagaatcacgctccagatcaaagtcagcttcaaaaacccgatctcggtccaagtctagatccaggtctgcttccagatcgccctcccgatctagatctaggtcccactcaaggtcctaactggctatggccacagctggaactacccgagaagtcttttgtacatgtttggtagccgtagcacaagtgattggagtagaacatgtcactgctgtacatttttaactcccctaatggtgtgtctataattgttaaatctaagtgcttcctctcagtaaagcctcctggcaccaggccttcctgctcgactgaaaaaaattttctctttgaaaatccccttttactcatggcccacagtagaatatccaaaacgccttggctttcaggcctggcctttcctacagggagctcagtaacctggacggctctaaggctggaatgaccacataggtaggtatggtgagttcaaccatttttgctcttgaattgatgcccttcgatgtatgccatttagtgaaagtgctaagtcttaagtttcctaccactttggtttcatatttttggacttaacaaagttgtgaatagcacagtcgaggaaaattgatacctgcagtaacccataggaaataaactgtagagttccatattctggtattgtgattatattgttttatattaaaaaagaaaagaaaagaattttttttaattttatttttccccgtcttgcaaagtatagtgacccctgtttccattaaatttgaataaagactatttttgcttgacaaaaaatcatg

SEQ ID NO: 72438 - DNA, 2466 bp, Homo sapiens
gtgctcgcgtacgtcgccggggttcggctgcgtccgtcccgccgcccgcccgttgccgccgccgccgctgccgccgtgctctcgctttgcccgccgccgcctaaggggggctggggccggggccagccatcactgccgttgccgggatgccgcgggtgtacatcggccgcctgagctaccaggcccgggagcgcgatgtggagcgcttctttaagggctacgggaagatcctggaggtggatctgaagaacggatatggttttgtggagtttgatgatctgcgtgatgcagatgatgctgtttatgaactgaatggcaaagacctttgtggtgagcgagtaattgttgagcatgcccgcggcccacggcgagatggcagttacggttctggacgcagtggatatggttatagaagaagtggccgagataaatatggccctcctactcgcacagagtacagacttattgtggagaatttgtcaagtcggtgcagctggcaagacctaaaggattatatgcgtcaggcaggagaagtgacttatgcagatgctcacaagggacgcaaaaatgaaggggtgattgaatttgtatcttattctgatatgaaaagagctttggaaaagttggatggaactgaagtcaatgggagaaaaatcagattagttgaagacaagccaggttccagacgacgccggtcctactccagaagccggagtcattcaaggtctcgctctcgaagcagacattcccgtaagagcagaagccgaagtggcagcagcaaaagcagtcattctaagagtagatctcggtccaggtcgggctcccgctcccggagcaagagccggagccggagccagagtcggagccggagcaagaaagagaaaagcaggagccccagcaaggacaagagccgcagccgcagccatagcgctggcaagagccgcagcaagagcaaagaccaagctgaagagaagatccaaaacaatgacaatgtcgggaaacccaagagccggagtcctagcaggcataaaagtaagagcaaaagtcggagcaggagtcaggagaggagagtggaggaggagaagcgagggagtgtgagcaggggcaggagccaggagaagagcctccgccagagtcggagccggagcaggagcaaagcgggcagcaggagccggagcaggagccgcagcaagagcaaggacaagaggaagagcaggaagagaagcagagaggagagccgcagtcgcagtcgcagccgcagcaagagtgagaggagcagaaagcgaggcagcaagcgagacagcaaggcgggcagcagcaagaagaagaagaaggaagacactgaccgctcccagtccagatctccatcccgctccgtgtcaaaggagcgggaacatgccaagtctgaatccagccagagggaaggtcgaggagagagtgagaatgctggcaccaatcaggagacccggtccaggtcgagatccaattccaaatcgaaaccaaaccttccatcagaatcacgctccagatcaaagtcagcttcaaaaacccgatctcggtccaagtctagatccaggtctgcttccagatcgccctcccgatctagatctaggtcccactcaaggtcctaactggctatggccacagctggaactacccgagaagtcttttgtacatgtttggtagccgtagcacaagtgattggagtagaacatgtcactgctgtacatttttaactcccctaatggtgtgtctataattgttaaatctaagtgcttcctctcagtaaagcctcctggcaccaggccttcctgctcgactgaaaaaaattttctctttgaaaatccccttttactcatggcccacagtagaatatccaaaacgccttggctttcaggcctggcctttcctacagggagctcagtaacctggacggctctaaggctggaatgaccacataggtaggtatggtgagttcaaccatttttgctcttgaattgatgcccttcgatgtatgccatttagtgaaagtgctaagtcttaagtttcctaccactttggtttcatatttttggacttaacaaagttgtgaatagcacagtcgaggaaaattgatacctgcagtaacccataggaaataaactgtagagttccatattctggtattgtgattatattgttttatattaaaaaagaaaagaaaagaattttttttaattttatttttccccgtcttgcaaagtatagtgacccctgtttccattaaatttgaataaagataacagcacctactgataggcgttggaacgacaacacaacagagcagaacagacgcgagcacaagcacgcagcgccaacaacaaaacaagcgcgccaccgaccacacagaggaacgacaccacccggggggctcccaacggaagaggcggcgaccccggagaagaagggacaaaaaaggagcgacaa

SEQ ID NO: 72439 - DNA, 2280 bp, Homo sapiens
caggtagaggctgggtttaatcggccgagggcgacgccgccgctgccgccgtgctctcgctttgcccgccgccgcctaaggggggctggggccggggccagccatcactgccgttgccgggatgccgcgggtgtacatcggccgcctgagctaccaggcccgggagcgcgatgtggagcgcttctttaagggctacgggaagatcctggaggtggatctgaagaacggatatggttttgtggagtttgatgatctgcgtgatgcagatgatgctgtttatgaactgaatggcaaagacctttgtggtgagcgagtaattgttgagcatgcccgcggcccacggcgagatggcagttacggttctggacgcagtggatatggttatagaagaagtggccgagataaatatggccctcctactcgcacagagtacagacttattgtggagaatttgtcaagtcggtgcagctggcaagacctaaaggattatatgcgtcaggcaggagaagtgacttatgcagatgctcacaagggacgcaaaaatgaaggggtgattgaatttgtatcttattctgatatgaaaagagctttggaaaagttggatggaactgaagtcaatgggagaaaaatcagattagttgaagacaagccaggttccagacgacgccggtcctactccagaagccggagtcattcaaggtctcgctctcgaagcagacattcccgtaagagcagaagccgaagtggcagcagcaaaagcagtcattctaagagtagatctcggtccaggtcgggctcccgctcccggagcaagagccggagccggagccagagtcggagccggagcaagaaagagaaaagcaggagccccagcaaggacaagagccgcagccgcagccatagcgctggcaagagccgcagcaagagcaaagaccaagctgaagagaagatccaaaacaatgacaatgtcgggaaacccaagagccggagtcctagcaggcataaaagtaagagcaaaagtcggagcaggagtcaggagaggagagtggaggaggagaagcgagggagtgtgagcaggggcaggagccaggagaagagcctccgccagagtcggagccggagcaggagcaaagcgggcagcaggagccggagcaggagccgcagcaagagcaaggacaagaggaagagcaggaagagaagcagagaggagagccgcagtcgcagtcgcagccgcagcaagagtgagaggagcagaaagcgaggcagcaagcgagacagcaaggcgggcagcagcaagaagaagaagaaggaagacactgaccgctcccagtccagatctccatcccgctccgtgtcaaaggagcgggaacatgccaagtctgaatccagccagagggaaggtcgaggagagagtgagaatgctggcaccaatcaggagacccggtccaggtcgagatccaattccaaatcgaaaccaaaccttccatcagaatcacgctccagatcaaagtcagcttcaaaaacccgatctcggtccaagtctagatccaggtctgcttccagatcgccctcccgatctagatctaggtcccactcaaggtcctaactggctatggccacagctggaactacccgagaagtcttttgtacatgtttggtagccgtagcacaagtgattggagtagaacatgtcactgctgtacatttttaactcccctaatggtgtgtctataattgttaaatctaagtgcttcctctcagtaaagcctcctggcaccaggccttcctgctcgactgaaaaaaattttctctttgaaaatccccttttactcatggcccacagtagaatatccaaaacgccttggctttcaggcctggcctttcctacagggagctcagtaacctggacggctctaaggctggaatgaccacataggtaggtatggtgagttcaaccatttttgctcttgaattgatgcccttcgatgtatgccatttagtgaaagtgctaagtcttaagtttcctaccactttggtttcatatttttggacttaacaaagttgtgaatagcacagtcgaggaaaattgatacctgcagtaacccataggaaataaactgtagagttccatattctggtattgtgattatattgttttatattaaaaaagaaaagaaaagaattttttttaattttatttttccccgtcttgcaaagtatagtgacccctgtttccattaaatttgaataaagactatttttgcttgacaaaaaatcatg

SEQ ID NO: 72440 - DNA, 2389 bp, Homo sapiens
ctgagctgtggccaacgtttgcagaccaggaatccacactagctctaatcagagagcccttggtgtgcgggaactgccagtctgccgacgtgaaaagagtcccagactgggtaatggtgagccctgaagtcgcaccccagctctgccactcagtgagcacggcaacatccctaatcctgaccagccatggagaggttcggttcttacaaggaaaatgagtgaatgtgggaatggctcaccacattgtgaaaacaaaactcacatcctgctgatggttggctgaggactgtcatgtccacatacaaagaaaagcatgtggcacagttttaggacaaagatatggttttgtggagtttgatgatctgcgtgatgcagatgatgctgtttatgaactgaatggcaaagacctttgtggtgagcgagtaattgttgagcatgcccgcggcccacggcgagatggcagttacggttctggacgcagtggatatggttatagaagaagtggccgagataaatatggccctcctactcgcacagagtacagacttattgtggagaatttgtcaagtcggtgcagctggcaagacctaaaggattatatgcgtcaggcaggagaagtgacttatgcagatgctcacaagggacgcaaaaatgaaggggtgattgaatttgtatcttattctgatatgaaaagagctttggaaaagttggatggaactgaagtcaatgggagaaaaatcagattagttgaagacaagccaggttccagacgacgccggtcctactccagaagccggagtcattcaaggtctcgctctcgaagcagacattcccgtaagagcagaagccgaagtggcagcagcaaaagcagtcattctaagagtagatctcggtccaggtcgggctcccgctcccggagcaagagccggagccggagccagagtcggagccggagcaagaaagagaaaagcaggagccccagcaaggacaagagccgcagccgcagccatagcgctggcaagagccgcagcaagagcaaagaccaagctgaagagaagatccaaaacaatgacaatgtcgggaaacccaagagccggagtcctagcaggcataaaagtaagagcaaaagtcggagcaggagtcaggagaggagagtggaggaggagaagcgagggagtgtgagcaggggcaggagccaggagaagagcctccgccagagtcggagccggagcaggagcaaagcgggcagcaggagccggagcaggagccgcagcaagagcaaggacaagaggaagagcaggaagagaagcagagaggagagccgcagtcgcagtcgcagccgcagcaagagtgagaggagcagaaagcgaggcagcaagcgagacagcaaggcgggcagcagcaagaagaagaagaaggaagacactgaccgctcccagtccagatctccatcccgctccgtgtcaaaggagcgggaacatgccaagtctgaatccagccagagggaaggtcgaggagagagtgagaatgctggcaccaatcaggagacccggtccaggtcgagatccaattccaaatcgaaaccaaaccttccatcagaatcacgctccagatcaaagtcagcttcaaaaacccgatctcggtccaagtctagatccaggtctgcttccagatcgccctcccgatctagatctaggtcccactcaaggtcctaactggctatggccacagctggaactacccgagaagtcttttgtacatgtttggtagccgtagcacaagtgattggagtagaacatgtcactgctgtacatttttaactcccctaatggtgtgtctataattgttaaatctaagtgcttcctctcagtaaagcctcctggcaccaggccttcctgctcgactgaaaaaaattttctctttgaaaatccccttttactcatggcccacagtagaatatccaaaacgccttggctttcaggcctggcctttcctacagggagctcagtaacctggacggctctaaggctggaatgaccacataggtaggtatggtgagttcaaccatttttgctcttgaattgatgcccttcgatgtatgccatttagtgaaagtgctaagtcttaagtttcctaccactttggtttcatatttttggacttaacaaagttgtgaatagcacagtcgaggaaaattgatacctgcagtaacccataggaaataaactgtagagttccatattctggtattgtgattatattgttttatattaaaaaagaaaagaaaagaattttttttaattttatttttccccgtcttgcaaagtatagtgacccctgtttccattaaatttgaataaagactatttttgcttgacaaaaaatcatg

SEQ ID NO: 72441 - DNA, 2162 bp, Homo sapiens
gtgctcgcgtacgtcgccggggttcggctgcgtccgtcccgccgcccgcccgttgccgccgccgccgctgccgccgtgctctcgctttgcccgccgccgcctaaggggggctggggccggggccagccatcactgccgttgccgggatgccgcgggtgtacatcggccgcctgagctaccaggcccgggagcgcgatgtggagcgcttctttaagggctacgggaagatcctggaggtggatctgaagaacgggtggatatggttatagaagaagtggccgagataaatatggccctcctactcgcacagagtacagacttattgtggagaatttgtcaagtcggtgcagctggcaagacctaaaggattatatgcgtcaggcaggagaagtgacttatgcagatgctcacaagggacgcaaaaatgaaggggtgattgaatttgtatcttattctgatatgaaaagagctttggaaaagttggatggaactgaagtcaatgggagaaaaatcagattagttgaagacaagccaggttccagacgacgccggtcctactccagaagccggagtcattcaaggtctcgctctcgaagcagacattcccgtaagagcagaagccgaagtggcagcagcaaaagcagtcattctaagagtagatctcggtccaggtcgggctcccgctcccggagcaagagccggagccggagccagagtcggagccggagcaagaaagagaaaagcaggagccccagcaaggacaagagccgcagccgcagccatagcgctggcaagagccgcagcaagagcaaagaccaagctgaagagaagatccaaaacaatgacaatgtcgggaaacccaagagccggagtcctagcaggcataaaagtaagagcaaaagtcggagcaggagtcaggagaggagagtggaggaggagaagcgagggagtgtgagcaggggcaggagccaggagaagagcctccgccagagtcggagccggagcaggagcaaagcgggcagcaggagccggagcaggagccgcagcaagagcaaggacaagaggaagagcaggaagagaagcagagaggagagccgcagtcgcagtcgcagccgcagcaagagtgagaggagcagaaagcgaggcagcaagcgagacagcaaggcgggcagcagcaagaagaagaagaaggaagacactgaccgctcccagtccagatctccatcccgctccgtgtcaaaggagcgggaacatgccaagtctgaatccagccagagggaaggtcgaggagagagtgagaatgctggcaccaatcaggagacccggtccaggtcgagatccaattccaaatcgaaaccaaaccttccatcagaatcacgctccagatcaaagtcagcttcaaaaacccgatctcggtccaagtctagatccaggtctgcttccagatcgccctcccgatctagatctaggtcccactcaaggtcctaactggctatggccacagctggaactacccgagaagtcttttgtacatgtttggtagccgtagcacaagtgattggagtagaacatgtcactgctgtacatttttaactcccctaatggtgtgtctataattgttaaatctaagtgcttcctctcagtaaagcctcctggcaccaggccttcctgctcgactgaaaaaaattttctctttgaaaatccccttttactcatggcccacagtagaatatccaaaacgccttggctttcaggcctggcctttcctacagggagctcagtaacctggacggctctaaggctggaatgaccacataggtaggtatggtgagttcaaccatttttgctcttgaattgatgcccttcgatgtatgccatttagtgaaagtgctaagtcttaagtttcctaccactttggtttcatatttttggacttaacaaagttgtgaatagcacagtcgaggaaaattgatacctgcagtaacccataggaaataaactgtagagttccatattctggtattgtgattatattgttttatattaaaaaagaaaagaaaagaattttttttaattttatttttccccgtcttgcaaagtatagtgacccctgtttccattaaatttgaataaagactatttttgcttgacaaaaaatcatg

SEQ ID NO: 72442 - DNA, 1971 bp, Homo sapiens
ctgtgtcattttttttccttttcttccactgaaataatcttatttatttgaaccttccaaaggtggatatggttatagaagaagtggccgagataaatatggccctcctactcgcacagagtacagacttattgtggagaatttgtcaagtcggtgcagctggcaagacctaaaggattatatgcgtcaggcaggagaagtgacttatgcagatgctcacaagggacgcaaaaatgaaggggtgattgaatttgtatcttattctgatatgaaaagagctttggaaaagttggatggaactgaagtcaatgggagaaaaatcagattagttgaagacaagccaggttccagacgacgccggtcctactccagaagccggagtcattcaaggtctcgctctcgaagcagacattcccgtaagagcagaagccgaagtggcagcagcaaaagcagtcattctaagagtagatctcggtccaggtcgggctcccgctcccggagcaagagccggagccggagccagagtcggagccggagcaagaaagagaaaagcaggagccccagcaaggacaagagccgcagccgcagccatagcgctggcaagagccgcagcaagagcaaagaccaagctgaagagaagatccaaaacaatgacaatgtcgggaaacccaagagccggagtcctagcaggcataaaagtaagagcaaaagtcggagcaggagtcaggagaggagagtggaggaggagaagcgagggagtgtgagcaggggcaggagccaggagaagagcctccgccagagtcggagccggagcaggagcaaagcgggcagcaggagccggagcaggagccgcagcaagagcaaggacaagaggaagagcaggaagagaagcagagaggagagccgcagtcgcagtcgcagccgcagcaagagtgagaggagcagaaagcgaggcagcaagcgagacagcaaggcgggcagcagcaagaagaagaagaaggaagacactgaccgctcccagtccagatctccatcccgctccgtgtcaaaggagcgggaacatgccaagtctgaatccagccagagggaaggtcgaggagagagtgagaatgctggcaccaatcaggagacccggtccaggtcgagatccaattccaaatcgaaaccaaaccttccatcagaatcacgctccagatcaaagtcagcttcaaaaacccgatctcggtccaagtctagatccaggtctgcttccagatcgccctcccgatctagatctaggtcccactcaaggtcctaactggctatggccacagctggaactacccgagaagtcttttgtacatgtttggtagccgtagcacaagtgattggagtagaacatgtcactgctgtacatttttaactcccctaatggtgtgtctataattgttaaatctaagtgcttcctctcagtaaagcctcctggcaccaggccttcctgctcgactgaaaaaaattttctctttgaaaatccccttttactcatggcccacagtagaatatccaaaacgccttggctttcaggcctggcctttcctacagggagctcagtaacctggacggctctaaggctggaatgaccacataggtaggtatggtgagttcaaccatttttgctcttgaattgatgcccttcgatgtatgccatttagtgaaagtgctaagtcttaagtttcctaccactttggtttcatatttttggacttaacaaagttgtgaatagcacagtcgaggaaaattgatacctgcagtaacccataggaaataaactgtagagttccatattctggtattgtgattatattgttttatattaaaaaagaaaagaaaagaattttttttaattttatttttccccgtcttgcaaagtatagtgacccctgtttccattaaatttgaataaagactatttttgcttgacaaaaaatcatg

SEQ ID NO: 72443 - DNA, 2215 bp, Homo sapiens
gtgctcgcgtacgtcgccggggttcggctgcgtccgtcccgccgcccgcccgttgccgccgccgccgctgccgccgtgctctcgctttgcccgccgccgcctaaggggggctggggccggggccagccatcactgccgttgccgggatgccgcgggtgtacatcggccgcctgagctaccaggcccgggagcgcgatgtggagcgcttctttaagggctacgggaagatcctggaggtggatctgaagaacggatatggttttgtggagtttgatgatctgcgtgatgcagatgatgctgtttatgaactgaatggcaaagacctttgtggtgagcgagtaattgttgagcatgcccgcggcccacggcgagatggcagttacggttctggacgcagtggatatggttatagaagaagtggccgagataaatatggccctcctactcgcacagagtacagacttattgtggagaatttgtcaagtcggtgcagctggcaagacctaaaggattatatgcgtcaggcaggagaagtgacttatgcagatgctcacaagggacgcaaaaatgaaggggtgattgaatttgtatcttattctgatatgaaaagagctttggaaaagttggatggaactgaagtcaatgggagaaaaatcagattagttgaagacaagccaggttccagacgacgccggtcctactccagaagccggagtcattcaaggtcgggctcccgctcccggagcaagagccggagccggagccagagtcggagccggagcaagaaagagaaaagcaggagccccagcaaggacaagagccgcagccgcagccatagcgctggcaagagccgcagcaagagcaaagaccaagctgaagagaagatccaaaacaatgacaatgtcgggaaacccaagagccggagtcctagcaggcataaaagtaagagcaaaagtcggagcaggagtcaggagaggagagtggaggaggagaagcgagggagtgtgagcaggggcaggagccaggagaagagcctccgccagagtcggagccggagcaggagcaaagcgggcagcaggagccggagcaggagccgcagcaagagcaaggacaagaggaagagcaggaagagaagcagagaggagagccgcagtcgcagtcgcagccgcagcaagagtgagaggagcagaaagcgaggcagcaagcgagacagcaaggcgggcagcagcaagaagaagaagaaggaagacactgaccgctcccagtccagatctccatcccgctccgtgtcaaaggagcgggaacatgccaagtctgaatccagccagagggaaggtcgaggagagagtgagaatgctggcaccaatcaggagacccggtccaggtcgagatccaattccaaatcgaaaccaaaccttccatcagaatcacgctccagatcaaagtcagcttcaaaaacccgatctcggtccaagtctagatccaggtctgcttccagatcgccctcccgatctagatctaggtcccactcaaggtcctaactggctatggccacagctggaactacccgagaagtcttttgtacatgtttggtagccgtagcacaagtgattggagtagaacatgtcactgctgtacatttttaactcccctaatggtgtgtctataattgttaaatctaagtgcttcctctcagtaaagcctcctggcaccaggccttcctgctcgactgaaaaaaattttctctttgaaaatccccttttactcatggcccacagtagaatatccaaaacgccttggctttcaggcctggcctttcctacagggagctcagtaacctggacggctctaaggctggaatgaccacataggtaggtatggtgagttcaaccatttttgctcttgaattgatgcccttcgatgtatgccatttagtgaaagtgctaagtcttaagtttcctaccactttggtttcatatttttggacttaacaaagttgtgaatagcacagtcgaggaaaattgatacctgcagtaacccataggaaataaactgtagagttccatattctggtattgtgattatattgttttatattaaaaaagaaaagaaaagaattttttttaattttatttttccccgtcttgcaaagtatagtgacccctgtttccattaaatttgaataaagactatttttgcttgacaaaaaatcatg

SEQ ID NO: 72444 - DNA, 1632 bp, Homo sapiens
aacatgagcagagtgcgaggctggctgcaaatcggccgagggtcgtccaaggtctcgctctcgaagcagacattcccgtaagagcagaagccgaagtggcagcagcaaaagcagtcattctaagagtagatctcggtccaggtcgggctcccgctcccggagcaagagccggagccggagccagagtcggagccggagcaagaaagagaaaagcaggagccccagcaaggacaagagccgcagccgcagccatagcgctggcaagagccgcagcaagagcaaagaccaagctgaagagaagatccaaaacaatgacaatgtcgggaaacccaagagccggagtcctagcaggcataaaagtaagagcaaaagtcggagcaggagtcaggagaggagagtggaggaggagaagcgagggagtgtgagcaggggcaggagccaggagaagagcctccgccagagtcggagccggagcaggagcaaagcgggcagcaggagccggagcaggagccgcagcaagagcaaggacaagaggaagagcaggaagagaagcagagaggagagccgcagtcgcagtcgcagccgcagcaagagtgagaggagcagaaagcgaggcagcaagcgagacagcaaggcgggcagcagcaagaagaagaagaaggaagacactgaccgctcccagtccagatctccatcccgctccgtgtcaaaggagcgggaacatgccaagtctgaatccagccagagggaaggtcgaggagagagtgagaatgctggcaccaatcaggagacccggtccaggtcgagatccaattccaaatcgaaaccaaaccttccatcagaatcacgctccagatcaaagtcagcttcaaaaacccgatctcggtccaagtctagatccaggtctgcttccagatcgccctcccgatctagatctaggtcccactcaaggtcctaactggctatggccacagctggaactacccgagaagtcttttgtacatgtttggtagccgtagcacaagtgattggagtagaacatgtcactgctgtacatttttaactcccctaatggtgtgtctataattgttaaatctaagtgcttcctctcagtaaagcctcctggcaccaggccttcctgctcgactgaaaaaaattttctctttgaaaatccccttttactcatggcccacagtagaatatccaaaacgccttggctttcaggcctggcctttcctacagggagctcagtaacctggacggctctaaggctggaatgaccacataggtaggtatggtgagttcaaccatttttgctcttgaattgatgcccttcgatgtatgccatttagtgaaagtgctaagtcttaagtttcctaccactttggtttcatatttttggacttaacaaagttgtgaatagcacagtcgaggaaaattgatacctgcagtaacccataggaaataaactgtagagttccatattctggtattgtgattatattgttttatattaaaaaagaaaagaaaagaattttttttaattttatttttccccgtcttgcaaagtatagtgacccctgtttccattaaatttgaataaagactatttttgcttgacaaaaaatcatg

SEQ ID NO: 72445 - DNA, 1881 bp, Homo sapiens
ctgtgtcattttttttccttttcttccactgaaataatcttatttatttgaaccttccaaaggtggatatggttatagaagaagtggccgagataaatatggccctcctactcgcacagagtacagacttattgtggagaatttgtcaagtcggtgcagctggcaagacctaaaggattatatgcgtcaggcaggagaagtgacttatgcagatgctcacaagggacgcaaaaatgaaggggtgattgaatttgtatcttattctgatatgaaaagagctttggaaaagttggatggaactgaagtcaatgggagaaaaatcagattagttgaagacaagccaggttccagacgacgccggtcctactccagaagccggagtcattcaaggtcgggctcccgctcccggagcaagagccggagccggagccagagtcggagccggagcaagaaagagaaaagcaggagccccagcaaggacaagagccgcagccgcagccatagcgctggcaagagccgcagcaagagcaaagaccaagctgaagagaagatccaaaacaatgacaatgtcgggaaacccaagagccggagtcctagcaggcataaaagtaagagcaaaagtcggagcaggagtcaggagaggagagtggaggaggagaagcgagggagtgtgagcaggggcaggagccaggagaagagcctccgccagagtcggagccggagcaggagcaaagcgggcagcaggagccggagcaggagccgcagcaagagcaaggacaagaggaagagcaggaagagaagcagagaggagagccgcagtcgcagtcgcagccgcagcaagagtgagaggagcagaaagcgaggcagcaagcgagacagcaaggcgggcagcagcaagaagaagaagaaggaagacactgaccgctcccagtccagatctccatcccgctccgtgtcaaaggagcgggaacatgccaagtctgaatccagccagagggaaggtcgaggagagagtgagaatgctggcaccaatcaggagacccggtccaggtcgagatccaattccaaatcgaaaccaaaccttccatcagaatcacgctccagatcaaagtcagcttcaaaaacccgatctcggtccaagtctagatccaggtctgcttccagatcgccctcccgatctagatctaggtcccactcaaggtcctaactggctatggccacagctggaactacccgagaagtcttttgtacatgtttggtagccgtagcacaagtgattggagtagaacatgtcactgctgtacatttttaactcccctaatggtgtgtctataattgttaaatctaagtgcttcctctcagtaaagcctcctggcaccaggccttcctgctcgactgaaaaaaattttctctttgaaaatccccttttactcatggcccacagtagaatatccaaaacgccttggctttcaggcctggcctttcctacagggagctcagtaacctggacggctctaaggctggaatgaccacataggtaggtatggtgagttcaaccatttttgctcttgaattgatgcccttcgatgtatgccatttagtgaaagtgctaagtcttaagtttcctaccactttggtttcatatttttggacttaacaaagttgtgaatagcacagtcgaggaaaattgatacctgcagtaacccataggaaataaactgtagagttccatattctggtattgtgattatattgttttatattaaaaaagaaaagaaaagaattttttttaattttatttttccccgtcttgcaaagtatagtgacccctgtttccattaaatttgaataaagactatttttgcttgacaaaaaatcatg

SEQ ID NO: 72446 - DNA, 1874 bp, Homo sapiens
tcacgggttcaagcgattctcctgcctcagcctcctgagtagctcggtttacaggcgtgtgccagcatgcctggctaatttttggtatttttagtagagacggggcttcaccatgttggccaggctggctcttgaactcctgacctcgcgatccgcctgccttggcctctcaaagtgctgggattatgggcatgagccgccgcacctggccagtttttccagcttctgattggcattgtgagggttcagaaaacaatcctcagccagtgccagccatgctttatattggggggtgtaactccacatgtatgccctttggtctttttatctcctgattagcatgaagtcacatgtgacacaaacagtatcccatgtctcctcaggtcgggctcccgctcccggagcaagagccggagccggagccagagtcggagccggagcaagaaagagaaaagcaggagccccagcaaggacaagagccgcagccgcagccatagcgctggcaagagccgcagcaagagcaaagaccaagctgaagagaagatccaaaacaatgacaatgtcgggaaacccaagagccggagtcctagcaggcataaaagtaagagcaaaagtcggagcaggagtcaggagaggagagtggaggaggagaagcgagggagtgtgagcaggggcaggagccaggagaagagcctccgccagagtcggagccggagcaggagcaaagcgggcagcaggagccggagcaggagccgcagcaagagcaaggacaagaggaagagcaggaagagaagcagagaggagagccgcagtcgcagtcgcagccgcagcaagagtgagaggagcagaaagcgaggcagcaagcgagacagcaaggcgggcagcagcaagaagaagaagaaggaagacactgaccgctcccagtccagatctccatcccgctccgtgtcaaaggagcgggaacatgccaagtctgaatccagccagagggaaggtcgaggagagagtgagaatgctggcaccaatcaggagacccggtccaggtcgagatccaattccaaatcgaaaccaaaccttccatcagaatcacgctccagatcaaagtcagcttcaaaaacccgatctcggtccaagtctagatccaggtctgcttccagatcgccctcccgatctagatctaggtcccactcaaggtcctaactggctatggccacagctggaactacccgagaagtcttttgtacatgtttggtagccgtagcacaagtgattggagtagaacatgtcactgctgtacatttttaactcccctaatggtgtgtctataattgttaaatctaagtgcttcctctcagtaaagcctcctggcaccaggccttcctgctcgactgaaaaaaattttctctttgaaaatccccttttactcatggcccacagtagaatatccaaaacgccttggctttcaggcctggcctttcctacagggagctcagtaacctggacggctctaaggctggaatgaccacataggtaggtatggtgagttcaaccatttttgctcttgaattgatgcccttcgatgtatgccatttagtgaaagtgctaagtcttaagtttcctaccactttggtttcatatttttggacttaacaaagttgtgaatagcacagtcgaggaaaattgatacctgcagtaacccataggaaataaactgtagagttccatattctggtattgtgattatattgttttatattaaaaaagaaaagaaaagaattttttttaattttatttttccccgtcttgcaaagtatagtgacccctgtttccattaaatttgaataaagactatttttgcttgacaaaaaatcatg

SEQ ID NO: 72447 - DNA, 1820 bp, Homo sapiens
tcacgggttcaagcgattctcctgcctcagcctcctgagtagctcggtttacaggcgtgtgccagcatgcctggctaatttttggtatttttagtagagacggggcttcaccatgttggccaggctggctcttgaactcctgacctcgcgatccgcctgccttggcctctcaaagtgctgggattatgggcatgagccgccgcacctggccagtttttccagcttctgattggcattgtgagggttcagaaaacaatcctcagccagtgccagccatgctttatattggggggtgtaactccacatgtatgccctttggtctttttatctcctgattagcatgaagtcacatgtgacacaaacagtatcccatgtctcctcaggtcgggctcccgctcccggagcaagagccggagccggagccagagtcggagccggagcaagaaagagaaaagcaggagccccagcaaggacaagagccgcagccgcagccatagcgctggcaagagccgcagcaagagcaaagaccaagctgaagagaagatccaaaacaatgacaatgtcgggaaacccaagagccggagtcctagcaggcataaaagtaggagtgtgagcaggggcaggagccaggagaagagcctccgccagagtcggagccggagcaggagcaaagcgggcagcaggagccggagcaggagccgcagcaagagcaaggacaagaggaagagcaggaagagaagcagagaggagagccgcagtcgcagtcgcagccgcagcaagagtgagaggagcagaaagcgaggcagcaagcgagacagcaaggcgggcagcagcaagaagaagaagaaggaagacactgaccgctcccagtccagatctccatcccgctccgtgtcaaaggagcgggaacatgccaagtctgaatccagccagagggaaggtcgaggagagagtgagaatgctggcaccaatcaggagacccggtccaggtcgagatccaattccaaatcgaaaccaaaccttccatcagaatcacgctccagatcaaagtcagcttcaaaaacccgatctcggtccaagtctagatccaggtctgcttccagatcgccctcccgatctagatctaggtcccactcaaggtcctaactggctatggccacagctggaactacccgagaagtcttttgtacatgtttggtagccgtagcacaagtgattggagtagaacatgtcactgctgtacatttttaactcccctaatggtgtgtctataattgttaaatctaagtgcttcctctcagtaaagcctcctggcaccaggccttcctgctcgactgaaaaaaattttctctttgaaaatccccttttactcatggcccacagtagaatatccaaaacgccttggctttcaggcctggcctttcctacagggagctcagtaacctggacggctctaaggctggaatgaccacataggtaggtatggtgagttcaaccatttttgctcttgaattgatgcccttcgatgtatgccatttagtgaaagtgctaagtcttaagtttcctaccactttggtttcatatttttggacttaacaaagttgtgaatagcacagtcgaggaaaattgatacctgcagtaacccataggaaataaactgtagagttccatattctggtattgtgattatattgttttatattaaaaaagaaaagaaaagaattttttttaattttatttttccccgtcttgcaaagtatagtgacccctgtttccattaaatttgaataaagactatttttgcttgacaaaaaatcatg

SEQ ID NO: 72448 - DNA, 2044 bp, Homo sapiens
gtgctcgcgtacgtcgccggggttcggctgcgtccgtcccgccgcccgcccgttgccgccgccgccgctgccgccgtgctctcgctttgcccgccgccgcctaaggggggctggggccggggccagccatcactgccgttgccgggatgccgcgggtgtacatcggccgcctgagctaccaggcccgggagcgcgatgtggagcgcttctttaagggctacgggaagatcctggaggtggatctgaagaacggatatggttttgtggagtttgatgatctgcgtgatgcagatgatgctgtttatgaactgaatggcaaagacctttgtggtgagcgagtaattgttgagcatgcccgcggcccacggcgagatggcagttacggttctggacgcagtggatatggttatagaagaagtggccgagataaatatggccctcctactcgcacagagtacagacttattgtggagaatttgtcaagtcggtgcagctggcaagacctaaaggattatatgcgtcaggcaggagaagtgacttatgcagatgctcacaagggacgcaaaaatgaaggggtgattgaatttgtatcttattctgatatgaaaagagctttggaaaagttggatggaactgaagtcaatgggagaaaaatcagattagttgaagacaagccaggttccagacgacgccggtcctactccagaagccggagtcattcaaggtctcgctctcgaagcagacattcccgtaagagcagaagccgaagtggcagcagcaaaagcagtcattctaagagtagatctcggtccaggtcgggctcccgctcccggagcaagagccggagccggagccagagtcggagccggagcaagaaagagaaaagcaggagccccagcaaggacaagagccgcagccgcagccatagcgctggcaagagccgcagcaagagcaaagaccaagctgaagagaagatccaaaacaatgacaatgtcgggaaacccaagagccggagtcctagcaggcataaaagtaagagcaaaagtcggagcaggagtcaggagaggagagtggaggaggagaagcgagggagtgtgagcaggggcaggagccaggagaagagcctccgccagagtcggagccggagcaggagcaaagcgggcagcaggagccggagcaggagccgcagcaagagcaaggacaagaggaagagcaggaagagaagcagagaggagagccgcagtcgcagtcgcagccgcagcaagagtgagaggagcagaaagcgaggcagcaagcgagacagcaaggcgggcagcagcaagaagaagaagaaggaagacactgaccgctcccagtccagatctccatcccgctccgtgtcaaaggagcgggaacatgccaagttcttttgtacatgtttggtagccgtagcacaagtgattggagtagaacatgtcactgctgtacatttttaactcccctaatggtgtgtctataattgttaaatctaagtgcttcctctcagtaaagcctcctggcaccaggccttcctgctcgactgaaaaaaattttctctttgaaaatccccttttactcatggcccacagtagaatatccaaaacgccttggctttcaggcctggcctttcctacagggagctcagtaacctggacggctctaaggctggaatgaccacataggtaggtatggtgagttcaaccatttttgctcttgaattgatgcccttcgatgtatgccatttagtgaaagtgctaagtcttaagtttcctaccactttggtttcatatttttggacttaacaaagttgtgaatagcacagtcgaggaaaattgatacctgcagtaacccataggaaataaactgtagagttccatattctggtattgtgattatattgttttatattaaaaaagaaaagaaaagaattttttttaattttatttttccccgtcttgcaaagtatagtgacccctgtttccattaaatttgaataaagactatttttgcttgacaaaaaatcatg

SEQ ID NO: 72449 - DNA, 1246 bp, Homo sapiens
gtgctcgcgtacgtcgccggggttcggctgcgtccgtcccgccgcccgcccgttgccgccgccgccgctgccgccgtgctctcgctttgcccgccgccgcctaaggggggctggggccggggccagccatcactgccgttgccgggatgccgcgggtgtacatcggccgcctgagctaccaggcccgggagcgcgatgtggagcgcttctttaagggctacgggaagatcctggaggtggatctgaagaacggatatggttttgtggagtttgatgatctgcgtgatgcagatgatgctgtttatgaactgaatggcaaagacctttgtggtgagcgagtaattgttgagcatgcccgcggcccacggcgagatggcagttacggttctggacgcagtggatatggttatagaagaagtggccgagataaatatggccctcctactcgcacagagtacagacttattgtggagaatttgtcaagtcggtgcagctggcaagacctaaaggattatatgcgtcaggcaggagaagtgacttatgcagatgctcacaagggacgcaaaaatgaaggggtgattgaatttgtatcttattctgatatgaaaagagctttggaaaagttggatggaactgaagtcaatgggagaaaaatcagattagttgaagacaagccaggttccagacgacgccggtcctactccagaagccggagtcattcaaggtctcgctctcgaagcagacattcccgtaagagcagaagccgaagtggcagcagcaaaagcagtcattctaagagtagatctcggtccaggtcgggctcccgctcccggagcaagagccggagccggagccagagtcggagccggagcaagaaagagaaaagcaggagccccagcaaggacaagagccgcagccgcagccatagcgctggcaagagccgcagcaagagcaaagaccaagctgaagagaagatccaaaacaatgacaatgtcgggaaacccaagagccggagtcctagcaggcataaaagtacaagagcaaggacaagaggaagagcaggaagagaagcagagaggagagccgcagtcgcagtcgcagccgcagcaagagtgagaggagcagaaagcgaggcagcaagcgagacagcaaggcgggcagcaggagccggagcaggagccgcagcaagagcaaggacaagaggaagagcaggaagagaagcagagaggagagccgcagtcgatcg

SEQ ID NO: 72450 - DNA, 718 bp, Homo sapiens
ctgagctgtggccaacgtttgcagaccaggaatccacactagctctaatcagagagcccttggtgtgcgggaactgccagtctgccgacgtgaaaagagtcccagactgggtaatggtgagccctgaagtcgcaccccagctctgccactcagtgagcacggcaacatccctaatcctgaccagccatggagaggttcggttcttacaaggaaaatgagtgaatgtgggaatggctcaccacattgtgaaaacaaaactcacatcctgctgatggttggctgaggactgtcatgtccacatacaaagaaaagcatgtggcacagttttaggacaaagatatggttttgtggagtttgatgatctgcgtgatgcagatgatgctgtttatgaactgaatggcaaagacctttgtggtgagcgagtaattgttgagcatgcccgcggcccacggcgagatggcagttacggttctggacgcagtggatatggttatagaagaagtggccgagataaatatggccctcctactcgcacagagtacagacttattgtggagaatttgtcaagtcggtgcagctggcaagacctaaaggattatatgcgtcaggcaggagaagtgacttatgcatataatcctttacgtcttgccagctgcacccaggcgcacttctttcctatgtacatatccactcttgtcttggccgactgtcatctcag

SEQ ID NO: 72451 - DNA, 220 bp, Homo sapiens
actgtcctatcagtgtgtcctgactttttacctcataagaccaagttggctgaagcataggacatcactgagtgctttgaaacaaagctgtttgattcctgttcactgaatgccatttctttcagggtagatttaaggactttccccttaaagtacagtgctactgactctagattgagggttcaagccaccccgtgggttaacttcaacagatgaaaat

SEQ ID NO: 72452 - DNA, 1302 bp, Homo sapiens
cagggttcagaaagctgtggcccaggcagactgtcggttacacatgttcaaaacgggggaagggccggggcttctgcgcttcgcgaggtcttgctcccttggggacctggtctcccatctgaccctccaggccttagcttgcctcacatgtcagggcaggtatccacctaaccaggctgcaggggaggaggagggaagccgggaatggagcaggaagagaagcagagaggagagccgcagtcgcagtcgcagccgcagcaagagtgagaggagcagaaagcgaggcagcaagcgagacagcaaggcgggcagcagcaagaagaagaagaaggaagacactgaccgctcccagtccagatctccatcccgctccgtgtcaaaggagcgggaacatgccaagtctgaatccagccagagggaaggtcgaggagagagtgagaatgctggcaccaatcaggagacccggtccaggtcgagatccaattccaaatcgaaaccaaaccttccatcagaatcacgctccagatcaaagtcagcttcaaaaacccgatctcggtccaagtctagatccaggtctgcttccagatcgccctcccgatctagatctaggtcccactcaaggtcctaactggctatggccacagctggaactacccgagaagtcttttgtacatgtttggtagccgtagcacaagtgattggagtagaacatgtcactgctgtacatttttaactcccctaatggtgtgtctataattgttaaatctaagtgcttcctctcagtaaagcctcctggcaccaggccttcctgctcgactgaaaaaaattttctctttgaaaatccccttttactcatggcccacagtagaatatccaaaacgccttggctttcaggcctggcctttcctacagggagctcagtaacctggacggctctaaggctggaatgaccacataggtaggtatggtgagttcaaccatttttgctcttgaattgatgcccttcgatgtatgccatttagtgaaagtgctaagtcttaagtttcctaccactttggtttcatatttttggacttaacaaagttgtgaatagcacagtcgaggaaaattgatacctgcagtaacccataggaaataaactgtagagttccatattctggtattgtgattatattgttttatattaaaaaagaaaagaaaagaattttttttaattttatttttccccgtcttgcaaagtatagtgacccctgtttccattaaatttgaataaagactatttttgcttgacaaaaaatcatg

SEQ ID NO: 72453 - DNA, 1391 bp, Homo sapiens
gtgctcgcgtacgtcgccggggttcggctgcgtccgtcccgccgcccgcccgttgccgccgccgccgctgccgccgtgctctcgctttgcccgccgccgcctaaggggggctggggccggggccagccatcactgccgttgccgggatgccgcgggtgtacatcggccgcctgagctaccaggcccgggagcgcgatgtggagcgcttctttaagggctacgggaagatcctggaggtggatctgaagaacggatatggttttgtggagtttgatgatctgcgtgatgcagatgatgctgtttatgaactgaatggcaaagacctttgtggtgagcgagtaattgttgagcatgcccgcggcccacggcgagatggcagttacggttctggacgcagtggatatggttatagaagaagtggccgagataaatatggccctcctactcgcacagagtacagacttattgtggagaatttgtcaagtcggtgcagctggcaagacctaaaggattatatgcgtcaggcaggagaagtgacttatgcagatgctcacaagggacgcaaaaatgaaggggtgattgaatttgtatcttattctgatatgaaaagagctttggaaaagttggatggaactgaagtcaatgggagaaaaatcagattagttgaagacaagccaggttccagacgacgccggtcctactccagaagccggagtcattcaaggtctcgctctcgaagcagacattcccgtaagagcagaagccgaagtggcagcagcaaaagcagtcattctaagagtagatctcggtccaggtcgggctcccgctcccggagcaagagccggagccggagccagagtcggagccggagcaagaaagagaaaagcaggagccccagcaaggacaagagccgcagccgcagccatagcgctggcaagagccgcagcaagagcaaagaccaagctgaagagaagatccaaaacaatgacaatgtcgggaaacccaagagccggagtcctagcaggcataaaagtaagagcaaaagtcggagcaggagtcaggagaggagagtggaggaggagaagcgagggagtgtgagcaggggcaggagccaggagaagagcctccgccagagtcggagccggagcaggagcaaagcgggcagcaggagccggagcaggagccgcagcaagagcaaggacaagaggaagagcaggaagagaagcagagaggagagccgcagtcgcagtcgcagccgcagcaagagtgagaggagcagaaagcgaggcagcaagcgagacagcaaggcgggcagcagcaagaagaagaagaaggaagacactgaccgctcccagtcccaagtcggcgaagaagtcccgagtcggcgaaga

SEQ ID NO: 72454 - DNA, 953 bp, Homo sapiens
gtgctcgcgtacgtcgccggggttcggctgcgtccgtcccgccgcccgcccgttgccgccgccgccgctgccgccgtgctctcgctttgcccgccgccgcctaaggggggctggggccggggccagccatcactgccgttgccgggatgccgcgggtgtacatcggccgcctgagctaccaggcccgggagcgcgatgtggagcgcttctttaagggctacgggaagatcctggaggtggatctgaagaacggatatggttttgtggagtttgatgatctgcgtgatgcagatgatgctgtttatgaactgaatggcaaagacctttgtggtgagcgagtaattgttgagcatgcccgcggcccacggcgagatggcagttacggttctggacgcagtggatatggttatagaagaagtggccgagataaatatggccctcctactcgcacagagtacagacttattgtggagaatttgtcaagtcggtgcagctggcaagacctaaaggattatatgcgtcaggcaggagaagtgacttatgcagatgctcacaagggacgcaaaaatgaaggggtgattgaatttgtatcttattctgatatgaaaagagctttggaaaagttggatggaactgaagtcaatgggagaaaaatcagattagttgaagacaagccaggttccagacgacgccggtcctactccagaagccggagtcattcaaggtctcgctctcgaagcagacattcccgtaagagcagaagccgaagtggcagcagcaaaagcagtcattctaagagtagatctcggtccaggtcgggctcccgctcccggagcaagagccggagccggagccagagtcggagccggagcaagaaagagaaaagcaggagccccagtagctgtacctcacccgtggattgtttccttgggtgaatagatattgctgtggca

SEQ ID NO: 72455 - DNA, 607 bp, Homo sapiens
gaattccccccccccccccagtgctccgcgcgctcttgacgtccggagcccctggagtaggcgcttccggccattcatactgcagtcggtcagtgttcggttgaaggattctgtgtgctgtcggacccagagggtgacggcgccgctaggatgaagctcgtgagatttttgatgaaattgagtcatgaaactgtaaccattgaattgaagaacggaacacaggtccatggaacaatcacaggtgtggatgtcagcatgaatacacatcttaaagctgtgaaaatgaccctgaagaacagagaacctgtacagctggaaacgctgagtattcgaggaaataacattcggtattttattctaccagacagtttacctctggatacactacttgtggatgttgaacctaaggtgaaatctaagaaaagggaagctgttgcaggaagaggcagaggaagaggaagaggaagaggacgtggccgtggcagaggaagagggggtcctaggcgataatgtctctcaagatttcaaagtcatatgagatttgggatattttttgtacaggttgtgtttgtttatgtcagtttttaataaacataaatgtgggaca

SEQ ID NO: 72456 - DNA, 881 bp, Homo sapiens
  misc_feature (612)..(612): n is a, c, g, or t
gaattccccccccccccccagtgctccgcgcgctcttgacgtccggagcccctggagtaggcgcttccggccattcatactgcagtcggtcagtgttcggttgaaggattctgtgtgctgtcggacccagagggtgacggcgccgctaggatgaagctcgtgagatttttgatgaaattgagtcatgaaactgtaaccattgaattgaagaacggaacacaggtccatggaacaatcacaggtgtggatgtcagcatgaatacacatcttaaagctgtgaaaatgaccctgaagaacagagaacctgtacagctggaaacgctgagtattcgaggaaataacattcggtattttattctaccagacagtttacctctggatacactacttgtggatgttgaacctaaggtgaaatctaagaaaagggaagctgttgcaggaagaggcagaggaagaggaagaggaagaggacgtggccgtggcagaggaagagggggtcctaggcgataatgtctctcaagatttcaaagtcatatgagatttgggatattttttgtacaggttgtgtttgtttatgtcagtttttaataaacataaatgtgggacaaaaanaaaaaaaaaaaaaaaatttgttgggggcttgggccctgggaaaaggttttttaacccctttggttggggggcgcggccgcaagtgtttagtgtaacgtgtggccaaaggggttccccaaggaaaacccgggccacgacacaggggctgggtttctccccaaataaaaacggccggggggcaaccggaggttttggaaccaattccgaagggagtcccgaaggccatcgcgtggctcttcaccggggatccaaggaaccgatatatcgga

SEQ ID NO: 72457 - DNA, 504 bp, Homo sapiens
aatgtttgtacttttagtagagacggggtttcactgtgttagccaggatggtctgaatctcctgacctcgtgattcgcccgcctcggcctcccaaggtgctgggattacaggcgtgagccaccgcgtccggccgaacattagtttttaaagaaatgtattatgaatatagatagaaaacccaaagtgaaggaatagaaaatgaaatatcagtttcttttaatctatcataattatgtgagcataacttagtattttgaaatagattaatgtagtcagcaaacaattcatgtattacctataatagatatcatacatataacatttaataacatacagttcttgttcctgaagacttaacctagaaaataactccataacaagaagaatctctgtcataataaaccaacagcagacattttctaaaggcattaaaagtatatctgatactggcctttattaatgtgaaattcttgtggatctgtgaaataaagaggagtactttc

SEQ ID NO: 72458 - DNA, 401 bp, Homo sapiens
tgattacgaattcggaccccggtcctcaacggattattttagtgaccattaactccaagttataacttggagttaatggtcactagattatcagttatgagcagtgttaaaatctcctattaatgtgtaatgtacctgtcagtgcctcctttattaaggggttctttgagaataaaagagaaaagacctactttatttgacagcaaaactgttctaattgttaataaggacttttaaaaattgtttttgatttgctaagctcagaaaaaatgtctctcagtgcatcagttctttgtaaagcttactacgaagtatttatatgctaaggaaaacaactgaggatgtgggtggcttaaatctgtattttcatcaatctctggtgggcggggatcaactagagt

SEQ ID NO: 72459 - DNA, 2250 bp, Homo sapiens
gaattccccccccccccccagtgctccgcgcgctcttgacgtccggagcccctggagtaggcgcttccggccattcatactgcagtcggtcagtgttcggttgaaggattctgtgtgctgtcggacccagagggtgacggcgccgctaggatgaagctcgtgagatttttgatgaaattgagtcatgaaactgtaaccattgaattgaagaacggaacacaggtccatggaacaatcacaggtgtggatgtcagcatgaatacacatcttaaagctgtgaaaatgaccctgaagaacagagaacctgtacagctggaaacgctgagtattcgaggaaataacattcggtattttattctaccagacagtttacctctggatacactacttgtggatgttgaacctaaggtgaaatctaagaaaagggaagctgttgcaggaagaggcagaggaagaggaagaggaagaggacgtggccgtggcagaggaagagggggtcctaggcgataatgtctctcaagatttcaaagtcatatgagatttgggatattttttgtacaggttgtgtttgtttatgtcagtttttaataaacataaatgtgggacagagctgtctatttagtatatcaaagttttagtagtttcctccacattcacgaaattaccacagtgagagctaagcatttctactgggcagtttcatttttagttgatcaggttttaagtttttgaactaaaatttttctttttctttttatgatgaataaggttaaaataaaagccttagacaaattaaatttggcagagtttaattgagcaaaggacaattcacaaatcaggtagcccctgaaccataataggctcagaggcttcagcccagctgcatagttgaagatttatggacagaaggaaagtgatgtatggaaaatggaagtgagatacagcaacagccggattagttacagttcagcgtttgccttatttgaatatggtttgaacagttcgctgtctttggttggctgaaacttagtgattgccacaagagtagggtaccgtctgtttacacgtccagttaggctacagttctatgtactgagaaacctttaagctgaacttgagatatgtaaagagactttaggctaaacttaacaatatatataggatatatacccttctacttcacatgcactgaatatgcattttattgctttactcttcattctgtggcacctacccacaggggaagtaagaagtttgttttggtatttcggaaactaaagtccttatgggatggggtctagaattgattctcctttcctgagttttactccacggagtcttaggtacctggtaaaaagttgtcttctaaattaagggtcattgctttgttgtctagctgctaatgtcttacttttgtttcttttgctttttaatcagttcttaataggatatagttttatgttttccaagttataacttggagttaatggtcactagattatcagttatgagcagtgttaaaatctcctattaatgtgtaatgtacctgtcagtgcctcctttattaaggggttctttgagaataaaagagaaaagacctactttatttgacagcaaaactgttctaattgttaataaggacttttaaaaattgtttttgatttgctaagctcagaaaaaatgtctctcagtgcatcagttctttgtaaagcttactacgaagtatttatatgctaaggaaaacaactgaggatgtgggtggcttaaatctgtattttcatcatgtatgtgagtttttttttttttaagtaaagaaattttctgcaaagatcgttaccttaaaaaagtttagcctgggcgtgagccaccgcgtccggccgaacattagtttttaaagaaatgtattatgaatatagatagaaaacccaaagtgaaggaatagaaaatgaaatatcagtttcttttaatctatcataattatgtgagcataacttagtattttgaaatagattaatgtagtcagcaaacaattcatgtattacctataatagatatcatacatataacatttaataacatacagttcttgttcctgaagacttaacctagaaaataactccataacaagaagaatctctgtcataataaaccaacagcagacattttctaaaggcattaaaagtatatctgatactggcctttattaatgtgaaattcttgtggatctgtgaaataaagaggagtactttc

SEQ ID NO: 72460 - DNA, 2032 bp, Homo sapiens
ctgctcgaattcaagcttctaacgtgtggatgtcagcatgaatacacatcttaaagctgtgaaaatgaccctgaagaacagagaacctgtacagctggaaacgctgagtattcgaggaaataacattcggtattttattctaccagacagtttacctctggatacactacttgtggatgttgaacctaaggtgaaatctaagaaaagggaagctgttgcaggaagaggcagaggaagaggaagaggaagaggacgtggccgtggcagaggaagagggggtcctaggcgataatgtctctcaagatttcaaagtcatatgagatttgggatattttttgtacaggttgtgtttgtttatgtcagtttttaataaacataaatgtgggacagagctgtctatttagtatatcaaagttttagtagtttcctccacattcacgaaattaccacagtgagagctaagcatttctactgggcagtttcatttttagttgatcaggttttaagtttttgaactaaaatttttctttttctttttatgatgaataaggttaaaataaaagccttagacaaattaaatttggcagagtttaattgagcaaaggacaattcacaaatcaggtagcccctgaaccataataggctcagaggcttcagcccagctgcatagttgaagatttatggacagaaggaaagtgatgtatggaaaatggaagtgagatacagcaacagccggattagttacagttcagcgtttgccttatttgaatatggtttgaacagttcgctgtctttggttggctgaaacttagtgattgccacaagagtagggtaccgtctgtttacacgtccagttaggctacagttctatgtactgagaaacctttaagctgaacttgagatatgtaaagagactttaggctaaacttaacaatatatataggatatatacccttctacttcacatgcactgaatatgcattttattgctttactcttcattctgtggcacctacccacaggggaagtaagaagtttgttttggtatttcggaaactaaagtccttatgggatggggtctagaattgattctcctttcctgagttttactccacggagtcttaggtacctggtaaaaagttgtcttctaaattaagggtcattgctttgttgtctagctgctaatgtcttacttttgtttcttttgctttttaatcagttcttaataggatatagttttatgttttccaagttataacttggagttaatggtcactagattatcagttatgagcagtgttaaaatctcctattaatgtgtaatgtacctgtcagtgcctcctttattaaggggttctttgagaataaaagagaaaagacctactttatttgacagcaaaactgttctaattgttaataaggacttttaaaaattgtttttgatttgctaagctcagaaaaaatgtctctcagtgcatcagttctttgtaaagcttactacgaagtatttatatgctaaggaaaacaactgaggatgtgggtggcttaaatctgtattttcatcatgtatgtgagtttttttttttttaagtaaagaaattttctgcaaagatcgttaccttaaaaaagtttagcctgggcgtgagccaccgcgtccggccgaacattagtttttaaagaaatgtattatgaatatagatagaaaacccaaagtgaaggaatagaaaatgaaatatcagtttcttttaatctatcataattatgtgagcataacttagtattttgaaatagattaatgtagtcagcaaacaattcatgtattacctataatagatatcatacatataacatttaataacatacagttcttgttcctgaagacttaacctagaaaataactccataacaagaagaatctctgtcataataaaccaacagcagacattttctaaaggcattaaaagtatatctgatactggcctttattaatgtgaaattcttgtggatctgtgaaataaagaggagtactttc

SEQ ID NO: 72461 - DNA, 839 bp, Homo sapiens
tgattacgaattcggaccccggtcctcaacggattattttagtgaccattaactccaagttataacttggagttaatggtcactagattatcagttatgagcagtgttaaaatctcctattaatgtgtaatgtacctgtcagtgcctcctttattaaggggttctttgagaataaaagagaaaagacctactttatttgacagcaaaactgttctaattgttaataaggacttttaaaaattgtttttgatttgctaagctcagaaaaaatgtctctcagtgcatcagttctttgtaaagcttactacgaagtatttatatgctaaggaaaacaactgaggatgtgggtggcttaaatctgtattttcatcatgtatgtgagtttttttttttttaagtaaagaaattttctgcaaagatcgttaccttaaaaaagtttagcctgggcgtgagccaccgcgtccggccgaacattagtttttaaagaaatgtattatgaatatagatagaaaacccaaagtgaaggaatagaaaatgaaatatcagtttcttttaatctatcataattatgtgagcataacttagtattttgaaatagattaatgtagtcagcaaacaattcatgtattacctataatagatatcatacatataacatttaataacatacagttcttgttcctgaagacttaacctagaaaataactccataacaagaagaatctctgtcataataaaccaacagcagacattttctaaaggcattaaaagtatatctgatactggcctttattaatgtgaaattcttgtggatctgtgaaataaagaggagtactttc

SEQ ID NO: 72462 - DNA, 1606 bp, Homo sapiens
gaattccccccccccccccagtgctccgcgcgctcttgacgtccggagcccctggagtaggcgcttccggccattcatactgcagtcggtcagtgttcggttgaaggattctgtgtgctgtcggacccagagggtgacggcgccgctaggatgaagctcgtgagatttttgatgaaattgagtcatgaaactgtaaccattgaattgaagaacggaacacaggtccatggaacaatcacaggtgtggatgtcagcatgaatacacatcttaaagctgtgaaaatgaccctgaagaacagagaacctgtacagctggaaacgctgagtattcgaggaaataacattcggtattttattctaccagacagtttacctctggatacactacttgtggatgttgaacctaaggtgaaatctaagaaaagggaagctgttgcaggaagaggcagaggaagaggaagaggaagaggacgtggccgtggcagaggaagagggggtcctaggcgataatgtctctcaagatttcaaagtcatatgagatttgggatattttttgtacaggttgtgtttgtttatgtcagtttttaataaacataaatgtgggacagagctgtctatttagtatatcaaagttttagtagtttcctccacattcacgaaattaccacagtgagagctaagcatttctactgggcagtttcatttttagttgatcaggttttaagtttttgaactaaaatttttctttttctttttatgatgaataaggttaaaataaaagccttagacaaattaaatttggcagagtttaattgagcaaaggacaattcacaaatcaggtagcccctgaaccataataggctcagaggcttcagcccagctgcatagttgaagatttatggacagaaggaaagtgatgtatggaaaatggaagtgagatacagcaacagccggattagttacagttcagcgtttgccttatttgaatatggtttgaacagttcgctgtctttggttggctgaaacttagtgattgccacaagagtagggtaccgtctgtttacacgtccagttaggctacagttctatgtactgagaaacctttaagctgaacttgagatatgtaaagagactttaggctaaacttaacaatatatataggatatatacccttctacttcacatgcactgaatatgcattttattgctttactcttcattctgtggcacctacccacaggggaagtaagaagtttgttttggtatttcggaaactaaagtccttatgggatggggtctagaattgattctcctttcctgagttttactccacggagtcttaggtacctggtaaaaagttgtcttctaaattaagggtcattgctttgttgtctagctgctaatgtcttacttttgtttcttttgctttttaatcagttcttaataggatatagttttatgttttccaagttataacttggagttaatggtcactagattatcagttatgagcagtgttaaaatctcctattaatgtgtaatgtacctgtcagtgcctcctttattaaggggttctttgagaataaaagagaaaagacctacttta

SEQ ID NO: 72463 - DNA, 2197 bp, Homo sapiens
cctcacagaccctgaaggaatatgtaaggctgaataatttataaagaaaacaggtttatttggatcacagttccataggctatacaagaagtgtagtgccagcatctgcttctggtgaaacctcaggaagtttacaatcatggcagaagcagtgaagcacggaacacaggtccatggaacgatcacaggtgtggatgtcagcatgaatacacatcttaaagctgtgaaaatgaccctgaagaacagagaacctgtacagctggaaacgctgagtattcgaggaaataacattcggtattttattctaccagacagtttacctctggatacactacttgtggatgttgaacctaaggtgaaatctaagaaaagggaagctgttgcaggaagaggcagaggaagaggaagaggaagaggacgtggccgtggcagaggaagagggggtcctaggcgataatgtctctcaagatttcaaagtcatatgagatttgggatattttttgtacaggttgtgtttgtttatgtcagtttttaataaacataaatgtgggacagagctgtctatttagtatatcaaagttttagtagtttcctccacattcacgaaattaccacagtgagagctaagcatttctactgggcagtttcatttttagttgatcaggttttaagtttttgaactaaaatttttctttttctttttatgatgaataaggttaaaataaaagccttagacaaattaaatttggcagagtttaattgagcaaaggacaattcacaaatcaggtagcccctgaaccataataggctcagaggcttcagcccagctgcatagttgaagatttatggacagaaggaaagtgatgtatggaaaatggaagtgagatacagcaacagccggattagttacagttcagcgtttgccttatttgaatatggtttgaacagttcgctgtctttggttggctgaaacttagtgattgccacaagagtagggtaccgtctgtttacacgtccagttaggctacagttctatgtactgagaaacctttaagctgaacttgagatatgtaaagagactttaggctaaacttaacaatatatataggatatatacccttctacttcacatgcactgaatatgcattttattgctttactcttcattctgtggcacctacccacaggggaagtaagaagtttgttttggtatttcggaaactaaagtccttatgggatggggtctagaattgattctcctttcctgagttttactccacggagtcttaggtacctggtaaaaagttgtcttctaaattaagggtcattgctttgttgtctagctgctaatgtcttacttttgtttcttttgctttttaatcagttcttaataggatatagttttatgttttccaagttataacttggagttaatggtcactagattatcagttatgagcagtgttaaaatctcctattaatgtgtaatgtacctgtcagtgcctcctttattaaggggttctttgagaataaaagagaaaagacctactttatttgacagcaaaactgttctaattgttaataaggacttttaaaaattgtttttgatttgctaagctcagaaaaaatgtctctcagtgcatcagttctttgtaaagcttactacgaagtatttatatgctaaggaaaacaactgaggatgtgggtggcttaaatctgtattttcatcatgtatgtgagtttttttttttttaagtaaagaaattttctgcaaagatcgttaccttaaaaaagtttagcctgggcgtgagccaccgcgtccggccgaacattagtttttaaagaaatgtattatgaatatagatagaaaacccaaagtgaaggaatagaaaatgaaatatcagtttcttttaatctatcataattatgtgagcataacttagtattttgaaatagattaatgtagtcagcaaacaattcatgtattacctataatagatatcatacatataacatttaataacatacagttcttgttcctgaagacttaacctagaaaataactccataacaagaagaatctctgtcataataaaccaacagcagacattttctaaaggcattaaaagtatatctgatactggcctttattaatgtgaaattcttgtggatctgtgaaataaagaggagtactttc

SEQ ID NO: 72464 - DNA, 483 bp, Homo sapiens
gaacataaatataggttggagaatttacagagattcttcagagactggagagagatatctaaatcgccttcctatacctggcactcaagctaactattgcccctagacatcaggaggctttgcactgactgtgacgacaggccaccatccctgcaactggttagtcaatgtgtctcttcctcacacactgaccatgtgctcatgagagcaggggctgtatctgcctgtttcattcatacttctggcaacatgcttggtatatttgcacttataaatgtttgctgaatacataaattaactacttcatacatgggttcatgcacagctatatagaaaaccatgacctcaaaatacagatacttggctgggcatggtagcttatgcctgtaatcctaccactttgggagtccaaggcgggaggattgcttgagtcaaggagtttctagaccagcctgggcaacatagcatgaacttgtctttaca

SEQ ID NO: 72465 - DNA, 721 bp, Homo sapiens
ggcggggctgtctgtggcctcagcgctcggcaggcgcgcactcagctccacacccggctctctcggcatctcagacccggtttcacacaatcatcaggtgagccgaggatccattggaggaaggcattatctgtatccagaggaaatagccaaggatattcagaggtgtgcctgggaagtttgagctgcagcagtggaaccttaatgcccaggatgatcctgtctaacaccacagcggtgacgccctttctgaccaagctgtggcaggagacagttcagcagggtggcaacatgtcgggcctggcccgcaggtccccccgcagcggtgacggcaagctggaggccctctacgtcctcatggtactgggattcttcggcttcttcaccctgggcatcatgctgagctacatccgctccaagaagctggagcactcgaacgacccattcaacgtctacatcgagtccgatgcctggcaagagaaggacaaggcctatgtccaggcccgggtcctggagagctacaggtcgtgctatgtcgttgaaaaccatctggccatagaacaacccaacacacaccttcctgagacgaagccttccccatgaaccccaccactggctaaaactggacacatcctgcctggcaacctgattttctaatcacattcctctcatactctttattgtgatggataccactggatttctttttggctgttgtaag

SEQ ID NO: 72466 - DNA, 307 bp, Homo sapiens
tgttctaaacctaaaggatgcttttttcacaattcctttacaccctgattctcaagacctctttgcctttatgtgggaagaccctgacacctttcacaccagctcacatgcatactacctcaaggtttcagaaacagcccccaccattttgggcagggaaagctcagaggcctagaaaatgcaaacacatagggtgaacttaatgttgcttaagtatgcgattatgattggtttgtcccttaatcttcaggctttgggtattttctaaatgctatgtgataaacttttatcatttgtataatcaaaa

SEQ ID NO: 72467 - DNA, 213 bp, Homo sapiens
tttctttctcactcagacacagtaggttaagttctcttatactccttcttcttactttgacattggagttgaccacatgatggtgttccacacttcccttaggctatgttcatttgttcatttttcttttcttttcttttcttttttgacatgcagtctcactctgtcacccaaagctggagtgcagtggtgtgatcttggctcactgcaacc

SEQ ID NO: 72468 - DNA, 495 bp, Homo sapiens
ctatcccagggttatttgtaatataacagaagaaactttaaggtaaaggaatgagtctctgattgtggaacttatgctactggggagatccttgaggaagtaaaatgtcttcaaagtgttcttgaaatcacatgatattgagggtggatatgggtcaattcaggcatatatgtttatttatatccctgtgtatacctatgtagatgtgtacattcagagagacatggcttatcactgtcaaggtcccactgctgctactgtatcgactgatgagtgaccaagagccttttctgaaccatgtactaaaatcactgagttaagaatcaagacaataattaaactattctgaaatgtcctttcatagttttcattcactcactgaagtgactgtgtgagtgccttctttttagaaggccaaaataggcttcttctgaccgggtgcagtggctcgtgcctgtaatcccagcactttgggaggccgaggcgggtggatca

SEQ ID NO: 72469 - DNA, 279 bp, Homo sapiens
caatggttccacatagccatgaaatcagctgttacaataggaagaccaccactgaacagttttgtaactcatttcagaattgactttggtatgtgcttattggtgtatttctgtgcttgtgtcaattcaacaaagcttcccaagcaaggttacttcaaacattacttgggccacggtaaaagaaaaataaaattctgttgattcagagtcaccttcaatctcatgtcataaattatgtttctctagtctttgatattgtttcacatgtgcatgattaga

SEQ ID NO: 72470 - DNA, 398 bp, Homo sapiens
cgcgccaccgtggagggcataggggacaggtcaaaagttccagtgaagtcctgggaggtggtgtgagaagtttactctggggacagggagatgatctgcttaaaaagcaagttaatttttcttattgctgttcctttggctcttttacaatggaatgacaaaggaatgggtgcacagagaaatgctggtggcctgcattgagaatttctgatgaggtaggctgagaaactgacaaatgagctgtcagctccgctgcaatgacacttcaggggccaggtttttttagcttttatatatataatatatattatcacactgcacactatatatgtaataaatattatacaatatgtttaaaaaatgaaaattaaaattttcatctttattgaggtataatt

SEQ ID NO: 72471 - DNA, 1462 bp, Homo sapiens
  misc_feature (1181)..(1181): n is a, c, g, or t
  misc_feature (1412)..(1412): n is a, c, g, or t
  misc_feature (1414)..(1414): n is a, c, g, or t
  misc_feature (1416)..(1416): n is a, c, g, or t
  misc_feature (1426)..(1426): n is a, c, g, or t
  misc_feature (1432)..(1432): n is a, c, g, or t
  misc_feature (1439)..(1439): n is a, c, g, or t
  misc_feature (1448)..(1448): n is a, c, g, or t
  misc_feature (1450)..(1450): n is a, c, g, or t
  misc_feature (1455)..(1455): n is a, c, g, or t
  misc_feature (1457)..(1457): n is a, c, g, or t
  misc_feature (1459)..(1459): n is a, c, g, or t
  misc_feature (1461)..(1461): n is a, c, g, or t
gcttaatcagcagggaaacccaaacatgaacctccacgagctgtcactgcaccacacacctaccagaatggctgacattttaaataagctgacagcactaaatgttgacgtggatggggagcaacaggaactctcattcgctgccggcggcagtacaaaatggtacagcaactttgggagccagcctggcagtttcatattaaattaaatgtacacctactctgtaacccagcagtcgggctcctgggtgttcaccaagtgaaatgaaaacacgtccacagaaaaacctgtccatgagtatttatagctgcttgattcattaattctccagactggaaacaacctgtgtccttcatccagcaaatggatgcacgggaaggtggcgtatttatactgcggggcaacacacaggatggatctcaaaggcgtcatgctgagtaggtggttggctgaatcatggccacagcagattccaggaacctgtgagtgtaaccttctgtggaaaaagggactttgcagatgagattaggttaaggatcttgagatggggaggttaccctgcattatctgggtggtccctgtttgtcatcacaagtgtcctcgtaagagagggacagatttaatgtagacagaagaggacttgaaggctgcatgaccccagtgggcagagattagggtgatgcagccacaagccagggagtgcctgagcctgcagcaggtgaagaggccaggaaaggtcctcccctagagcccccaaaaggagggagcctgctaacacttggatttcagacttctggcccccagtccgtgagagaaccagtttccattgttttaagccacaagtttatgctcagttgttgcaaggaccacgggaaactcatcttatgtgattccattgataagactttctggaaaggcaaaaccatagggacaaaaaaacagatccaggattgctgagggtgcggggagggtcagtctccaagtggggatgcaggaaattgggcagaaaggaaggtggcctgctcagcgtgctgtcctgggaaaagcaagcaaggtgcgtggagcgtgtagaggccacagttttgggcaatctgcatatttttgtctacaagatttctgaaaaacccttttccataagctttctatgcaccttcgtgaatgcagatagaaatatctgctgngggctgggtgcggtggctcacacctgtaatcctggcactttgggaggctgagtctgtcgagttgcttgaacctaggagttcaagtccagcctgggcaacatggcaaaaccctatctctacagaaaatagaaaaattagccaggtgtgttggtgtgtgcctgtggtcccagctactcgggagctgaggcaggaggatcacctgagcctagaaggtcgaagctgcagtgagcngngntcacaccacngcactncagcctnggtgacagngngagancntntnt

SEQ ID NO: 72472 - DNA, 966 bp, Homo sapiens
ggcctgtgcgagtgacgggaagagccgctgccagaggattccaggaagtgactcacctggggaaactgctcagaacccagcgggctggcggtggtggcttagcggtattgggacgcctgtcccgtctacactgcttgtctctgagctcagcgtggcatctgctgattgctgctccaatgcaatcctttgctgttttctagtgggaaggatgagctaaacgacaaggcttgtgtgcgaggaatgaaggagaggtggataggtgtgatttatttcttggcggaagctcgcatattcagcgatccctgttctgcaaatgtggcacctttcttaaacagagagaatgcctccttgcctgcgcccagcactttcccgtttgcagtggctttctcacgagcattctcgtttggatctcccaaacccgaggcacagtgaggcgaggagttaggagtaaggagggttggttacaaaattggccgcacacctcttcctgtcctatctctgcaccggagatccgagcctccccgctgagctggtataaaataagatggtcgtttttcttagtatgctttaaatctgtacaagggtttgtgaatgagaaaatgtatctgtttaatttctcctttgtaaagctattagctttttccaacacctcctgttcctaatggggaaagagtgtggattcattacaaaaaataaataagagaaaggcaaaaaaaaaaaacattacccacaacaaaaactttttggggcggcttgggccctggaaagagtttttaaaacccttcgtgtggggcgcaggggcccccaagataggcaagtacgaccggtggccatagacgggtcccccgagggaacccggggcacagacaaagggggtgggattcttccccgatataaaaacgcgcggggggcaaccgaccgttctgaaaaaacccagagggacccggagccatcagggactcacag

SEQ ID NO: 72473 - DNA, 397 bp, Homo sapiens
ccgcgggggcagaagtgtccggcggggatccggacagcgcatccggaagcgccatgggccaacgctcgcaggaacctgaacccctgggccagcgccgcctttgctcgcagaggcctctagcatctgtactgtcgaagccctctgagcttcagggcagactgaagagccttacacaccagacacttggacgcgatcgcgccagaaatccccgggaattcagtcttggctccgactccaaaacaaatgattcctcaccagccagatctccatcattggcggtagtctctggtcacctgacttgttcaagccaatgagagggggccgaattagtacttccgctttccgtgctgtttaacgagccactatgcccgtccctcggatactctgattggccagc

SEQ ID NO: 72474 - DNA, 360 bp, Homo sapiens
ttgagacggagctttccctgtcacccatgctggagtgcagtggcgctatctcagctcactacaacctccacctcccaggtccaagtgattctcccgcctcagcctcccaagcagctgggattacaggcgtgagtcacctgcctcagcctcccacagtgctgggattacagttgtgagccactgcgccaggcctcccaaggtgttgggattacaggcgtgagccaccgctccgggcctcccacagtgctaggattacaggtgtcagctgctgcacctggcaattttttgatattaggtcccctgaagtccaaaaagagatatatggcttatttggtataatgaaatcatacaggaagcatt

SEQ ID NO: 72475 - DNA, 401 bp, Homo sapiens
gagtatcactatatcgcgcaagctggtctcaaactcctgggctcaagcagtccttctgtcttggactcccaaagtgctgggattacaggcatgagccaaggcaaccggcctatattatcatgtaataaaagtaacatgcaggctgcgcgcagtggctcacgcctgtaatcccaggcgtctctacaaaaaagaataaaataatgtattttttaatggggaaagctttcacatggtgtaaagtccagaaagtggaaacaattatatgcagtgaaaagccgccttcctgtatttcccaccatagatttctatatagaggcaaccatttttaataattttttgtgcatccattcagctttttaaaatttatatccaagagaatacaaatatacggttttcctttg

SEQ ID NO: 72476 - DNA, 1707 bp, Homo sapiens
ctttttgggcgtggaaagatggcgtaaaaagccacaatacgcaggcgtcatcgctcacttttcccctcccggcttctgctccacctgacgcctgcgcagtaagtaagcctgccagacacactgtgacggctgcctgaagctagtgagtcgcggcgccgcgcactggtggttgggtcagtgccgcgcgccgatcggtcgttaccgcgaggcgctggtggccttcaggctggacggcgcgggtcagccctggttcgccggcttctgggtctttgaacagccgcgatgtcgatcttcacccccaccaaccagatccgcctaaccaatgtggccgtggtacggatgaagcgtgccgggaagcgcttcgaaatcgcctgctacaaaaacaaggtcgtcggctggcggagcggcgtggaaaaagacctcgatgaagttctgcagacccactcagtgtttgtaaatgtttctaaaggtcaggttgccaaaaaggaagatctcatcagtgcgtttggaacagatgaccaaactgaaatctgtaagcagattttgactaaaggagaagttcaagtatcagataaagaaagacacacacaactggagcagatgtttagggacattgcaactattgtggcagacaaatgtgtgaatcctgaaacaaagagaccatacaccgtgatccttattgagagagccatgaaggacatccactattcggtgaaaaccaacaagagtacaaaacagcaggctttggaagtgataaagcagttaaaagagaaaatgaagatagaacgtgctcacatgaggcttcggttcatccttccagtcaatgaaggcaagaagctgaaagaaaagctcaagccactgatcaaggtcatagaaagtgaagattatggccaacagttagaaatcgtatgtctgattgacccgggctgcttccgagaaattgatgagctaataaaaaaggaaactaaaggcaaaggttctttggaagtactcaatctgaaagatgtagaagaaggagatgagaaatttgaatgacacccatcaatctcttcacctctaaaacactaaagtgtttccgtttccgacggcactgtttcatgtctgtggtctgccaaatacttgcttaaactatttgacattttctatctttgtgttaacagtggacacagcaaggctttcctacataagtataataatgtgggaatgatttggttttaattataaactggggtctaaatcctaaagcaaaattgaaactccaagatgcaaagtccagagtggcattttgctactctgtctcatgccttgatagctttccaaaatgaaagttacttgaggcagctcttgtgggtgaaaagttatttgtacagtagagtaagattattaggggtatgtctatacaacaaaagggggggtctttcctaaaaaagaaaacatatgatgcttcatttctacttaatggaacttgtgttctgagggtcattatggtatcgtaatgtaaagcttggatgatgttcctgattatctgagaaacagatatagaaaaattgtgccggacttacctttcattgaacatgctgccataacttagattattcttggttaaaaaataaaagtcacttatttctaattcttaaagtttataatatatattaatatagctaaaattgtatgtaatcaataaaaccactcttatgtttattaaac

SEQ ID NO: 72477 - DNA, 756 bp, Homo sapiens
cccacgcgtccgtcgacccacgcgtccgcggacgcgtgggtcaatctgaaagatgtagaagaaggagatgagaaatttgaatgacacccatcaatctcttcacctctaaaacactaaagtgtttccgtttccgacggcactgtttcatgtctgtggtctgccaaatacttgcttaaactatttgacattttctatctttgtgttaacagtggacacagcaaggctttcctacataagtataataatgtgggaatgatttggttttaattataaactggggtctaaatcctaaagcaaaattgaaactccaagatgcaaagtccagagtggcattttgctactctgtctcatgccttgatagctttccaaaatgaaagttacttgaggcagctcttgtgggtgaaaagttatttgtacagtagagtaagattattaggggtatgtctatacaacaaaagggggggtctttcctaaaaaagaaaacatatgatgcttcatttctacttaatggaacttgtgttctgagggtcattatggtatcgtaatgtaaagcttggatgatgttcctgattatctgagaaacagatatagaaaaattgtgccggacttacctttcattgaacatgctgccataacttagattattcttggttaaaaaataaaagtcacttatttctaattcttaaagtttataatatatattaatatagctaaaattgtatgtaatcaataaaaccactcttatgtttattaaac

SEQ ID NO: 72478 - DNA, 929 bp, Homo sapiens
cgtcccgtgtacgggaggtggagaaatcgtatgtctgattgacccgggctgcttccgagaaattgatgagctaataaaaaaggaaactaaaggcaaaggttctttggaagtactcaatctgaaagatgtagaagaaggagatgagaaatttgaatgacacccatcaatctcttcacctctaaaacactaaagtgtttccgtttccgacggcactgtttcatgtctgtggtctgccaaatacttgcttaaactatttgacattttctatctttgtgttaacagtggacacagcaaggctttcctacataagtataataatgtgggaatgatttggttttaattataaactggggtctaaatcctaaagcaaaattgaaactccaagatgcaaagtccagagtggcattttgctactctgtctcatgccttgatagctttccaaaatgaaagttacttgaggcagctcttgtgggtgaaaagttatttgtacagtagagtaagattattaggggtatgtctatacaacaaaagggggggtctttcctaaaaaagaaaacatatgatgcttcatttctacttaatggaacttgtgttctgagggtcattatggtatcgtaatgtaaagcttggatgatgttcctgattatctgagaaacagatatagaaaaattgtgccggacttacctttcattgaacatgctgccataacttagattattcttggttaaaaaataaaagtcacttatttctaattcttaaagtttataatatatattgtaaatgttgtatcaaaacctctagttttataaaaaaaaaaaaaaaaaagggggcgaaaatccggggcatgccttggaaggccaaggggaaaggagggggaaagggggaagggggttggactgggggggaccaaggaatgggggggggagaaa

SEQ ID NO: 72479 - DNA, 484 bp, Homo sapiens
tgtctcatgcctgatagctttccaaaatgaaagttacttgaggcagagtccagagtggcattttgctactctgtctcatgccttgatagctttccaaaatgaaagttacttgaggcagctcttgtgggtgaaaagttatttgtacagtagagtaagattattaggggtatgtctatacaacaaaagggggggtctttcctaaaaaagaaaacatatgatgcttcatttctacttaatggaacttgtgttctgagggtcattatggtatcgtaatgtaaagcttggatgatgttcctgattatctgagaaacagatatagaaaaattgtgccggacttacctttcattgaacatgctgccataacttagattattcttggttaaaaaataaaagtcacttatttctaattcttaaagtttataatatatattaatatagctaaaattgtatgtaatcaataaaaccactcttatgtttattaaac

SEQ ID NO: 72480 - DNA, 887 bp, Homo sapiens
  misc_feature (530)..(530): n is a, c, g, or t
  misc_feature (534)..(534): n is a, c, g, or t
gggcagttcacttgaggccaggagttcgaggccagcctggccaacatgaaaccccatctctactaaaaatacaaagttagccgggtgtggtggcgcatgcctgtaatcccagttactcaggaggctgaggcgggagaatcacttgaacccgggaggctgaggttacagtgagccgagatcgcgccattgcactccagcctgggcaaaaacagtgaaattccatctaggggcgggggttggggggtaagaaaaagaaaactgccctctacactaaaggtcatcagggggatttgttgtgtcttgccgttcatgttgttgccatctcgtatttaaatgtaaatgcatgtccaagtttcaagtatattcacataggactttctctcctgccctcacaagggaaaaagacctcgatgaagttctgcagacccactcagtgtttgtaaatgtttctaaaggtcaggttgccaaaaaggaagatctcatcagtgcgtttggaacagatgaccaaactgaaatctgtaagcagattntganaaaggagaagtcaagtattcacgatccaaaaggacaagacacatcaacaaaatggggagacaggaatggtttaggggggaaccattgggcaccaaactggtggggctggacccccacatggtcgttgacgcatcccttgacaccataagcaagaacccatcacacccgtggaatcctttgacctggaaagaagcccccggcacagtgctaacatcccaagaaaatacgggaccgcaacgaccctacgacgacagggacccaaaaaccagcacgcacacgtgcaagatgtcatactagacgagatcacaacaagaaatagcaaccaacacaaagggacccccaacaaagcgctg

SEQ ID NO: 72481 - DNA, 1035 bp, Homo sapiens
aaaaataaaagtcacttatttctaattcttaaagtttataatatatattaatatagctaaaattgtatgtaatcaataaaaccactcttatgtttattaaaaaagaaaacatatgatgcttcatttctacttaatggaacttgtgttctgagggtcattatggtatcgtaatgtaaagcttggatgatgttcctgattatctgagaaacagatatagaaaaattgtgccggacttacctttcattgaacatgctgccataacttagattattcttggttaaaaaataaaagtcacttatttctaattcttaaagtttataatatatattaatatagctaaaattgtatgtaatcaataaaaccactcttatgtttattaaacaaaaaaaaaaaaaaacaacaaacaacaaaacaaaaaaaaaaaaaaaaaaaaaagaaaaaaaaaaaaaagagaagaggacagaacgaacacaacaccctcgcgaatacgagaaatatgaacagcgacgccggaacgagaaaacgcgggccacagaacagaacaccctaaacaaataaccaaccagaacaagctaaacaaacaaaaacaaacaagaacaacagaaaataagaacaataagaaaaacgaaaatatagaaacaatacacaatatagaaaaaacaaaaaaaaacaaacatcacaaaaaataacacatccttctcttacactcactacaccaccacactatataacataaacacacaattccttctcagtcatacacacccacacatatcatactacaataatatcaatatccacatacaaaaacaacaaacgataaaactacacaaaacgagcaggatacaaatacaacaaaaaacataccaattacatatacctcaatcacacaaaatacacaaacacacataccaataaatcaacaacataaaaaacataacaacaaataataaaatacacaattatatatataaaataaataaaactataaacatatataataaatattcaaatacacaataacaaattaaactt

SEQ ID NO: 72482 - DNA, 1884 bp, Homo sapiens
  misc_feature (1746)..(1746): n is a, c, g, or t
ctttttgggcgtggaaagatggcgtaaaaagccacaatacgcaggcgtcatcgctcacttttcccctcccggcttctgctccacctgacgcctgcgcagtaagtaagcctgccagacacactgtgacggctgcctgaagctagtgagtcgcggcgccgcgcactggtggttgggtcagtgccgcgcgccgatcggtcgttaccgcgaggcgctggtggccttcaggctggacggcgcgggtcagccctggttcgccggcttctgggtctttgaacagccgcgatgtcgatcttcacccccaccaaccagatccgcctaaccaatgtggccgtggtacggatgaagcgtgccgggaagcgcttcgaaatcgcctgctacaaaaacaaggtcgtcggctggcggagcggcgtggaaaaagacctcgatgaagttctgcagacccactcagtgtttgtaaatgtttctaaaggtcaggttgccaaaaaggaagatctcatcagtgcgtttggaacagatgaccaaactgaaatctgtaagcagattttgactaaaggagaagttcaagtatcagataaagaaagacacacacaactggagcagatgtttagggacattgcaactattgtggcagacaaatgtgtgaatcctgaaacaaagagaccatacaccgtgatccttattgagagagccatgaaggacatccactattcggtgaaaaccaacaagagtacaaaacagcaggctttggaagtgataaagcagttaaaagagaaaatgaagatagaacgtgctcacatgaggcttcggttcatccttccagtcaatgaaggcaagaagctgaaagaaaagctcaagccactgatcaaggtcatagaaagtgaagattatggccaacagttagaaatcgtatgtctgattgacccgggctgcttccgagaaattgatgagctaataaaaaaggaaactaaaggcaaaggttctttggaagtactcaatctgaaagatgtagaagaaggagatgagaaatttgaatgacacccatcaatctcttcacctctaaaacactaaagtgtttccgtttccgacggcactgtttcatgtctgtggtctgccaaatacttgcttaaactatttgacattttctatctttgtgttaacagtggacacagcaaggctttcctacataagtataataatgtgggaatgatttggttttaattataaactggggtctaaatcctaaagcaaaattgaaactccaagatgcaaagtccagagtggcattttgctactctgtctcatgccttgatagctttccaaaatgaaagttacttgaggcagctcttgtgggtgaaaagttatttgtacagtagagtaagattattaggggtatgtctatacaacaaaagggggggtctttcctaaaaaagaaaacatatgatgcttcatttctacttaatggaacttgtgttctgagggtcattatggtatcgtaatgtaaagcttggatgatgttcctgattatctgagaaacagatatagaaaaattgtgccggacttacctttcattgaacatgctgccataacttagattattcttggttaaaaaataaaagtcacttatttctaattcttaaagtttataatatatattaatatagctaaaattgtatgtaatcaataaaaccactcttatgtttattaaacaaaaaaaaaaaaaaaaaaaaaagaaaaaagggggggggntaaaaagtacacacggggggacacaagtttaggggacaccgagtgtttggacaaaagggcccaaatagggagggaataaaaaacagagacagggacggtaaacaggtgaatgggaaaaggtccgagatttgggggaac

SEQ ID NO: 72483 - DNA, 1693 bp, Homo sapiens
gggcagttcacttgaggccaggagttcgaggccagcctggccaacatgaaaccccatctctactaaaaatacaaagttagccgggtgtggtggcgcatgcctgtaatcccagttactcaggaggctgaggcgggagaatcacttgaacccgggaggctgaggttacagtgagccgagatcgcgccattgcactccagcctgggcaaaaacagtgaaattccatctaggggcgggggttggggggtaagaaaaagaaaactgccctctacactaaaggtcatcagggggatttgttgtgtcttgccgttcatgttgttgccatctcgtatttaaatgtaaatgcatgtccaagtttcaagtatattcacataggactttctctcctgccctcacaagggaaaaagacctcgatgaagttctgcagacccactcagtgtttgtaaatgtttctaaaggtcaggttgccaaaaaggaagatctcatcagtgcgtttggaacagatgaccaaactgaaatctgtaagcagattttgactaaaggagaagttcaagtatcagataaagaaagacacacacaactggagcagatgtttagggacattgcaactattgtggcagacaaatgtgtgaatcctgaaacaaagagaccatacaccgtgatccttattgagagagccatgaaggacatccactattcggtgaaaaccaacaagagtacaaaacagcaggctttggaagtgataaagcagttaaaagagaaaatgaagatagaacgtgctcacatgaggcttcggttcatccttccagtcaatgaaggcaagaagctgaaagaaaagctcaagccactgatcaaggtcatagaaagtgaagattatggccaacagttagaaatcgtatgtctgattgacccgggctgcttccgagaaattgatgagctaataaaaaaggaaactaaaggcaaaggttctttggaagtactcaatctgaaagatgtagaagaaggagatgagaaatttgaatgacacccatcaatctcttcacctctaaaacactaaagtgtttccgtttccgacggcactgtttcatgtctgtggtctgccaaatacttgcttaaactatttgacattttctatctttgtgttaacagtggacacagcaaggctttcctacataagtataataatgtgggaatgatttggttttaattataaactggggtctaaatcctaaagcaaaattgaaactccaagatgcaaagtccagagtggcattttgctactctgtctcatgccttgatagctttccaaaatgaaagttacttgaggcagctcttgtgggtgaaaagttatttgtacagtagagtaagattattaggggtatgtctatacaacaaaagggggggtctttcctaaaaaagaaaacatatgatgcttcatttctacttaatggaacttgtgttctgagggtcattatggtatcgtaatgtaaagcttggatgatgttcctgattatctgagaaacagatatagaaaaattgtgccggacttacctttcattgaacatgctgccataacttagattattcttggttaaaaaataaaagtcacttatttctaattcttaaagtttataatatatattaatatagctaaaattgtatgtaatcaataaaaccactcttatgtttattaaac

SEQ ID NO: 72484 - DNA, 1035 bp, Homo sapiens
  misc_feature (48)..(48): n is a, c, g, or t
  misc_feature (94)..(94): n is a, c, g, or t
ggtctgtctgccagtaattagtgccgaaaactggaagccagcaaccanaaccgaccaagtaatccagtccctcatagcactggtgaatgacccncagcctgagcacccgcttcgggctgacctagctgaagaatactctaaggaccgtaaaaaattctgtaagaatgctgaagtgtcaacgtgccactgatcaaggtcatagaaagtgaagattatggccaacagttagaaatcgtatgtctgattgacccgggctgcttccgagaaattgatgagctaataaaaaaggaaactaaaggcaaaggttctttggaagtactcaatctgaaagatgtagaagaaggagatgagaaatttgaatgacacccatcaatctcttcacctctaaaacactaaagtgtttccgtttccgacggcactgtttcatgtctgtggtctgccaaatacttgcttaaactatttgacattttctatctttgtgttaacagtggacacagcaaggctttcctacataagtataataatgtgggaatgatttggttttaattataaactggggtctaaatcctaaagcaaaattgaaactccaagatgcaaagtccagagtggcattttgctactctgtctcatgccttgatagctttccaaaatgaaagttacttgaggcagctcttgtgggtgaaaagttatttgtacagtagagtaagattattaggggtatgtctatacaacaaaagggggggtctttcctaaaaaagaaaacatatgatgcttcatttctacttaatggaacttgtgttctgagggtcattatggtatcgtaatgtaaagcttggatgatgttcctgattatctgagaaacagatatagaaaaattgtgccggacttacctttcattgaacatgctgccataacttagattattcttggttaaaaaataaaagtcacttatttctaattcttaaagtttataatatatattaatatagctaaaattgtatgtaatcaataaaaccactcttatgtttattaaac

SEQ ID NO: 72485 - DNA, 829 bp, Homo sapiens
cgtcccgtgtacgggaggtggagaaatcgtatgtctgattgacccgggctgcttccgagaaattgatgagctaataaaaaaggaaactaaaggcaaaggttctttggaagtactcaatctgaaagatgtagaagaaggagatgagaaatttgaatgacacccatcaatctcttcacctctaaaacactaaagtgtttccgtttccgacggcactgtttcatgtctgtggtctgccaaatacttgcttaaactatttgacattttctatctttgtgttaacagtggacacagcaaggctttcctacataagtataataatgtgggaatgatttggttttaattataaactggggtctaaatcctaaagcaaaattgaaactccaagatgcaaagtccagagtggcattttgctactctgtctcatgccttgatagctttccaaaatgaaagttacttgaggcagctcttgtgggtgaaaagttatttgtacagtagagtaagattattaggggtatgtctatacaacaaaagggggggtctttcctaaaaaagaaaacatatgatgcttcatttctacttaatggaacttgtgttctgagggtcattatggtatcgtaatgtaaagcttggatgatgttcctgattatctgagaaacagatatagaaaaattgtgccggacttacctttcattgaacatgctgccataacttagattattcttggttaaaaaataaaagtcacttatttctaattcttaaagtttataatatatattaatatagctaaaattgtatgtaatcaataaaaccactcttatgtttattaaac

SEQ ID NO: 72486 - DNA, 722 bp, Homo sapiens
actacggctaggtacgaggctgggtgttgggagatgagaaatttgaatgacacccatcaatctcttcacctctaaaacactaaagtgtttccgtttccgacggcactgtttcatgtctgtggtctgccaaatacttgcttaaactatttgacattttctatctttgtgttaacagtggacacagcaaggctttcctacataagtataataatgtgggaatgatttggttttaattataaactggggtctaaatcctaaagcaaaattgaaactccaagatgcaaagtccagagtggcattttgctactctgtctcatgccttgatagctttccaaaatgaaagttacttgaggcagctcttgtgggtgaaaagttatttgtacagtagagtaagattattaggggtatgtctatacaacaaaagggggggtctttcctaaaaaagaaaacatatgatgcttcatttctacttaatggaacttgtgttctgagggtcattatggtatcgtaatgtaaagcttggatgatgttcctgattatctgagaaacagatatagaaaaattgtgccggacttacctttcattgaacatgctgccataacttagattattcttggttaaaaaataaaagtcacttatttctaattcttaaagtttataatatatattaatatagctaaaattgtatgtaatcaataaaaccactcttatgtttattaaac

SEQ ID NO: 72487 - DNA, 901 bp, Homo sapiens
  misc_feature (544)..(544): n is a, c, g, or t
  misc_feature (548)..(548): n is a, c, g, or t
ctttttgggcgtggaaagatggcgtaaaaagccacaatacgcaggcgtcatcgctcacttttcccctcccggcttctgctccacctgacgcctgcgcagtaagtaagcctgccagacacactgtgacggctgcctgaagctagtgagtcgcggcgccgcgcactggtggttgggtcagtgccgcgcgccgatcggtcgttaccgcgaggcgctggtggccttcaggctggacggcgcgggtcagccctggttcgccggcttctgggtctttgaacagccgcgatgtcgatcttcacccccaccaaccagatccgcctaaccaatgtggccgtggtacggatgaagcgtgccgggaagcgcttcgaaatcgcctgctacaaaaacaaggtcgtcggctggcggagcggcgtggaaaaagacctcgatgaagttctgcagacccactcagtgtttgtaaatgtttctaaaggtcaggttgccaaaaaggaagatctcatcagtgcgtttggaacagatgaccaaactgaaatctgtaagcagattntganaaaggagaagtcaagtattcacgatccaaaaggacaagacacatcaacaaaatggggagacaggaatggtttaggggggaaccattgggcaccaaactggtggggctggacccccacatggtcgttgacgcatcccttgacaccataagcaagaacccatcacacccgtggaatcctttgacctggaaagaagcccccggcacagtgctaacatcccaagaaaatacgggaccgcaacgaccctacgacgacagggacccaaaaaccagcacgcacacgtgcaagatgtcatactagacgagatcacaacaagaaatagcaaccaacacaaagggacccccaacaaagcgctg

SEQ ID NO: 72488 - DNA, 166 bp, Homo sapiens
gtgaagattatggccaacagttagaaatcgtaagagtcaaatattttctttgcttcatgttacctaaatattgtattctctagtaataaatttgtagcaaacatttagatgttgtaaacgtcagatattttcttttcttttttttttttgagatggagtctcgctc

SEQ ID NO: 72489 - DNA, 836 bp, Homo sapiens
  misc_feature (766)..(766): n is a, c, g, or t
  misc_feature (772)..(772): n is a, c, g, or t
  misc_feature (807)..(807): n is a, c, g, or t
ctttttgggcgtggaaagatggcgtaaaaagccacaatacgcaggcgtcatcgctcacttttcccctcccggcttctgctccacctgacgcctgcgcagtaagtaagcctgccagacacactgtgacggctgcctgaagctagtgagtcgcggcgccgcgcactggtggttgggtcagtgccgcgcgccgatcggtcgttaccgcgaggcgctggtggccttcaggctggacggcgcgggtcagccctggttcgccggcttctgggtctttgaacagccgcgatgtcgatcttcacccccaccaaccagatccgcctaaccaatgtggccgtggtacggatgaagcgtgccgggaagcgcttcgaaatcgcctgctacaaaaacaaggtcgtcggctggcggagcggcgtggaaaaagacctcgatgaagttctgcagacccactcagtgtttgtaaatgtttctaaaggtcaggttgccaaaaaggaagatctcatcagtgcgtttggaacagatgaccaaactgaaatctgtaagcagattttgactaaaggagaagttcaagtatcagataaagaaagacacacacaactggagcagatgtttagggacattgcaactattgtggcagacaaatgtgtgaatcctgaaacaaagagaccatacaccgtgatccttattgagagagccatgaaggacatcatatcgtgaaccacagatacaacagcagcttggagtgataagcagtaaagagaaatgagatagnacgtgncacagagctcgtcatctccatcatgagcagagtgnagaagtcagcatgtcagtcaagatgagat

SEQ ID NO: 72490 - DNA, 1738 bp, Homo sapiens
ctttttgggcgtggaaagatggcgtaaaaagccacaatacgcaggcgtcatcgctcacttttcccctcccggcttctgctccacctgacgcctgcgcagtaagtaagcctgccagacacactgtgacggctgcctgaagctagtgagtcgcggcgccgcgcactggtggttgggtcagtgccgcgcgccgatcggtcgttaccgcgaggcgctggtggccttcaggctggacggcgcgggtcagccctggttcgccggcttctgggtctttgaacagccgcgatgtcgatcttcacccccaccaaccagatccgcctaaccaatgtggccgtggtacggatgaagcgtgccgggaagcgcttcgaaatcgcctgctacaaaaacaaggtcgtcggctggcggagcggcgtggaaaaagacctcgatgaagttctgcagacccactcagtgtttgtaaatgtttctaaaggtcaggttgccaaaaaggaagatctcatcagtgcgtttggaacagatgaccaaactgaaatctgtaagcagattttgactaaaggagaagttcaagtatcagataaagaaagacacacacaactggagcagatgtttagggacattgcaactattgtggcagacaaatgtgtgaatcctgaaacaaagagaccatacaccgtgatccttattgagagagccatgaaggacatccactattcggtgaaaaccaacaagagtacaaaacagcaggctttggaagtgataaagcagttaaaagagaaaatgaagatagaacgtgctcacatgaggcttcggttcatccttccagtcaatgaaggcaagaagctgaaagaaaagctcaagccactgatcaaggtcatagaaagtgaagattatggccaacagttagaaatcgtatgtctgattgacccgggctgcttccgagaaattgatgagctaataaaaaaggaaactaaaggcaaaggttctttggaagtactcaatctgaaagatgtagaagaaggagatgagaaatttgaatgacacccatcaatctcttcacctctaaaacactaaagtgtttccgtttccgacggcactgtttcatgtctgtggtctgccaaatacttgcttaaactatttgacattttctatctttgtgttaacagtggacacagcaaggctttcctacataagtataataatgtgggaatgatttggttttaattataaactggggtctaaatcctaaagcaaaattgaaactccaagatgcaaagtccagagtggcattttgctactctgtctcatgccttgatagctttccaaaatgaaagttacttgaggcagctcttgtgggtgaaaagttatttgtacagtagagtaagattattaggggtatgtctatacaacaaaagggggggtctttcctaaaaaagaaaacatatgatgcttcatttctacttaatggaacttgtgttctgagggtcattatggtatcgtaatgtaaagcttggatgatgttcctgattatctgagaaacagatatagaaaaattgtgccggacttacctttcattgaacatgctgccataacttagattattcttggttaaaaaataaaagtcacttatttctaattcttaaagtttataatatatattaatatagctaaaattgtatgtaatcaataaaaccactcttatgtttattaaacctatggcttgtgtttctagacaacttcctaa

SEQ ID NO: 72491 - DNA, 1178 bp, Homo sapiens
ctttttgggcgtggaaagatggcgtaaaaagccacaatacgcaggcgtcatcgctcacttttcccctcccggcttctgctccacctgacgcctgcgcagtaagtaagcctgccagacacactgtgacggctgcctgaagctagtgagtcgcggcgccgcgcactggtggttgggtcagtgccgcgcgccgatcggtcgttaccgcgaggcgctggtggccttcaggctggacggcgcgggtcagccctggttcgccggcttctgggtctttgaacagccgcgatgtcgatcttcacccccaccaaccagatccgcctaaccaatgtggccgtggtacggatgaagcgtgccgggaagcgcttcgaaatcgcctgctacaaaaacaaggtcgtcggctggcggagcggcgtggaaaaagacctcgatgaagttctgcagacccactcagtgtttgtaaatgtttctaaaggtcaggttgccaaaaaggaagatctcatcagtgcgtttggaacagatgaccaaactgaaatctgtaagcagattttgactaaaggagaagttcaagtatcagataaagaaagacacacacaactggagcagatgtttagggacattgcaactattgtggcagacaaatgtgtgaatcctgaaacaaagagaccatacaccgtgatccttattgagagagccatgaaggacatccactattcggtgaaaaccaacaagagtacaaaacagcaggctttggaagtgataaagcagttaaaagagaaaatgaagatagaacgtgctcacatgaggcttcggttcatccttccagtcaatgaaggcaagaagctgaaagaaaagctcaagccactgatcaaggtcatagaaagtgaagattatggccaacagttagaaatcgtatgtctgattgacccgggctgcttccgagaaattgatgagctaataaaaaaggaaactaactgtaaaacagcctttggcaggtccttaggtggtattccgggataaagcattgtcatcaggagatgatagctcccatacatgttattttcttgctcttgaagaccttgcagtgggacaatatgtggaggtggaagatcctgatcctgggtaggcctaggctaatgtgtgtgttcgtgtcttcatttttaacaaaagttaaaaatacctac

SEQ ID NO: 72492 - DNA, 209 bp, Homo sapiens
gaagttcaagtatcagataaagaaagacacacacaactggagcagatgtttagggacattgcaactattgtggcagacaaatgtgtgaatcctgaaacaaagagaccatacaccgtgatccttattgagagagccatgaaggacatccactattcggtgaaaaccaacaagagtacaaaacagcaggtgagtggtttctcatgtcatca

SEQ ID NO: 72493 - DNA, 1803 bp, Homo sapiens
tctcttaggggaaatgaaatcctgttaaaatttgtctctggccacctaggcgaaaccctaacttcttcactttggaatgctaaccccatttggagctggtgtctcctgggtggctaccctcaagccttacgctggaataaactctatccttaatcatatttccagaacctcactatttaaggttgacaggagagggaagcggtgatgtcttgagataaagctgaataaagtttctcaagaaaaaaagggaaaggaacctctaagctgtacgttgttttctaactctagggagttagaggtgaagtaggaacttgaagttggaagtgttgagttggacagccctcatctctaggcaatactttcataaagtggaaaaacgggggaagaggacgaaggctagggagagacgcagggatccacccaacccagtcctgagtttcccactcgctcttggagttgagtacaaagagcgctccaaagccccttctcctgtgctcagcccagtgctccggtgggtcaggtctccggaatgcgtaaacaaaagcaaacagctgagcggcggagggcgcaggcgacagatgtgggtgttccctgagaatgtgtggcgacttcccggagcagcgggtctgtgaggcaacgatggaagacactgcgctccacagcatagcaggaggccccgccccgtgtggcgccaagtaaaagataattcctcagaagccgtcggccaccggcgcttcgcctcgtcccgcgccaggcccagcctctcccccagaccaccggtgccatgcggattccccaggcgggaccccagctcacgaggcccactggccgaagctccccacaggatagagagccgctcctgcgaggccaagcttccgagaggcggcctgcgcctagcacgcaggcgcggaaagctgggcgccagccttaaactgactcccgccacctgcctcgggccgcgccgtccaccgtttactttcgaacgagcccagcaatagttcccattggccgatgccttgcagttgaatgttgcctgcagactgcgcctgcgctgcgaggctccgcgaggccccgcccggtctgggcacctgaagcccttcggggcagaggagggcggggactcggggcggctctcagcatccgcctggagctcgtggcgctgtgtttccgtgctgtggagttgcctggtccgcttcctccccgcggaaatgcacaattttgaggaagagttaacttgtcccatatgttatagtatttttgaagatcctcgtgtactgccatgctctcatacattttgtagaaattgtttggaaaacattcttcaggcatctggtaacttttatatatggagacctttacgaattccactcaagtgccctaattgcagaagtattactgaaattgctccaactggcattgaatctttacctgttaattttgcactaagggctattattgaaaagtaccagcaagaagaccatccagatattgtcacctgccctgaacattacaggcaaccattaaatgtttactgtctattagataaaaaattagtttgtggtcattgccttaccataggtcaacatcatggtcatcctatagatgaccttcaaagtgcctatttgaaagaaaaggacactcctcaaaaactgcttgaacagttgactgacacacactggacagatcttacccatcttattgaaaagctgaaagaacaaaaatctcattctgagaaaatgatccaaggcgataaggaagctgttctccagtattttaaggagcttaatgatacattagaacaga

SEQ ID NO: 72494 - DNA, 1873 bp, Homo sapiens
tctcttaggggaaatgaaatcctgttaaaatttgtctctggccacctaggcgaaaccctaacttcttcactttggaatgctaaccccatttggagctggtgtctcctgggtggctaccctcaagccttacgctggaataaactctatccttaatcatatttccagaacctcactatttaaggttgacaggagagggaagcggtgatgtcttgagataaagctgaataaagtttctcaagaaaaaaagggaaaggaacctctaagctgtacgttgttttctaactctagggagttagaggtgaagtaggaacttgaagttggaagtgttgagttggacagccctcatctctaggcaatactttcataaagtggaaaaacgggggaagaggacgaaggctagggagagacgcagggatccacccaacccagtcctgagtttcccactcgctcttggagttgagtacaaagagcgctccaaagccccttctcctgtgctcagcccagtgctccggtgggtcaggtctccggaatgcgtaaacaaaagcaaacagctgagcggcggagggcgcaggcgacagatgtgggtgttccctgagaatgtgtggcgacttcccggagcagcgggtctgtgaggcaacgatggaagacactgcgctccacagcatagcaggaggccccgccccgtgtggcgccaagtaaaagataattcctcagaagccgtcggccaccggcgcttcgcctcgtcccgcgccaggcccagcctctcccccagaccaccggtgccatgcggattccccaggcgggaccccagctcacgaggcccactggccgaagctccccacaggatagagagccgctcctgcgaggccaagcttccgagaggcggcctgcgcctagcacgcaggcgcggaaagctgggcgccagccttaaactgactcccgccacctgcctcgggccgcgccgtccaccgtttactttcgaacgagcccagcaatagttcccattggccgatgccttgcagttgaatgttgcctgcagactgcgcctgcgctgcgaggctccgcgaggccccgcccggtctgggcacctgaagcccttcggggcagaggagggcggggactcggggcggctctcagcatccgcctggagctcgtggcgctgtgtttccgtgctgtggagttgcctggtccgcttcctccccgcgaataagaataaaagattctggaggagttggagaagagtgtattcagcccccaaaccacgagatcaacaaagaaatgcacaattttgaggaagagttaacttgtcccatatgttatagtatttttgaagatcctcgtgtactgccatgctctcatacattttgtagaaattgtttggaaaacattcttcaggcatctggtaacttttatatatggagacctttacgaattccactcaagtgccctaattgcagaagtattactgaaattgctccaactggcattgaatctttacctgttaattttgcactaagggctattattgaaaagtaccagcaagaagaccatccagatattgtcacctgccctgaacattacaggcaaccattaaatgtttactgtctattagataaaaaattagtttgtggtcattgccttaccataggtcaacatcatggtcatcctatagatgaccttcaaagtgcctatttgaaagaaaaggacactcctcaaaaactgcttgaacagttgactgacacacactggacagatcttacccatcttattgaaaagctgaaagaacaaaaatctcattctgagaaaatgatccaaggcgataaggaagctgttctccagtattttaaggagcttaatgatacattagaacaga

SEQ ID NO: 72495 - DNA, 2118 bp, Homo sapiens
tctcttaggggaaatgaaatcctgttaaaatttgtctctggccacctaggcgaaaccctaacttcttcactttggaatgctaaccccatttggagctggtgtctcctgggtggctaccctcaagccttacgctggaataaactctatccttaatcatatttccagaacctcactatttaaggttgacaggagagggaagcggtgatgtcttgagataaagctgaataaagtttctcaagaaaaaaagggaaaggaacctctaagctgtacgttgttttctaactctagggagttagaggtgaagtaggaacttgaagttggaagtgttgagttggacagccctcatctctaggcaatactttcataaagtggaaaaacgggggaagaggacgaaggctagggagagacgcagggatccacccaacccagtcctgagtttcccactcgctcttggagttgagtacaaagagcgctccaaagccccttctcctgtgctcagcccagtgctccggtgggtcaggtctccggaatgcgtaaacaaaagcaaacagctgagcggcggagggcgcaggcgacagatgtgggtgttccctgagaatgtgtggcgacttcccggagcagcgggtctgtgaggcaacgatggaagacactgcgctccacagcatagcaggaggccccgccccgtgtggcgccaagtaaaagataattcctcagaagccgtcggccaccggcgcttcgcctcgtcccgcgccaggcccagcctctcccccagaccaccggtgccatgcggattccccaggcgggaccccagctcacgaggcccactggccgaagctccccacaggatagagagccgctcctgcgaggccaagcttccgagaggcggcctgcgcctagcacgcaggcgcggaaagctgggcgccagccttaaactgactcccgccacctgcctcgggccgcgccgtccaccgtttactttcgaacgagcccagcaatagttcccattggccgatgccttgcagttgaatgttgcctgcagactgcgcctgcgctgcgaggctccgcgaggccccgcccggtctgggcacctgaagcccttcggggcagaggagggcggggactcggggcggctctcagcatccgcctggagctcgtggcgctgtgtttccgtgctgtggagttgcctggtccgcttcctccccgcggtgagtctaaggacctttacggatgcggagaaggtggttctgagtcctttttcttttcctgtagcacagtctggtgtgcctagtgtgttgggcggggagtcctgggggcgcgacgatggagggagtggcttgggacctgcactcattccctcttgtcccatactggagtttggggagccactttcccgtccctccactgtggagctgcgttcctgtgagggaggaggccctctgtggtggcgaggaataagaataaaagattctggaggagttggagaagagtgtattcagcccccaaaccacgagatcaacaaagaaatgcacaattttgaggaagagttaacttgtcccatatgttatagtatttttgaagatcctcgtgtactgccatgctctcatacattttgtagaaattgtttggaaaacattcttcaggcatctggtaacttttatatatggagacctttacgaattccactcaagtgccctaattgcagaagtattactgaaattgctccaactggcattgaatctttacctgttaattttgcactaagggctattattgaaaagtaccagcaagaagaccatccagatattgtcacctgccctgaacattacaggcaaccattaaatgtttactgtctattagataaaaaattagtttgtggtcattgccttaccataggtcaacatcatggtcatcctatagatgaccttcaaagtgcctatttgaaagaaaaggacactcctcaaaaactgcttgaacagttgactgacacacactggacagatcttacccatcttattgaaaagctgaaagaacaaaaatctcattctgagaaaatgatccaaggcgataaggaagctgttctccagtattttaaggagcttaatgatacattagaacaga

SEQ ID NO: 72496 - DNA, 1688 bp, Homo sapiens
  misc_feature (224)..(224): n is a, c, g, or t
  misc_feature (300)..(300): n is a, c, g, or t
  misc_feature (1173)..(1173): n is a, c, g, or t
  misc_feature (1648)..(1648): n is a, c, g, or t
  misc_feature (1688)..(1688): n is a, c, g, or t
gctagcttcacccagtggctcctgcaccggggctgcaggtggagctgcctgccagtcccacgctgtgggcctgtactcctcagcccttgggtggtcgatgggactgggcgccgtggagcagggggctgcactcgtagggtaggctcctcggccgcacaggagcccacggagcgggggaggctcaggcatggcgggctgcaggtctcaagccctgtcccgcaggnaggcagccaaggcccggtgacaaatcgagtgcagtgcccgtgggccagcactgctgggggacccagtacacactcngcagccgctggcccgggtgctaagcccctcattgccctgggccaacagggccggccggctgctccgagtgcggggcccaccaagcccacgcccacccggaactccagctggcccgcaagccccacgcgcagccccggttcccgctggcgcttcttcctccacacctccctgcaagctgagggagccggctccagccttggccagcccagaaaggggctcccacagtgcagtggtgggctgaagggctcatcaagtgccaccaaagtgggagcccaggcagaggaggcgctgagagcgagccagggctgtgaggactgccagcattctgtcacctctcaataggataaataacttgtgagagaactacttctgcagtttttagtgtttttgttttgctttgttttttgtttgtctttggtactagattaataaaaatttagatcttaggaccctacagatcatcctgtataacagtgttttatacagaggcataaaaaggaaagtgctttgcctgaagccacatagtttatgagtctacaataaaactcatatacgccgactcctctatcagtgttcttttcactggaacaatactttcttatcatgaaccttataccttttcctcaaagaaaataggtacagttatttgattagcaattgtctcctcattaatctctagggactatttggtcacttttctattctccatgcctgtcagctggggattgccttcagctcttagaggtcacactcagctgctagccatgtagacctgttaacattactacttatttcttcaaggccagctagagagacaaggtctctatagtatgtctgtatcaagatagagtcttatgtaatgtaacataaccntcagagtgattttccatcatctttgctttactttgttggttagaagcaagcctcatgtcttgcctacactcaaggtgacaaatggtcataaacatcaggaggtggggatcatgaggaatcaccctagagtttgtctgccatagtctatattaaacttttagaaacttacattaaacttatataaatgttaccttgatatatcttcgtatacattattcatttgagctttacataattcacccattttttaattcatttatctattcattctgcaaacattcatgttaagtcaattatgtactaggtagtacgttaggtttgggggatagacattaaaaccaagactcagtaagcttaaacaacttccagtttagtgcaagaattcttagtctgtgttacttggtccaagaggaccacaagtagatttttaggaatttgtgaggttcctgaaattgttttgcaattttgttctatnagctatgaagcagtgatgctatgaagattttataaaccan

SEQ ID NO: 72497 - DNA, 376 bp, Homo sapiens
ctatcattgatggacatttgggttggtgcaagtctttgctattgtgaatagtgccgcaataaacatgtgcgtgcatgtgtctttatagcagcatgatttataatcctttcagtatatacccagtaatgggatggctgggtcaaatggtatttctagttctagatccttgaggaatcgccacactgtcttccacagtgggacttttctaacgtgcacattttcatagcaagcaagaggagtggcctccagtgtgaggattctagattgcacccaaacaggcagaatttctactttacagaccttctggaagactgtcagctttagacctacccaggcattccaaatctcttacaggatttggaactcttaggctctg

SEQ ID NO: 72498 - DNA, 296 bp, Homo sapiens
gagaatgtgagatgtgaaaattttccaactgaaaaaaggctcacatttctctttataatggaaaattgctcttagccaactatgactctatcacaccaggatctaggagacatgatgagaaatgcttggaaggatcagcaccaaaaactcagtaaattaggcaagatctttcaggttcctatattcagacaaagaacacttctggcaggaagaacaatactatggcagactctaggaaatgtgaaataaatacacaactttgattcaaaaaagactaaggctactctttcatacct

SEQ ID NO: 72499 - DNA, 135 bp, Homo sapiens
aatgatcacttcataatgccacaaactcacagcaggcaaaactaattttacacaatatgaaaacagattttatttatttaaaaggaatattaaaaaaacaacttttttgacaccagctgctgggaaataaataga

SEQ ID NO: 72500 - DNA, 358 bp, Homo sapiens
gaggaacctccaaactgttctccatagtggttgtaaagttgcaaatattgacagtagttactcaagtggtgccaaactacaggagaaggcctacttgtatttggcaaaaccaacctttacccacgtactgaatctgataacgtggcttttgctcaaaatccaactctgatgtggtaaaaaccttaattgaaagtggaccatagctcagtgcttctcaaactctaatgcgggtaagaatgttctgggtgtctcgttaaaatgcagattctgattcagctggcctggggtgggacctataagtctgcatttctgacaagcttttagagggtgctgaagctttagctctacagctgtgctt

SEQ ID NO: 72501 - DNA, 302 bp, Homo sapiens
atatttgaaaagatcttcaccaaagatatatggatagtaagtaaatatatgaaaggttttcactgttaatgattaaaggaaatgcaatcttgtacatgaatgtttataacagcatcattcataagagccaaaaggtagaaacaatccaaatgttcatcaactgatgaatgaatacacaaaacatagtattatctatataatggaatattacttggccataaaaagaaatgaactgggccaggcgcaatgacttacgcctgtaatcccagcactttgggaggctgaggtgggcggactgcttg

SEQ ID NO: 72502 - DNA, 2441 bp, Homo sapiens
aggcttaagctgccagccagagagggagtcatttcattggcgtttgagtcagcaaagaagtcaagatggccaaagttccagacatgtttgaagacctgaagaactgttacagtgaaaatgaagaagacagttcctccattgatcatctgtctctgaatcagaaatccttctatcatgtaagctatggcccactccatgaaggctgcatggatcaatctgtgtctctgagtatctctgaaacctctaaaacatccaagcttaccttcaaggagagcatggtggtagtagcaaccaacgggaaggttctgaagaagagacggttgagtttaagccaatccatcactgatgatgacctggaggccatcgccaatgactcagaggaagaaatcatcaagcctaggtcagcaccttttagcttcctgagcaatgtgaaatacaactttatgaggatcatcaaatacgaattcatcctgaatgacgccctcaatcaaagtataattcgagccaatgatcagtacctcacggctgctgcattacataatctggatgaagcagtgaaatttgacatgggtgcttataagtcatcaaaggatgatgctaaaattaccgtgattctaagaatctcaaaaactcaattgtatgtgactgcccaagatgaagaccaaccagtgctgctgaaggagatgcctgagatacccaaaaccatcacaggtagtgagaccaacctcctcttcttctgggaaactcacggcactaagaactatttcacatcagttgcccatccaaacttgtttattgccacaaagcaagactactgggtgtgcttggcaggggggccaccctctatcactgactttcagatactggaaaaccaggcgtaggtctggagtctcacttgtctcacttgtgcagtgttgacagttcatatgtaccatgtacatgaagaagctaaatcctttactgttagtcatttgctgagcatgtactgagccttgtaattctaaatgaatgtttacactctttgtaagagtggaaccaacactaacatataatgttgttatttaaagaacaccctatattttgcatagtaccaatcattttaattattattcttcataacaattttaggaggaccagagctactgactatggctaccaaaaagactctacccatattacagatgggcaaattaaggcataagaaaactaagaaatatgcacaatagcagttgaaacaagaagccacagacctaggatttcatgatttcatttcaactgtttgccttctacttttaagttgctgatgaactcttaatcaaatagcataagtttctgggacctcagttttatcattttcaaaatggagggaataatacctaagccttcctgccgcaacagttttttatgctaatcagggaggtcattttggtaaaatacttctcgaagccgagcctcaagatgaaggcaaagcacgaaatgttattttttaattattatttatatatgtatttataaatatatttaagataattataatatactatatttatgggaaccccttcatcctctgagtgtgaccaggcatcctccacaatagcagacagtgttttctgggataagtaagtttgatttcattaatacagggcattttggtccaagttgtgcttatcccatagccaggaaactctgcattctagtacttgggagacctgtaatcatataataaatgtacattaattaccttgagccagtaattggtccgatctttgactcttttgccattaaacttacctgggcattcttgtttcattcaattccacctgcaatcaagtcctacaagctaaaattagatgaactcaactttgacaaccatgagaccactgttatcaaagttgagttcatctaattttagcttgtagagacgggatttcaccatcttggccgtgctggtctcgaacttctgacctcgtgatccacccgcctcggcctcccaaagtgctgggattacaggcgtgagccatcgcgcccggcctggagtttctactgtgcaccaggcactacctttacatgtattgttttatttaatcctcagtcagccgtgtttggtaggtgcagttagtatatttccattttcatctgcgcaaacagattcaggaactttgtaatttacataaggtcacattcatcctaattcacaaaatcaagatttcacacctattcctttttctttccagtgcctgtgctttttctctcataccaaggagaagtaataagcctaacgttttaaacctcacaaaagtacatacagaaaagtaaatagcctaattttgcaactaatacaaatggcgctgtacttctttggtgatggtagatttataatttttgaagtatggtagattcaaatgaaccactgaaaaggcatttagtttcttgtcccaaat

SEQ ID NO: 72503 - DNA, 2022 bp, Homo sapiens
aggcttaagctgccagccagagagggagtcatttcattggcgtttgagtcagcaaagaagtcaagatggccaaagttccagacatgtttgaagacctgaagaactgttacagtgaaaatgaagaagacagttcctccattgatcatctgtctctgaatcagaaatccttctatcatgtaagctatggcccactccatgaaggctgcatggatcaatctgtgtctctgagtatctctgaaacctctaaaacatccaagcttaccttcaaggagagcatggtggtagtagcaaccaacgggaaggttctgaagaagagacggttgagtttaagccaatccatcactgatgatgacctggaggccatcgccaatgactcagaggaagaaatcatcaagcctaggtcagcaccttttagcttcctgagcaatgtgaaatacaactttatgaggatcatcaaatacgaattcatcctgaatgacgccctcaatcaaagtataattcgagccaatgatcagtacctcacggctgctgcattacataatctggatgaagcagtgaaatttgacatgggtgcttataagtcatcaaaggatgatgctaaaattaccgtgattctaagaatctcaaaaactcaattgtatgtgactgcccaagatgaagaccaaccagtgctgctgaaggagatgcctgagatacccaaaaccatcacaggtagtgagaccaacctcctcttcttctgggaaactcacggcactaagaactatttcacatcagttgcccatccaaacttgtttattgccacaaagcaagactactgggtgtgcttggcaggggggccaccctctatcactgactttcagatactggaaaaccaggcgtaggtctggagtctcacttgtctcacttgtgcagtgttgacagttcatatgtaccatgtacatgaagaagctaaatcctttactgttagtcatttgctgagcatgtactgagccttgtaattctaaatgaatgtttacactctttgtaagagtggaaccaacactaacatataatgttgttatttaaagaacaccctatattttgcatagtaccaatcattttaattattattcttcataacaattttaggaggaccagagctactgactatggctaccaaaaagactctacccatattacagatgggcaaattaaggcataagaaaactaagaaatatgcacaatagcagttgaaacaagaagccacagacctaggatttcatgatttcatttcaactgtttgccttctacttttaagttgctgatgaactcttaatcaaatagcataagtttctgggacctcagttttatcattttcaaaatggagggaataatacctaagccttcctgccgcaacagttttttatgctaatcagggaggtcattttggtaaaatacttctcgaagccgagcctcaagatgaaggcaaagcacgaaatgttattttttaattattatttatatatgtatttataaatatatttaagataattataatatactatatttatgggaaccccttcatcctctgagtgtgaccaggcatcctccacaatagcagacagtgttttctgggataagtaagtttgatttcattaatacagggcattttggtccaagttgtgcttatcccatagccaggaaactctgcattctagtacttgggagacctgtaatcatataataaatgtacattaattaccttgagccagtaattggtccgatctttgactcttttgccattaaacttacctgggcattcttgtttcattcaattccacctgcaatcaagtcctacaagctaaaattagatgaactcaactttgacaaccatgagaccactgttatcaaaactttcttttctggaatgtaatcaatgtttcttctaggttctaaaaattgtgatcagaccataatgttacattattatcaacaatagtgattgatagagtgttatcagtcataactaaataaagcttgcaa

SEQ ID NO: 72504 - DNA, 2068 bp, Homo sapiens
aggcttaagctgccagccagagagggagtcatttcattggcgtttgagtcagcaaagaagtcaagatggccaaagttccagacatgtttgaagacctgaagaactgttacagtgaaaatgaagaagacagttcctccattgatcatctgtctctgaatcagaaatccttctatcatgtaagctatggcccactccatgaaggctgcatggatcaatctgtgtctctgagtatctctgaaacctctaaaacatccaagcttaccttcaaggagagcatggtggtagtagcaaccaacgggaaggttctgaagaagagacggttgagtttaagccaatccatcactgatgatgacctggaggccatcgccaatgactcagaggaagaaatcatcaagcctaggtcagcaccttttagcttcctgagcaatgtgaaatacaactttatgaggatcatcaaatacgaattcatcctgaatgacgccctcaatcaaagtataattcgagccaatgatcagtacctcacggctgctgcattacataatctggatgaagcagtgaaatttgacatgggtgcttataagtcatcaaaggatgatgctaaaattaccgtgattctaagaatctcaaaaactcaattgtatgtgactgcccaagatgaagaccaaccagtgctgctgaaggagatgcctgagatacccaaaaccatcacaggtagtgagaccaacctcctcttcttctgggaaactcacggcactaagaactatttcacatcagttgcccatccaaacttgtttattgccacaaagcaagactactgggtgtgcttggcaggggggccaccctctatcactgactttcagatactggaaaaccaggcgtaggtctggagtctcacttgtctcacttgtgcagtgttgacagttcatatgtaccatgtacatgaagaagctaaatcctttactgttagtcatttgctgagcatgtactgagccttgtaattctaaatgaatgtttacactctttgtaagagtggaaccaacactaacatataatgttgttatttaaagaacaccctatattttgcatagtaccaatcattttaattattattcttcataacaattttaggaggaccagagctactgactatggctaccaaaaagactctacccatattacagatgggcaaattaaggcataagaaaactaagaaatatgcacaatagcagttgaaacaagaagccacagacctaggatttcatgatttcatttcaactgtttgccttctacttttaagttgctgatgaactcttaatcaaatagcataagtttctgggacctcagttttatcattttcaaaatggagggaataatacctaagccttcctgccgcaacagttttttatgctaatcagggaggtcattttggtaaaatacttctcgaagccgagcctcaagatgaaggcaaagcacgaaatgttattttttaattattatttatatatgtatttataaatatatttaagataattataatatactatatttatgggaaccccttcatcctctgagtgtgaccaggcatcctccacaatagcagacagtgttttctgggataagtaagtttgatttcattaatacagggcattttggtccaagttgtgcttatcccatagccaggaaactctgcattctagtacttgggagacctgtaatcatataataaatgtacattaattaccttgagccagtaattggtccgatctttgactcttttgccattaaacttacctgggcattcttgtttcattcaattccacctgcaatcaagtcctacaagctaaaattagatgaactcaactttgacaaccatgagaccactgttatcaaaactttcttttctggaatgtaatcaatgtttcttctaggttctaaaaattgtgatcagaccataatgttacattattatcaacaatagtgattgatagagtgttatcagtcataactaaataaagcttgcaagtgagggagtcatttcattggcgtttgagtcagcaaagaagtcaag

SEQ ID NO: 72505 - DNA, 2750 bp, Homo sapiens
aggggcccacttagatgataccagagagcaagagagaggaactggggtttgcgaaccttgtggctttgtctgtttcctgtttcagcaaggctgctgtgcaaaaagaaagacggtaccaagaagggacgtgttaatggggcccagacctatggattgaaagcgtgtgctttacccatctgctgtcttgctccatctgagaccagagccaagatctgcccaggactggaatgctttcccgagtggcttgagttggagcctgggactaggagcagccttattgaggtacaattcatgtgcttgtgggtttggatggcacaatctgtgtctgggctaaggaaagcagacttggcaccaacattaaccctgacagatccaggcatctattccaggaactggaagccaagcgcaacaggtgcttggaggtcatcatgatcagcccagaccccaggccctcccctggcttggcccggtgggctgagagctatgaggccaagtgtgagcgcaggcaagagatccgtgaaagccgccgctgccgtcccaatgtgaccacttgccgccaggtggggaagacgctgaggatccaacagagagagcagctccagagagctcgactgcagcagttcttcaggaggaggaacctggagctagaggagaagggcaaagcgcagcatccccaggccagggagcaagggccctccaggcggccaggacaggtgacaggcaccagctctgaagtctttccagcccagcatcctcctccctcaggcatctgcagggatctgtctgaccacctctcctcacaggctgggggccttcctccacaggacactcccatcaagaagccacccaaacaccaccgtggtactcagacaaaggcagaaggaccaacaattaagaacgatgccagtcagcaaaccaattacggagttgcagttctggataaggaaatcatccagctttctgattacctcaaagaggccctacaaagggagctggtcctaaaacagaaaatggtgattctccaagacctactgtccactctgattcaggcctctgacagctcttggaagggacagcttaatgaagacaaactgaaggggaaactgagatccttagaaaaccagctatacacctgtacccagaaatactccccttggggaatgaaaaaagtactactggagatggaagaccagaaaaacagctatgagcagaaggccaaggagtcactgcagaaagtgctggaggagaaaatgaatgcagagcagcaactacagagcacacagcgatccctggccctggcagagcagaagtgtgaagagtggaggagccagtatgaggctctgaaggaggactggaggacccttgggacccagcacagggagctggagagccaactccacgtgcttcagtccaaactgcagggagcagatagcagggacttacagatgaaccaggccctgcgatttttggaaaatgagcaccaggaactgcaggccaagattgaatgcctgcaaggggacagagacctgtgcagcttggatacccaggacctacaagatcaactaaaaaggtcagaggcagagaaactcaccctggtgaccagagtacagcagttgcagggtttgcttcaaaatcaatccttacagcttcaagaacaggagaaactcttaacaaagaaagatcaggctttgcccgtgtggagtccaaagtccttccctaacgaagtggagcctgagggtacagggaaggagaaagactgggatctcagagaccagctgcaaaagaagactttgcagctccaggccaaggaaaaggagtgcagagaactgcattcagaattagacaacctcagtgacgagtatctctcctgcctgcgtaagctgcagcactgtcgagaagagctgaaccagagccagcagctgcctcccagaaggcaatgtgggcgatggctcccagtgctgatggtggtgattgctgcagcactggcagtgttcctggccaataaagacaacctgatgatctgaataatttgtgacaactgccttgggtgaaaatcagaagcaagcaactcagcgaaaaactcagaaggtttgggtacattacagcttgggttttccaactgacttaggatttctgactttttattaatttcttaacctactgtaaataaacttcacctgaccagattgttcctcagaactctcagtttattcctgaatggtgtattacattaacaagtatcacatatttaagcatactggtggtctactctcctcaaattcagttggaggcatataaacatgcagaaaagcccccagccctactttcctagcatgcagcacccacatagagcaggtatatttacaaggttaccatgcaagagtgtttggcttgtcttccatcaccctgcttttcctctatcatctccttccttctatcttttatccagtgaaaatgaaaacatctccactaagaggacttcctagtatagaaatggcaagtatgtactatctaccaatttgctactagcaccaccattacctatttacatgccctttgcatttgtggccaactgatctacagcattgtgccttagtgtattcaagacacttggaattggcagttgagatgattatttgccatccccaacctagagatgatcatttactgagtaccttctatatgggaggagagttaaagtcagagggccacagccggcagtgtgactatctcagaggagatgctgagat

SEQ ID NO: 72506 - DNA, 448 bp, Homo sapiens
agcagatgggaacatatttaataaccaaggttctaagcaaagttctgaaaagaaaactttttgtagtaaatatgctagcatagacaagttccttgtgttttccaacaggtttgcttcaaaatcaatccttacagcttcaagaacaggagaaactcttaacaaagaaaggtcagcaaatttattaccacaaattctaagatattgctcttctcttacctgcctagaggcagcgggatggactacatgacctcctggagtcccagccagttctgggagtctgttaagtccgggatgtgtgggagctttttaaggactgatcattggctctgaggacacttcaactagttagccttctatcttgaggtatataaactgtgaaaaagggtttctattctctctgaaagcacatgtctgtgttgaacatttcaataaatttattttgaactca

SEQ ID NO: 72507 - DNA, 3668 bp, Homo sapiens
agcagatgggaacatatttaataaccaaggttctaagcaaagttctgaaaagaaaactttttgtagtaaatatgctagcatagacaagttccttgtgttttccaacaggtttgcttcaaaatcaatccttacagcttcaagaacaggagaaactcttaacaaagaaaggtcagcaaatttattaccacaaattctaagatattgctcttctcttacctgcctagaggcagcgggatggactacatgacctcctggagtcccagccagttctgggagtctgttaagtccgggatgtgtgggagctttttaaggactgatcattggctctgaggacacttcaactagttagccttctatcttgaggtatataaactgtgaaaaagggtttctattctctctgaaagcacatgtctgtgttgaacatttcaataaatttattttgaactcaggatttcatgtcaatttttacacacttgattttccaaatcacatccaactccccagccccaaaccacatagcagtccagagtcaactcactgttagccctagagagtctactgtccatgtttcctgagaattcactgtgtatacagaggggcaatagctcctcacctgtccactacacacgaccttttgttttctcttcacaatcattgggcataatataatagataaggcagaaatttttatgctcacagagtatggataagaacatgaaagtctatggtgacacaaactaacaacacagctataacaacaatccaaaacttctgactcctagtccatgctcttttcaccaagactaagactgcagggtggctaaaaaaccatctttaaccatatgaagataaattttaggatatgactgccatcttcacaactttcaaatgaggacatcagggaaaagggattgtattaaagcatttaccaaacttatttgacaaactaggaagaatgtgacatacaaccaatgaaattcaattaagaagtattcactaaaactatctagcactagataggactggggatacaaagaaaagatcccaatcttgccctcaaggagctcagattccagctgtctgtccaagcttagcaggggcctactggaagttaacctttatgtcagagaatgccatcagtctagccaaaagcacgccctcccaagttccctcccctctccccactcctagtggtttcaccctcagggcccttcctcagaggtgtgggcctcactgtcaccaagaatctggctgcttttttagatcaggctttgcccgtgtggagtccaaagtccttccctaacgaagtggagcctgagggtacagggaaggagaaagactgggatctcagagaccagctgcaaaagaagactttgcagctccaggccaaggaaaaggaggtgagagggtgacctgagatagtgagggctcatttgcgaaatagcagagaaacctgggaggcagtcaaaaagcagggatttcaaagtttaagttgtgagtggataaccacagacattcatttgcctacataaagtgtctgtgcttttgggctgacttgtcaatcttttcccttccttatttataccaactcctattcaaggttttattaaatgattaccttttagaaagtcgaccaaaactcaaacacatttaataaaaatattaacttctcaatatgtcgtcccacattgagtatcttaagtctttatatgtctcttaaagagtaaaactcttcctttgtacatactcacaaacatacacatccccagaagtattgatatgcaactagctcctgggaaagaaacttgtactaaggtcacttctaggtcgtttgttctataagaacttcatttttcggtgtctctcatttgcaaagcacttgcacgtaaagtcatataaaagaacttaaatgtataaaatgtaatactataatatgcattactgtcaatcatttaaatgaacacattccagacaatgtaagacagtcaaaagacaaactcaaatccctgagaatggctgggaagggaagatggtggtaaaaattccaaatgagtgaaacttacaaagggcagtctcccctgcctgggctctgtcctagacagaagtgacagtgatgactttggtgatgttctccccagtgcagagaactgcattcagaattagacaacctcagtgacgagtatctctcctgcctgcgtaagctgcagcactgtcgagaagagctgaaccagagccagcagctgcctcccagagtaagagggtctctccttcccataaagccctggatgatgggacgattccttctttaaccaagttttgcacataaaatatatcagcccacgccaacaactggccatcctgtcccactgtgcttggtttatactatactgacattatggcaaccattgaaaaaaacactggctcgtccatcaaagcccaactttcacagaactctcaatgccagaaggaaagacttactcttagctaaagtatgaaagggtgttcttttagccgatgataagcatggtggcaagaacagaaggacacaaaagtactggggaatacaaagaaagaatataattttgctgggttattttccacccttcattattcatatcagtatttatatatctggtccctgatggatacggctccctgggccagagaacattggttaagtggttttatcccaagacaggtgacaaaatgggagacagagtaaaaagctttttctccaccaccaacccagcgttttccactgggctagagtaggaagaagaaagatttttgcctatatcttttccaatccactcatggccactttcttctgtctccctgtccccctacagaggcaatgtgggcgatggctcccagtgctgatggtggtgattgctgcagcactggcagtgttcctggccaataaagacaacctgatgatctgaataatttgtgacaactgccttgggtgaaaatcagaagcaagcaactcagcgaaaaactcagaaggtttgggtacattacagcttgggttttccaactgacttaggatttctgactttttattaatttcttaacctactgtaaataaacttcacctgaccagattgttcctcagaactctcagtttattcctgaatggtgtattacattaacaagtatcacatatttaagcatactggtggtctactctcctcaaattcagttggaggcatataaacatgcagaaaagcccccagccctactttcctagcatgcagcacccacatagagcaggtatatttacaaggttaccatgcaagagtgtttggcttgtcttccatcaccctgcttttcctctatcatctccttccttctatcttttatccagtgaaaatgaaaacatctccactaagaggacttcctagtatagaaatggcaagtatgtactatctaccaatttgctactagcaccaccattacctatttacatgccctttgcatttgtggccaactgatctacagcattgtgccttagtgtattcaagacacttggaattggcagttgagatgattatttgccatccccaacctagagatgatcatttactgagtaccttctatatgggaggagagttaaagtcagagggccacagccggcagtgtgactatctcagaggagatgctgagat

SEQ ID NO: 72508 - DNA, 5124 bp, Homo sapiens
aggggcccacttagatgataccagagagcaagagagaggaactggggtttgcgaaccttgtggctttgtctgtttcctgtttcagcaaggctgctgtgcaaaaagaaagacggtaccaagaagggacgtgttaatggggcccagacctatggattgaaagcgtgtgctttacccatctgctgtcttgctccatctgagaccagagccaagatctgcccaggactggaatgctttcccgagtggcttgagttggagcctgggactaggagcagccttattgaggtacaattcatgtgcttgtgggtttggatggcacaatctgtgtctgggctaaggaaagcagacttggcaccaacattaaccctgacagatccaggcatctattccaggaactggaagccaagcgcaacaggtgcttggaggtcatcatgatcagcccagaccccaggccctcccctggcttggcccggtgggctgagagctatgaggccaagtgtgagcgcaggcaagagatccgtgaaagccgccgctgccgtcccaatgtgaccacttgccgccaggtggggaagacgctgaggatccaacagagagagcagctccagagagctcgactgcagcagttcttcaggaggaggaacctggagctagaggagaagggcaaagcgcagcatccccaggccagggagcaagggccctccaggcggccaggacaggtgactgtcctcaaggaacccttgtcttgtgccagaaggatttcttctcccagagagcaggtgacaggcaccagctctgaagtctttccagcccagcatcctcctccctcaggcatctgcagggatctgtctgaccacctctcctcacaggctgggggccttcctccacaggacactcccatcaagaagccacccaaacaccaccgtggtactcagacaaaggcagaaggaccaacaattaagaacgatgccagtcagcaaaccaattacggagttgcagttctggataaggaaatcatccagctttctgattacctcaaagaggccctacaaagggagctggtcctaaaacagaaaatggtgattctccaagacctactgtccactctgattcaggcctctgacagctcttggaagggacagcttaatgaagacaaactgaaggggaaactgagatccttagaaaaccagctatacacctgtacccagaaatactccccttggggaatgaaaaaagtactactggagatggaagaccagaaaaacagctatgagcagaaggccaaggagtcactgcagaaagtgctggaggagaaaatgaatgcagagcagcaactacagagcacacagcgatccctggccctggcagagcagaagtgtgaagagtggaggagccagtatgaggctctgaaggaggactggaggacccttgggacccagcacagggagctggagagccaactccacgtgcttcagtccaaactgcagggagcagatagcagggacttacagatgaaccaggccctgcgatttttggaaaatgagcaccaggaactgcaggccaagattgaatgcctgcaaggggacagagacctgtgcagcttggatacccaggacctacaagatcaactaaaaaggtcagaggcagagaaactcaccctggtgaccagagtacagcagttgcaggaggcagcgggatggactacatgacctcctggagtcccagccagttctgggagtctgttaagtccgggatgtgtgggagctttttaaggactgatcattggctctgaggacacttcaactagttagccttctatcttgaggtatataaactgtgaaaaagggtttctattctctctgaaagcacatgtctgtgttgaacatttcaataaatttattttgaactcaggatttcatgtcaatttttacacacttgattttccaaatcacatccaactccccagccccaaaccacatagcagtccagagtcaactcactgttagccctagagagtctactgtccatgtttcctgagaattcactgtgtatacagaggggcaatagctcctcacctgtccactacacacgaccttttgttttctcttcacaatcattgggcataatataatagataaggcagaaatttttatgctcacagagtatggataagaacatgaaagtctatggtgacacaaactaacaacacagctataacaacaatccaaaacttctgactcctagtccatgctcttttcaccaagactaagactgcagggtggctaaaaaaccatctttaaccatatgaagataaattttaggatatgactgccatcttcacaactttcaaatgaggacatcagggaaaagggattgtattaaagcatttaccaaacttatttgacaaactaggaagaatgtgacatacaaccaatgaaattcaattaagaagtattcactaaaactatctagcactagataggactggggatacaaagaaaagatcccaatcttgccctcaaggagctcagattccagctgtctgtccaagcttagcaggggcctactggaagttaacctttatgtcagagaatgccatcagtctagccaaaagcacgccctcccaagttccctcccctctccccactcctagtggtttcaccctcagggcccttcctcagaggtgtgggcctcactgtcaccaagaatctggctgcttttttagatcaggctttgcccgtgtggagtccaaagtccttccctaacgaagtggagcctgagggtacagggaaggagaaagactgggatctcagagaccagctgcaaaagaagactttgcagctccaggccaaggaaaaggaggtgagagggtgacctgagatagtgagggctcatttgcgaaatagcagagaaacctgggaggcagtcaaaaagcagggatttcaaagtttaagttgtgagtggataaccacagacattcatttgcctacataaagtgtctgtgcttttgggctgacttgtcaatcttttcccttccttatttataccaactcctattcaaggttttattaaatgattaccttttagaaagtcgaccaaaactcaaacacatttaataaaaatattaacttctcaatatgtcgtcccacattgagtatcttaagtctttatatgtctcttaaagagtaaaactcttcctttgtacatactcacaaacatacacatccccagaagtattgatatgcaactagctcctgggaaagaaacttgtactaaggtcacttctaggtcgtttgttctataagaacttcatttttcggtgtctctcatttgcaaagcacttgcacgtaaagtcatataaaagaacttaaatgtataaaatgtaatactataatatgcattactgtcaatcatttaaatgaacacattccagacaatgtaagacagtcaaaagacaaactcaaatccctgagaatggctgggaagggaagatggtggtaaaaattccaaatgagtgaaacttacaaagggcagtctcccctgcctgggctctgtcctagacagaagtgacagtgatgactttggtgatgttctccccagtgcagagaactgcattcagaattagacaacctcagtgacgagtatctctcctgcctgcgtaagctgcagcactgtcgagaagagctgaaccagagccagcagctgcctcccagagtaagagggtctctccttcccataaagccctggatgatgggacgattccttctttaaccaagttttgcacataaaatatatcagcccacgccaacaactggccatcctgtcccactgtgcttggtttatactatactgacattatggcaaccattgaaaaaaacactggctcgtccatcaaagcccaactttcacagaactctcaatgccagaaggaaagacttactcttagctaaagtatgaaagggtgttcttttagccgatgataagcatggtggcaagaacagaaggacacaaaagtactggggaatacaaagaaagaatataattttgctgggttattttccacccttcattattcatatcagtatttatatatctggtccctgatggatacggctccctgggccagagaacattggttaagtggttttatcccaagacaggtgacaaaatgggagacagagtaaaaagctttttctccaccaccaacccagcgttttccactgggctagagtaggaagaagaaagatttttgcctatatcttttccaatccactcatggccactttcttctgtctccctgtccccctacagaggcaatgtgggcgatggctcccagtgctgatggtggtgattgctgcagcactggcagtgttcctggccaataaagacaacctgatgatctgaataatttgtgacaactgccttgggtgaaaatcagaagcaagcaactcagcgaaaaactcagaaggtttgggtacattacagcttgggttttccaactgacttaggatttctgactttttattaatttcttaacctactgtaaataaacttcacctgaccagattgttcctcagaactctcagtttattcctgaatggtgtattacattaacaagtatcacatatttaagcatactggtggtctactctcctcaaattcagttggaggcatataaacatgcagaaaagcccccagccctactttcctagcatgcagcacccacatagagcaggtatatttacaaggttaccatgcaagagtgtttggcttgtcttccatcaccctgcttttcctctatcatctccttccttctatcttttatccagtgaaaatgaaaacatctccactaagaggacttcctagtatagaaatggcaagtatgtactatctaccaatttgctactagcaccaccattacctatttacatgccctttgcatttgtggccaactgatctacagcattgtgccttagtgtattcaagacacttggaattggcagttgagatgattatttgccatccccaacctagagatgatcatttactgagtaccttctatatgggaggagagttaaagtcagagggccacagccggcagtgtgactatctcagaggagatgctgagat

SEQ ID NO: 72509 - DNA, 3071 bp, Homo sapiens
agcagatgggaacatatttaataaccaaggttctaagcaaagttctgaaaagaaaactttttgtagtaaatatgctagcatagacaagttccttgtgttttccaacaggtttgcttcaaaatcaatccttacagcttcaagaacaggagaaactcttaacaaagaaaggtcagcaaatttattaccacaaattctaagatattgctcttctcttacctgcctagaggcagcgggatggactacatgacctcctggagtcccagccagttctgggagtctgttaagtccgggatgtgtgggagctttttaaggactgatcattggctctgaggacacttcaactagttagccttctatcttgaggtatataaactgtgaaaaagggtttctattctctctgaaagcacatgtctgtgttgaacatttcaataaatttattttgaactcaggatttcatgtcaatttttacacacttgattttccaaatcacatccaactccccagccccaaaccacatagcagtccagagtcaactcactgttagccctagagagtctactgtccatgtttcctgagaattcactgtgtatacagaggggcaatagctcctcacctgtccactacacacgaccttttgttttctcttcacaatcattgggcataatataatagataaggcagaaatttttatgctcacagagtatggataagaacatgaaagtctatggtgacacaaactaacaacacagctataacaacaatccaaaacttctgactcctagtccatgctcttttcaccaagactaagactgcagggtggctaaaaaaccatctttaaccatatgaagataaattttaggatatgactgccatcttcacaactttcaaatgaggacatcagggaaaagggattgtattaaagcatttaccaaacttatttgacaaactaggaagaatgtgacatacaaccaatgaaattcaattaagaagtattcactaaaactatctagcactagataggactggggatacaaagaaaagatcccaatcttgccctcaaggagctcagattccagctgtctgtccaagcttagcaggggcctactggaagttaacctttatgtcagagaatgccatcagtctagccaaaagcacgccctcccaagttccctcccctctccccactcctagtggtttcaccctcagggcccttcctcagaggtgtgggcctcactgtcaccaagaatctggctgcttttttagatcaggctttgcccgtgtggagtccaaagtccttccctaacgaagtggagcctgagggtacagggaaggagaaagactgggatctcagagaccagctgcaaaagaagactttgcagctccaggccaaggaaaaggaggtgagagggtgacctgagatagtgagggctcatttgcgaaatagcagagaaacctgggaggcagtcaaaaagcagggatttcaaagtttaagttgtgagtggataaccacagacattcatttgcctacataaagtgtctgtgcttttgggctgacttgtcaatcttttcccttccttatttataccaactcctattcaaggttttattaaatgattaccttttagaaagtcgaccaaaactcaaacacatttaataaaaatattaacttctcaatatgtcgtcccacattgagtatcttaagtctttatatgtctcttaaagagtaaaactcttcctttgtacatactcacaaacatacacatccccagaagtattgatatgcaactagctcctgggaaagaaacttgtactaaggtcacttctaggtcgtttgttctataagaacttcatttttcggtgtctctcatttgcaaagcacttgcacgtaaagtcatataaaagaacttaaatgtataaaatgtaatactataatatgcattactgtcaatcatttaaatgaacacattccagacaatgtaagacagtcaaaagacaaactcaaatccctgagaatggctgggaagggaagatggtggtaaaaattccaaatgagtgaaacttacaaagggcagtctcccctgcctgggctctgtcctagacagaagtgacagtgatgactttggtgatgttctccccagtgcagagaactgcattcagaattagacaacctcagtgacgagtatctctcctgcctgcgtaagctgcagcactgtcgagaagagctgaaccagagccagcagctgcctcccagaaggcaatgtgggcgatggctcccagtgctgatggtggtgattgctgcagcactggcagtgttcctggccaataaagacaacctgatgatctgaataatttgtgacaactgccttgggtgaaaatcagaagcaagcaactcagcgaaaaactcagaaggtttgggtacattacagcttgggttttccaactgacttaggatttctgactttttattaatttcttaacctactgtaaataaacttcacctgaccagattgttcctcagaactctcagtttattcctgaatggtgtattacattaacaagtatcacatatttaagcatactggtggtctactctcctcaaattcagttggaggcatataaacatgcagaaaagcccccagccctactttcctagcatgcagcacccacatagagcaggtatatttacaaggttaccatgcaagagtgtttggcttgtcttccatcaccctgcttttcctctatcatctccttccttctatcttttatccagtgaaaatgaaaacatctccactaagaggacttcctagtatagaaatggcaagtatgtactatctaccaatttgctactagcaccaccattacctatttacatgccctttgcatttgtggccaactgatctacagcattgtgccttagtgtattcaagacacttggaattggcagttgagatgattatttgccatccccaacctagagatgatcatttactgagtaccttctatatgggaggagagttaaagtcagagggccacagccggcagtgtgactatctcagaggagatgctgagat

SEQ ID NO: 72510 - DNA, 3104 bp, Homo sapiens
agcagatgggaacatatttaataaccaaggttctaagcaaagttctgaaaagaaaactttttgtagtaaatatgctagcatagacaagttccttgtgttttccaacaggtttgcttcaaaatcaatccttacagcttcaagaacaggagaaactcttaacaaagaaaggtcagcaaatttattaccacaaattctaagatattgctcttctcttacctgcctagaggcagcgggatggactacatgacctcctggagtcccagccagttctgggagtctgttaagtccgggatgtgtgggagctttttaaggactgatcattggctctgaggacacttcaactagttagccttctatcttgaggtatataaactgtgaaaaagggtttctattctctctgaaagcacatgtctgtgttgaacatttcaataaatttattttgaactcaggatttcatgtcaatttttacacacttgattttccaaatcacatccaactccccagccccaaaccacatagcagtccagagtcaactcactgttagccctagagagtctactgtccatgtttcctgagaattcactgtgtatacagaggggcaatagctcctcacctgtccactacacacgaccttttgttttctcttcacaatcattgggcataatataatagataaggcagaaatttttatgctcacagagtatggataagaacatgaaagtctatggtgacacaaactaacaacacagctataacaacaatccaaaacttctgactcctagtccatgctcttttcaccaagactaagactgcagggtggctaaaaaaccatctttaaccatatgaagataaattttaggatatgactgccatcttcacaactttcaaatgaggacatcagggaaaagggattgtattaaagcatttaccaaacttatttgacaaactaggaagaatgtgacatacaaccaatgaaattcaattaagaagtattcactaaaactatctagcactagataggactggggatacaaagaaaagatcccaatcttgccctcaaggagctcagattccagctgtctgtccaagcttagcaggggcctactggaagttaacctttatgtcagagaatgccatcagtctagccaaaagcacgccctcccaagttccctcccctctccccactcctagtggtttcaccctcagggcccttcctcagaggtgtgggcctcactgtcaccaagaatctggctgcttttttagatcaggctttgcccgtgtggagtccaaagtccttccctaacgaagtggagcctgagggtacagggaaggagaaagactgggatctcagagaccagctgcaaaagaagactttgcagctccaggccaaggaaaaggaggtgagagggtgacctgagatagtgagggctcatttgcgaaatagcagagaaacctgggaggcagtcaaaaagcagggatttcaaagtttaagttgtgagtggataaccacagacattcatttgcctacataaagtgtctgtgcttttgggctgacttgtcaatcttttcccttccttatttataccaactcctattcaaggttttattaaatgattaccttttagaaagtcgaccaaaactcaaacacatttaataaaaatattaacttctcaatatgtcgtcccacattgagtatcttaagtctttatatgtctcttaaagagtaaaactcttcctttgtacatactcacaaacatacacatccccagaagtattgatatgcaactagctcctgggaaagaaacttgtactaaggtcacttctaggtcgtttgttctataagaacttcatttttcggtgtctctcatttgcaaagcacttgcacgtaaagtcatataaaagaacttaaatgtataaaatgtaatactataatatgcattactgtcaatcatttaaatgaacacattccagacaatgtaagacagtcaaaagacaaactcaaatccctgagaatggctgggaagggaagatggtggtaaaaattccaaatgagtgaaacttacaaagggcagtctcccctgcctgggctctgtcctagacagaagtgacagtgatgactttggtgatgttctccccagtgcagagaactgcattcagaattagacaacctcagtgacgagtatctctcctgcctgcgtaagctgcagcactgtcgagaagagctgaaccagagccagcagctgcctcccagagtaagagggtctctccttcccataaagccctggatgatgggacgattccttctttaaccaagttttgcacataaaatatatcagcccacgccaacaactggccatcctgtcccactgtgcttggtttatactatactgacattatggcaaccattgaaaaaaacactggctcgtccatcaaagcccaactttcacagaactctcaatgccagaaggaaagacttactcttagctaaagtatgaaagggtgttcttttagccgatgataagcatggtggcaagaacagaaggacacaaaagtactggggaatacaaagaaagaatataattttgctgggttattttccacccttcattattcatatcagtatttatatatctggtccctgatggatacggctccctgggccagagaacattggttaagtggttttatcccaagacaggtgacaaaatgggagacagagtaaaaagctttttctccaccaccaacccagcgttttccactgggctagagtaggaagaagaaagatttttgcctatatcttttccaatccactcatggccactttcttctgtctccctgtccccctacagaggcaatgtgggcgatggctcccagtgctgatggtggtgattgctgcagcactggcagtgttcctggccaataaagacaacctgatgatctgaataatttgtgacaactgccttgggtgaaaatcagaagcaagcaactcagcgaaaaactcagaaggtttgggtacattacagcttgggttttccaactgacttaggatttctgactttttattaatttcttaacctactgtaaataaacttcacctgaccaga

SEQ ID NO: 72511 - DNA, 2020 bp, Homo sapiens
aggggcccacttagatgataccagagagcaagagagaggaactggggtttgcgaaccttgtggctttgtctgtttcctgtttcagcaaggctgctgtgcaaaaagaaagacggtaccaagaagggacgtgttaatggggcccagacctatggattgaaagcgtgtgctttacccatctgctgtcttgctccatctgagaccagagccaagatctgcccaggactggaatgctttcccgagtggcttgagttggagcctgggactaggagcagccttattgaggtacaattcatgtgcttgtgggtttggatggcacaatctgtgtctgggctaaggaaagcagacttggcaccaacattaaccctgacagatccaggcatctattccaggaactggaagccaagcgcaacaggtgcttggaggtcatcatgatcagcccagaccccaggccctcccctggcttggcccggtgggctgagagctatgaggccaagtgtgagcgcaggcaagagatccgtgaaagccgccgctgccgtcccaatgtgaccacttgccgccaggtggggaagacgctgaggatccaacagagagagcagctccagagagctcgactgcagcagttcttcaggaggaggaacctggagctagaggagaagggcaaagcgcagcatccccaggccagggagcaagggccctccaggcggccaggacaggtgactgtcctcaaggaacccttgtcttgtgccagaaggatttcttctcccagagagcaggtgacaggcaccagctctgaagtctttccagcccagcatcctcctccctcaggcatctgcagggatctgtctgaccacctctcctcacaggctgggggccttcctccacaggacactcccatcaagaagccacccaaacaccaccgtggtactcagacaaaggcagaaggaccaacaattaagaacgatgccagtcagcaaaccaattacggagttgcagttctggataaggaaatcatccagctttctgattacctcaaagaggccctacaaagggagctggtcctaaaacagaaaatggtgattctccaagacctactgtccactctgattcaggcctctgacagctcttggaagggacagcttaatgaagacaaactgaaggggaaactgagatccttagaaaaccagctatacacctgtacccagaaatactccccttggggaatgaaaaaagtactactggagatggaagaccagaaaaacagctatgagcagaaggccaaggagtcactgcagaaagtgctggaggagaaaatgaatgcagagcagcaactacagagcacacagcgatccctggccctggcagagcagaagtgtgaagagtggaggagccagtatgaggctctgaaggaggactggaggacccttgggacccagcacagggagctggagagccaactccacgtgcttcagtccaaactgcagggagcagatagcagggacttacagatgaaccaggccctgcgatttttggaaaatgagcaccaggaactgcaggccaagattgaatgcctgcaaggggacagagacctgtgcagcttggatacccaggacctacaagatcaactaaaaaggtcagaggcagagaaactcaccctggtgaccagagtacagcagttgcagggtttgcttcaaaatcaatccttacagcttcaagaacaggagaaactcttaacaaagaaaggtcagcaaatttattaccacaaattctaagatattgctcttctcttacctgcctagaggcagcgggatggactacatgacctcctggagtcccagccagttctgggagtctgttaagtccgggatgtgtgggagctttttaaggactgatcattggctctgaggacacttcaactagttagccttctatcttgaggtatataaactgtgaaaaagggtttctattctctctgaaagcacatgtctgtgttgaacatttcaataaatttattttgaactca

SEQ ID NO: 72512 - DNA, 2507 bp, Homo sapiens
agcagatgggaacatatttaataaccaaggttctaagcaaagttctgaaaagaaaactttttgtagtaaatatgctagcatagacaagttccttgtgttttccaacaggtttgcttcaaaatcaatccttacagcttcaagaacaggagaaactcttaacaaagaaaggtcagcaaatttattaccacaaattctaagatattgctcttctcttacctgcctagaggcagcgggatggactacatgacctcctggagtcccagccagttctgggagtctgttaagtccgggatgtgtgggagctttttaaggactgatcattggctctgaggacacttcaactagttagccttctatcttgaggtatataaactgtgaaaaagggtttctattctctctgaaagcacatgtctgtgttgaacatttcaataaatttattttgaactcaggatttcatgtcaatttttacacacttgattttccaaatcacatccaactccccagccccaaaccacatagcagtccagagtcaactcactgttagccctagagagtctactgtccatgtttcctgagaattcactgtgtatacagaggggcaatagctcctcacctgtccactacacacgaccttttgttttctcttcacaatcattgggcataatataatagataaggcagaaatttttatgctcacagagtatggataagaacatgaaagtctatggtgacacaaactaacaacacagctataacaacaatccaaaacttctgactcctagtccatgctcttttcaccaagactaagactgcagggtggctaaaaaaccatctttaaccatatgaagataaattttaggatatgactgccatcttcacaactttcaaatgaggacatcagggaaaagggattgtattaaagcatttaccaaacttatttgacaaactaggaagaatgtgacatacaaccaatgaaattcaattaagaagtattcactaaaactatctagcactagataggactggggatacaaagaaaagatcccaatcttgccctcaaggagctcagattccagctgtctgtccaagcttagcaggggcctactggaagttaacctttatgtcagagaatgccatcagtctagccaaaagcacgccctcccaagttccctcccctctccccactcctagtggtttcaccctcagggcccttcctcagaggtgtgggcctcactgtcaccaagaatctggctgcttttttagatcaggctttgcccgtgtggagtccaaagtccttccctaacgaagtggagcctgagggtacagggaaggagaaagactgggatctcagagaccagctgcaaaagaagactttgcagctccaggccaaggaaaaggaggtgagagggtgacctgagatagtgagggctcatttgcgaaatagcagagaaacctgggaggcagtcaaaaagcagggatttcaaagtttaagttgtgagtggataaccacagacattcatttgcctacataaagtgtctgtgcttttgggctgacttgtcaatcttttcccttccttatttataccaactcctattcaaggttttattaaatgattaccttttagaaagtcgaccaaaactcaaacacatttaataaaaatattaacttctcaatatgtcgtcccacattgagtatcttaagtctttatatgtctcttaaagagtaaaactcttcctttgtacatactcacaaacatacacatccccagaagtattgatatgcaactagctcctgggaaagaaacttgtactaaggtcacttctaggtcgtttgttctataagaacttcatttttcggtgtctctcatttgcaaagcacttgcacgtaaagtcatataaaagaacttaaatgtataaaatgtaatactataatatgcattactgtcaatcatttaaatgaacacattccagacaatgtaagacagtcaaaagacaaactcaaatccctgagaatggctgggaagggaagatggtggtaaaaattccaaatgagtgaaacttacaaagggcagtctcccctgcctgggctctgtcctagacagaagtgacagtgatgactttggtgatgttctccccagtgcagagaactgcattcagaattagacaacctcagtgacgagtatctctcctgcctgcgtaagctgcagcactgtcgagaagagctgaaccagagccagcagctgcctcccagaaggcaatgtgggcgatggctcccagtgctgatggtggtgattgctgcagcactggcagtgttcctggccaataaagacaacctgatgatctgaataatttgtgacaactgccttgggtgaaaatcagaagcaagcaactcagcgaaaaactcagaaggtttgggtacattacagcttgggttttccaactgacttaggatttctgactttttattaatttcttaacctactgtaaataaacttcacctgaccaga

SEQ ID NO: 72513 - DNA, 2673 bp, Homo sapiens
aggggcccacttagatgataccagagagcaagagagaggaactggggtttgcgaaccttgtggctttgtctgtttcctgtttcagcaaggctgctgtgcaaaaagaaagacggtaccaagaagggacgtgttaatggggcccagacctatggattgaaagcgtgtgctttacccatctgctgtcttgctccatctgagaccagagccaagatctgcccaggactggaatgctttcccgagtggcttgagttggagcctgggactaggagcagccttattgaggtacaattcatgtgcttgtgggtttggatggcacaatctgtgtctgggctaaggaaagcagacttggcaccaacattaaccctgacagatccaggcatctattccaggaactggaagccaagcgcaacaggtgcttggaggtcatcatgatcagcccagaccccaggccctcccctggcttggcccggtgggctgagagctatgaggccaagtgtgagcgcaggcaagagatccgtgaaagccgccgctgccgtcccaatgtgaccacttgccgccaggtggggaagacgctgaggatccaacagagagagcagctccagagagctcgactgcagcagttcttcaggaggaggaacctggagctagaggagaagggcaaagcgcagcatccccaggccagggagcaagggccctccaggcggccaggacaggtgactgtcctcaaggaacccttgtcttgtgccagaaggatttcttctcccagagagcaggtgacaggcaccagctctgaagtctttccagcccagcatcctcctccctcaggcatctgcagggatctgtctgaccacctctcctcacaggctgggggccttcctccacaggacactcccatcaagaagccacccaaacaccaccgtggtactcagacaaaggcagaaggaccaacaattaagaacgatgccagtcagcaaaccaattacggagttgcagttctggataaggaaatcatccagctttctgattacctcaaagaggccctacaaagggagctggtcctaaaacagaaaatggtgattctccaagacctactgtccactctgattcaggcctctgacagctcttggaagggacagcttaatgaagacaaactgaaggggaaactgagatccttagaaaaccagctatacacctgtacccagaaatactccccttggggaatgaaaaaagtactactggagatggaagaccagaaaaacagctatgagcagaaggccaaggagtcactgcagaaagtgctggaggagaaaatgaatgcagagcagcaactacagagcacacagcgatccctggccctggcagagcagaagtgtgaagagtggaggagccagtatgaggctctgaaggaggactggaggacccttgggacccagcacagggagctggagagccaactccacgtgcttcagtccaaactgcagggagcagatagcagggacttacagatgaaccaggccctgcgatttttggaaaatgagcaccaggaactgcaggccaagattgaatgcctgcaaggggacagagacctgtgcagcttggatacccaggacctacaagatcaactaaaaaggtcagaggcagagaaactcaccctggtgaccagagtacagcagttgcagggtttgcttcaaaatcaatccttacagcttcaagaacaggagaaactcttaacaaagaaagtgcagagaactgcattcagaattagacaacctcagtgacgagtatctctcctgcctgcgtaagctgcagcactgtcgagaagagctgaaccagagccagcagctgcctcccagaaggcaatgtgggcgatggctcccagtgctgatggtggtgattgctgcagcactggcagtgttcctggccaataaagacaacctgatgatctgaataatttgtgacaactgccttgggtgaaaatcagaagcaagcaactcagcgaaaaactcagaaggtttgggtacattacagcttgggttttccaactgacttaggatttctgactttttattaatttcttaacctactgtaaataaacttcacctgaccagattgttcctcagaactctcagtttattcctgaatggtgtattacattaacaagtatcacatatttaagcatactggtggtctactctcctcaaattcagttggaggcatataaacatgcagaaaagcccccagccctactttcctagcatgcagcacccacatagagcaggtatatttacaaggttaccatgcaagagtgtttggcttgtcttccatcaccctgcttttcctctatcatctccttccttctatcttttatccagtgaaaatgaaaacatctccactaagaggacttcctagtatagaaatggcaagtatgtactatctaccaatttgctactagcaccaccattacctatttacatgccctttgcatttgtggccaactgatctacagcattgtgccttagtgtattcaagacacttggaattggcagttgagatgattatttgccatccccaacctagagatgatcatttactgagtaccttctatatgggaggagagttaaagtcagagggccacagccggcagtgtgactatctcagaggagatgctgagat

SEQ ID NO: 72514 - DNA, 4233 bp, Homo sapiens
gagcagagagatgagctgtgggctggtgcttctgtggtgaggtggtggtgtttctggagagcagatcagaggcaggggaaaaccacgcagaagcaggagctgaagacctcagaccggcaccagggacagcttaatgaagacaaactgaaggggaaactgagatccttagaaaaccagctatacacctgtacccagaaatactccccttggggaatgaaaaaagtactactggagatggaagaccagaaaaacagctatgagcagaaggccaaggagtcactgcagaaagtgctggaggagaaaatgaatgcagagcagcaactacagagcacacagcgatccctggccctggcagagcagaagtgtgaagagtggaggagccagtatgaggctctgaaggaggactggaggacccttgggacccagcacagggagctggagagccaactccacgtgcttcagtccaaactgcagggagcagatagcagggacttacagatgaaccaggccctgcgatttttggaaaatgagcaccaggaactgcaggccaagattgaatgcctgcaaggggacagagacctgtgcagcttggatacccaggacctacaagatcaactaaaaaggtcagaggcagagaaactcaccctggtgaccagagtacagcagttgcagggtttgcttcaaaatcaatccttacagcttcaagaacaggagaaactcttaacaaagaaaggtcagcaaatttattaccacaaattctaagatattgctcttctcttacctgcctagaggcagcgggatggactacatgacctcctggagtcccagccagttctgggagtctgttaagtccgggatgtgtgggagctttttaaggactgatcattggctctgaggacacttcaactagttagccttctatcttgaggtatataaactgtgaaaaagggtttctattctctctgaaagcacatgtctgtgttgaacatttcaataaatttattttgaactcaggatttcatgtcaatttttacacacttgattttccaaatcacatccaactccccagccccaaaccacatagcagtccagagtcaactcactgttagccctagagagtctactgtccatgtttcctgagaattcactgtgtatacagaggggcaatagctcctcacctgtccactacacacgaccttttgttttctcttcacaatcattgggcataatataatagataaggcagaaatttttatgctcacagagtatggataagaacatgaaagtctatggtgacacaaactaacaacacagctataacaacaatccaaaacttctgactcctagtccatgctcttttcaccaagactaagactgcagggtggctaaaaaaccatctttaaccatatgaagataaattttaggatatgactgccatcttcacaactttcaaatgaggacatcagggaaaagggattgtattaaagcatttaccaaacttatttgacaaactaggaagaatgtgacatacaaccaatgaaattcaattaagaagtattcactaaaactatctagcactagataggactggggatacaaagaaaagatcccaatcttgccctcaaggagctcagattccagctgtctgtccaagcttagcaggggcctactggaagttaacctttatgtcagagaatgccatcagtctagccaaaagcacgccctcccaagttccctcccctctccccactcctagtggtttcaccctcagggcccttcctcagaggtgtgggcctcactgtcaccaagaatctggctgcttttttagatcaggctttgcccgtgtggagtccaaagtccttccctaacgaagtggagcctgagggtacagggaaggagaaagactgggatctcagagaccagctgcaaaagaagactttgcagctccaggccaaggaaaaggaggtgagagggtgacctgagatagtgagggctcatttgcgaaatagcagagaaacctgggaggcagtcaaaaagcagggatttcaaagtttaagttgtgagtggataaccacagacattcatttgcctacataaagtgtctgtgcttttgggctgacttgtcaatcttttcccttccttatttataccaactcctattcaaggttttattaaatgattaccttttagaaagtcgaccaaaactcaaacacatttaataaaaatattaacttctcaatatgtcgtcccacattgagtatcttaagtctttatatgtctcttaaagagtaaaactcttcctttgtacatactcacaaacatacacatccccagaagtattgatatgcaactagctcctgggaaagaaacttgtactaaggtcacttctaggtcgtttgttctataagaacttcatttttcggtgtctctcatttgcaaagcacttgcacgtaaagtcatataaaagaacttaaatgtataaaatgtaatactataatatgcattactgtcaatcatttaaatgaacacattccagacaatgtaagacagtcaaaagacaaactcaaatccctgagaatggctgggaagggaagatggtggtaaaaattccaaatgagtgaaacttacaaagggcagtctcccctgcctgggctctgtcctagacagaagtgacagtgatgactttggtgatgttctccccagtgcagagaactgcattcagaattagacaacctcagtgacgagtatctctcctgcctgcgtaagctgcagcactgtcgagaagagctgaaccagagccagcagctgcctcccagagtaagagggtctctccttcccataaagccctggatgatgggacgattccttctttaaccaagttttgcacataaaatatatcagcccacgccaacaactggccatcctgtcccactgtgcttggtttatactatactgacattatggcaaccattgaaaaaaacactggctcgtccatcaaagcccaactttcacagaactctcaatgccagaaggaaagacttactcttagctaaagtatgaaagggtgttcttttagccgatgataagcatggtggcaagaacagaaggacacaaaagtactggggaatacaaagaaagaatataattttgctgggttattttccacccttcattattcatatcagtatttatatatctggtccctgatggatacggctccctgggccagagaacattggttaagtggttttatcccaagacaggtgacaaaatgggagacagagtaaaaagctttttctccaccaccaacccagcgttttccactgggctagagtaggaagaagaaagatttttgcctatatcttttccaatccactcatggccactttcttctgtctccctgtccccctacagaggcaatgtgggcgatggctcccagtgctgatggtggtgattgctgcagcactggcagtgttcctggccaataaagacaacctgatgatctgaataatttgtgacaactgccttgggtgaaaatcagaagcaagcaactcagcgaaaaactcagaaggtttgggtacattacagcttgggttttccaactgacttaggatttctgactttttattaatttcttaacctactgtaaataaacttcacctgaccagattgttcctcagaactctcagtttattcctgaatggtgtattacattaacaagtatcacatatttaagcatactggtggtctactctcctcaaattcagttggaggcatataaacatgcagaaaagcccccagccctactttcctagcatgcagcacccacatagagcaggtatatttacaaggttaccatgcaagagtgtttggcttgtcttccatcaccctgcttttcctctatcatctccttccttctatcttttatccagtgaaaatgaaaacatctccactaagaggacttcctagtatagaaatggcaagtatgtactatctaccaatttgctactagcaccaccattacctatttacatgccctttgcatttgtggccaactgatctacagcattgtgccttagtgtattcaagacacttggaattggcagttgagatgattatttgccatccccaacctagagatgatcatttactgagtaccttctatatgggaggagagttaaagtcagagggccacagccggcagtgtgactatctcagaggagatgctgagat

SEQ ID NO: 72515 - DNA, 3225 bp, Homo sapiens
aggggcccacttagatgataccagagagcaagagagaggaactggggtttgcgaaccttgtggctttgtctgtttcctgtttcagcaaggctgctgtgcaaaaagaaagacggtaccaagaagggacgtgttaatggggcccagacctatggattgaaagcgtgtgctttacccatctgctgtcttgctccatctgagaccagagccaagatctgcccaggactggaatgctttcccgagtggcttgagttggagcctgggactaggagcagccttattgaggtacaattcatgtgcttgtgggtttggatggcacaatctgtgtctgggctaaggaaagcagacttggcaccaacattaaccctgacagatccaggcatctattccaggaactggaagccaagcgcaacaggtgcttggaggtcatcatgatcagcccagaccccaggccctcccctggcttggcccggtgggctgagagctatgaggccaagtgtgagcgcaggcaagagatccgtgaaagccgccgctgccgtcccaatgtgaccacttgccgccaggtggggaagacgctgaggatccaacagagagagcagctccagagagctcgactgcagcagttcttcaggaggaggaacctggagctagaggagaagggcaaagcgcagcatccccaggccagggagcaagggccctccaggcggccaggacaggtgactgtcctcaaggaacccttgtcttgtgccagaaggatttcttctcccagagagcaggtgacaggcaccagctctgaagtctttccagcccagcatcctcctccctcaggcatctgcagggatctgtctgaccacctctcctcacaggctgggggccttcctccacaggacactcccatcaagaagccacccaaacaccaccgtggtactcagacaaaggcagaaggaccaacaattaagaacgatgccagtcagcaaaccaattacggagttgcagttctggataaggaaatcatccagctttctgattacctcaaagaggccctacaaagggagctggtcctaaaacagaaaatggtgattctccaagacctactgtccactctgattcaggcctctgacagctcttggaagggacagcttaatgaagacaaactgaaggggaaactgagatccttagaaaaccagctatacacctgtacccagaaatactccccttggggaatgaaaaaagtactactggagatggaagaccagaaaaacagctatgagcagaaggccaaggagtcactgcagaaagtgctggaggagaaaatgaatgcagagcagcaactacagagcacacagcgatccctggccctggcagagcagaagtgtgaagagtggaggagccagtatgaggctctgaaggaggactggaggacccttgggacccagcacagggagctggagagccaactccacgtgcttcagtccaaactgcagggagcagatagcagggacttacagatgaaccaggccctgcgatttttggaaaatgagcaccaggaactgcaggccaagattgaatgcctgcaaggggacagagacctgtgcagcttggatacccaggacctacaagatcaactaaaaaggtcagaggcagagaaactcaccctggtgaccagagtacagcagttgcaggaggcagcgggatggactacatgacctcctggagtcccagccagttctgggagtctgttaagtccgggatgtgtgggagctttttaaggactgatcattggctctgaggacacttcaactagttagccttctatcttgaggtatataaactgtgaaaaagggtttctattctctctgaaagcacatgtctgtgttgaacatttcaataaatttattttgaactcaggatttcatgtcaatttttacacacttgattttccaaatcacatccaactccccagccccaaaccacatagcagtccagagtcaactcactgttagccctagagagtctactgtccatgtttcctgagaattcactgtgtatacagaggggcaatagctcctcacctgtccactacacacgaccttttgttttctcttcacaatcattgggcataatataatagataaggcagaaatttttatgctcacagagtatggataagaacatgaaagtctatggtgacacaaactaacaacacagctataacaacaatccaaaacttctgactcctagtccatgctcttttcaccaagactaagactgcagggtggctaaaaaaccatctttaaccatatgaagataaattttaggatatgactgccatcttcacaactttcaaatgaggacatcagggaaaagggattgtattaaagcatttaccaaacttatttgacaaactaggaagaatgtgacatacaaccaatgaaattcaattaagaagtattcactaaaactatctagcactagataggactggggatacaaagaaaagatcccaatcttgccctcaaggagctcagattccagctgtctgtccaagcttagcaggggcctactggaagttaacctttatgtcagagaatgccatcagtctagccaaaagcacgccctcccaagttccctcccctctccccactcctagtggtttcaccctcagggcccttcctcagaggtgtgggcctcactgtcaccaagaatctggctgcttttttagatcaggctttgcccgtgtggagtccaaagtccttccctaacgaagtggagcctgagggtacagggaaggagaaagactgggatctcagagaccagctgcaaaagaagactttgcagctccaggccaaggaaaaggagtgcagagaactgcattcagaattagacaacctcagtgacgagtatctctcctgcctgcgtaagctgcagcactgtcgagaagagctgaaccagagccagcagctgcctcccagaaggcaatgtgggcgatggctcccagtgctgatggtggtgattgctgcagcactggcagtgttcctggccaataaagacaacctgatgatctgaataatttgtgacaactgccttgggtgaaaatcagaagcaagcaactcagcgaaaaactcagaaggtttgggtacattacagcttgggttttccaactgacttaggatttctgactttttattaatttcttaacctactgtaaataaacttcacctgaccaga

SEQ ID NO: 72516 - DNA, 2186 bp, Homo sapiens
aggggcccacttagatgataccagagagcaagagagaggaactggggtttgcgaaccttgtggctttgtctgtttcctgtttcagcaaggctgctgtgcaaaaagaaagacggtaccaagaagggacgtgttaatggggcccagacctatggattgaaagcgtgtgctttacccatctgctgtcttgctccatctgagaccagagccaagatctgcccaggactggaatgctttcccgagtggcttgagttggagcctgggactaggagcagccttattgaggtacaattcatgtgcttgtgggtttggatggcacaatctgtgtctgggctaaggaaagcagacttggcaccaacattaaccctgacagatccaggcatctattccaggaactggaagccaagcgcaacaggtgcttggaggtcatcatgatcagcccagaccccaggccctcccctggcttggcccggtgggctgagagctatgaggccaagtgtgagcgcaggcaagagatccgtgaaagccgccgctgccgtcccaatgtgaccacttgccgccaggtggggaagacgctgaggatccaacagagagagcagctccagagagctcgactgcagcagttcttcaggaggaggaacctggagctagaggagaagggcaaagcgcagcatccccaggccagggagcaagggccctccaggcggccaggacaggtgactgtcctcaaggaacccttgtcttgtgccagaaggatttcttctcccagagagcaggtgacaggcaccagctctgaagtctttccagcccagcatcctcctccctcaggcatctgcagggatctgtctgaccacctctcctcacaggctgggggccttcctccacaggacactcccatcaagaagccacccaaacaccaccgtggtactcagacaaaggcagaaggaccaacaattaagaacgatgccagtcagcaaaccaattacggagttgcagttctggataaggaaatcatccagctttctgattacctcaaagaggccctacaaagggagctggtcctaaaacagaaaatggtgattctccaagacctactgtccactctgattcaggcctctgacagctcttggaagggacagcttaatgaagacaaactgaaggggaaactgagatccttagaaaaccagctatacacctgtacccagaaatactccccttggggaatgaaaaaagtactactggagatggaagaccagaaaaacagctatgagcagaaggccaaggagtcactgcagaaagtgctggaggagaaaatgaatgcagagcagcaactacagagcacacagcgatccctggccctggcagagcagaagtgtgaagagtggaggagccagtatgaggctctgaaggaggactggaggacccttgggacccagcacagggagctggagagccaactccacgtgcttcagtccaaactgcagggagcagatagcagggacttacagatgaaccaggccctgcgatttttggaaaatgagcaccaggaactgcaggccaagattgaatgcctgcaaggggacagagacctgtgcagcttggatacccaggacctacaagatcaactaaaaaggtcagaggcagagaaactcaccctggtgaccagagtacagcagttgcaggatcaggctttgcccgtgtggagtccaaagtccttccctaacgaagtggagcctgagggtacagggaaggagaaagactgggatctcagagaccagctgcaaaagaagactttgcagctccaggccaaggaaaaggagtgcagagaactgcattcagaattagacaacctcagtgacgagtatctctcctgcctgcgtaagctgcagcactgtcgagaagagctgaaccagagccagcagctgcctcccagaaggcaatgtgggcgatggctcccagtgctgatggtggtgattgctgcagcactggcagtgttcctggccaataaagacaacctgatgatctgaataatttgtgacaactgccttgggtgaaaatcagaagcaagcaactcagcgaaaaactcagaaggtttgggtacattacagcttgggttttccaactgacttaggatttctgactttttattaatttcttaacctactgtaaataaacttcacctgaccaga

SEQ ID NO: 72517 - DNA, 2339 bp, Homo sapiens
aggggcccacttagatgataccagagagcaagagagaggaactggggtttgcgaaccttgtggctttgtctgtttcctgtttcagcaaggctgctgtgcaaaaagaaagacggtaccaagaagggacgtgttaatggggcccagacctatggattgaaagcgtgtgctttacccatctgctgtcttgctccatctgagaccagagccaagatctgcccaggactggaatgctttcccgagtggcttgagttggagcctgggactaggagcagccttattgaggtacaattcatgtgcttgtgggtttggatggcacaatctgtgtctgggctaaggaaagcagacttggcaccaacattaaccctgacagatccaggcatctattccaggaactggaagccaagcgcaacaggtgcttggaggtcatcatgatcagcccagaccccaggccctcccctggcttggcccggtgggctgagagctatgaggccaagtgtgagcgcaggcaagagatccgtgaaagccgccgctgccgtcccaatgtgaccacttgccgccaggtggggaagacgctgaggatccaacagagagagcagctccagagagctcgactgcagcagttcttcaggaggaggaacctggagctagaggagaagggcaaagcgcagcatccccaggccagggagcaagggccctccaggcggccaggacaggtgactgtcctcaaggaacccttgtcttgtgccagaaggatttcttctcccagagagcaggtgacaggcaccagctctgaagtctttccagcccagcatcctcctccctcaggcatctgcagggatctgtctgaccacctctcctcacaggctgggggccttcctccacaggacactcccatcaagaagccacccaaacaccaccgtggtactcagacaaaggcagaaggaccaacaattaagaacgatgccagtcagcaaaccaattacggagttgcagttctggataaggaaatcatccagctttctgattacctcaaagaggccctacaaagggagctggtcctaaaacagaaaatggtgattctccaagacctactgtccactctgattcaggcctctgacagctcttggaagggacagcttaatgaagacaaactgaaggggaaactgagatccttagaaaaccagctatacacctgtacccagaaatactccccttggggaatgaaaaaagtactactggagatggaagaccagaaaaacagctatgagcagaaggccaaggagtcactgcagaaagtgctggaggagaaaatgaatgcagagcagcaactacagagcacacagcgatccctggccctggcagagcagaagtgtgaagagtggaggagccagtatgaggctctgaaggaggactggaggacccttgggacccagcacagggagctggagagccaactccacgtgcttcagtccaaactgcagggagcagatagcagggacttacagatgaaccaggccctgcgatttttggaaaatgagcaccaggaactgcaggccaagattgaatgcctgcaaggggacagagacctgtgcagcttggatacccaggacctacaagatcaactaaaaaggtcagaggcagagaaactcaccctggtgaccagagtacagcagttgcaggaggcagcgggatggactacatgacctcctggagtcccagccagttctgggagtctgttaagtccgggatgtgtgggagctttttaaggactgatcattggctctgaggacacttcaactagttagccttctatcttgaggtatataaactgtgaaaaagggtttctattctctctgaaagcacatgtctgtgttgaacatttcaataaatttattttgaactcaaaaaaaaaaaaaaaaaaataacaacaagaaataaaatgaaaaaaaataaaaaaaaaatgacaagatgaagcctcaatattgctaagttcaaagcaatgctaacattccagttttttaagaaggttattaatggcctttggacattttggactctattatgaaaaattagaatcccctttcactgatttctccatatcattttttttaaaatccttatctatcctcgggctttacaaaaatttataatttctctatttcccaaagggtgacatttcaaaacctcaccccttttcaatattctgtcgattaaaacaatttaggtacccctttttaacaagtcgttcaaacaatactcttgtcttccttgggctaatctttaagatctccctttgctcttcttttcgagataatgttcatcctctctttgtccgtcct

SEQ ID NO: 72518 - DNA, 1957 bp, Homo sapiens
aggggcccacttagatgataccagagagcaagagagaggaactggggtttgcgaaccttgtggctttgtctgtttcctgtttcagcaaggctgctgtgcaaaaagaaagacggtaccaagaagggacgtgttaatggggcccagacctatggattgaaagcgtgtgctttacccatctgctgtcttgctccatctgagaccagagccaagatctgcccaggactggaatgctttcccgagtggcttgagttggagcctgggactaggagcagccttattgaggtacaattcatgtgcttgtgggtttggatggcacaatctgtgtctgggctaaggaaagcagacttggcaccaacattaaccctgacagatccaggcatctattccaggaactggaagccaagcgcaacaggtgcttggaggtcatcatgatcagcccagaccccaggccctcccctggcttggcccggtgggctgagagctatgaggccaagtgtgagcgcaggcaagagatccgtgaaagccgccgctgccgtcccaatgtgaccacttgccgccaggtggggaagacgctgaggatccaacagagagagcagctccagagagctcgactgcagcagttcttcaggaggaggaacctggagctagaggagaagggcaaagcgcagcatccccaggccagggagcaagggccctccaggcggccaggacaggtgactgtcctcaaggaacccttgtcttgtgccagaaggatttcttctcccagagagcaggtgacaggcaccagctctgaagtctttccagcccagcatcctcctccctcaggcatctgcagggatctgtctgaccacctctcctcacaggctgggggccttcctccacaggacactcccatcaagaagccacccaaacaccaccgtggtactcagacaaaggcagaaggaccaacaattaagaacgatgccagtcagcaaaccaattacggagttgcagttctggataaggaaatcatccagctttctgattacctcaaagaggccctacaaagggagctggtcctaaaacagaaaatggtgattctccaagacctactgtccactctgattcaggcctctgacagctcttggaagggacagcttaatgaagacaaactgaaggggaaactgagatccttagaaaaccagctatacacctgtacccagaaatactccccttggggaatgaaaaaagtactactggagatggaagaccagaaaaacagctatgagcagaaggccaaggagtcactgcagaaagtgctggaggagaaaatgaatgcagagcagcaactacagagcacacagcgatccctggccctggcagagcagaagtgtgaagagtggaggagccagtatgaggctctgaaggaggactggaggacccttgggacccagcacagggagctggagagccaactccacgtgcttcagtccaaactgcagggagcagatagcagggacttacagatgaaccaggccctgcgatttttggaaaatgagcaccaggaactgcaggccaagattgaatgcctgcaaggggacagagacctgtgcagcttggatacccaggacctacaaggtttgcttcaaaatcaatccttacagcttcaagaacaggagaaactcttaacaaagaaaggtcagcaaatttattaccacaaattctaagatattgctcttctcttacctgcctagaggcagcgggatggactacatgacctcctggagtcccagccagttctgggagtctgttaagtccgggatgtgtgggagctttttaaggactgatcattggctctgaggacacttcaactagttagccttctatcttgaggtatataaactgtgaaaaagggtttctattctctctgaaagcacatgtctgtgttgaacatttcaataaatttattttgaactca

SEQ ID NO: 72519 - DNA, 353 bp, Homo sapiens
tccagagagctcgactgcagcagttcttcaggaggaggaacctggagctagaggagaagggcaaagcgcagcatccccaggccagggagcaagggccctccaggcggccaggacaggtgactgtcctcaaggaacccttgtcttgtgccagaaggatttcttctcccagagagcaggtgggccgtgtcaagggacatactgctgtgtgctctgggaccctctctggacaaggagggtgggtgggctcaaggtcactaaaaagtgacctaaatcaagtccttcttcctcagtcatatagtaaagttgccaagagctacttatagtaaagttgccaacagctacttattcagaga

SEQ ID NO: 72520 - DNA, 418 bp, Homo sapiens
ttgcatcaaatttacagaaatactccccttggggaatgaaaaaagtactactggagatggaagaccagaattagacaacctcagtgacgagtatctctcctgcctgcgtaagctgcagcactgtcgagaagagctgaaccagagccagcagctgcctcccagaaggcaatgtgggcgatggctcccagtgctgatggtggtgattgctgcagcactggcagtgttcctggccaataaagacaacctgatgatctgaataatttgtgacaactgccttgggtgaaaatcagaagcaagcaactcagcgaaaaactcagaaggtttgggtacattacagcttgggttttccaactgacttaggatttctgactttttattaatttcttaacctactgtaaataaacttcacctgaccaga

SEQ ID NO: 72521 - DNA, 5240 bp, Homo sapiens
aggggcccacttagatgataccagagagcaagagagaggaactggggtttgcgaaccttgtggctttgtctgtttcctgtttcagcaaggctgctgtgcaaaaagaaagacggtaccaagaagggacgtgttaatggggcccagacctatggattgaaagcgtgtgctttacccatctgctgtcttgctccatctgagaccagagccaagatctgcccaggactggaatgctttcccgagtggcttgagttggagcctgggactaggagcagccttattgaggtacaattcatgtgcttgtgggtttggatggcacaatctgtgtctgggctaaggaaagcagacttggcaccaacattaaccctgacagatccaggcatctattccaggaactggaagccaagcgcaacaggtgcttggaggtcatcatgatcagcccagaccccaggccctcccctggcttggcccggtgggctgagagctatgaggccaagtgtgagcgcaggcaagagatccgtgaaagccgccgctgccgtcccaatgtgaccacttgccgccaggtggggaagacgctgaggatccaacagagagagcagctccagagagctcgactgcagcagttcttcaggaggaggaacctggagctagaggagaagggcaaagcgcagcatccccaggccagggagcaagggccctccaggcggccaggacaggtgactgtcctcaaggaacccttgtcttgtgccagaaggatttcttctcccagagagcaggtgacaggcaccagctctgaagtctttccagcccagcatcctcctccctcaggcatctgcagggatctgtctgaccacctctcctcacaggctgggggccttcctccacaggacactcccatcaagaagccacccaaacaccaccgtggtactcagacaaaggcagaaggaccaacaattaagaacgatgccagtcagcaaaccaattacggagttgcagttctggataaggaaatcatccagctttctgattacctcaaagaggccctacaaagggagctggtcctaaaacagaaaatggtgattctccaagacctactgtccactctgattcaggcctctgacagctcttggaagggacagcttaatgaagacaaactgaaggggaaactgagatccttagaaaaccagctatacacctgtacccagaaatactccccttggggaatgaaaaaagtactactggagatggaagaccagaaaaacagctatgagcagaaggccaaggagtcactgcagaaagtgctggaggagaaaatgaatgcagagcagcaactacagagcacacagcgatccctggccctggcagagcagaagtgtgaagagtggaggagccagtatgaggctctgaaggaggactggaggacccttgggacccagcacagggagctggagagccaactccacgtgcttcagtccaaactgcagggagcagatagcagggacttacagatgaaccaggccctgcgatttttggaaaatgagcaccaggaactgcaggccaagattgaatgcctgcaaggggacagagacctgtgcagcttggatacccaggacctacaagatcaactaaaaaggtcagaggcagagaaactcaccctggtgaccagagtacagcagttgcagggtttgcttcaaaatcaatccttacagcttcaagaacaggagaaactcttaacaaagaaaggtcagcaaatttattaccacaaattctaagatattgctcttctcttacctgcctagaggcagcgggatggactacatgacctcctggagtcccagccagttctgggagtctgttaagtccgggatgtgtgggagctttttaaggactgatcattggctctgaggacacttcaactagttagccttctatcttgaggtatataaactgtgaaaaagggtttctattctctctgaaagcacatgtctgtgttgaacatttcaataaatttattttgaactcaggatttcatgtcaatttttacacacttgattttccaaatcacatccaactccccagccccaaaccacatagcagtccagagtcaactcactgttagccctagagagtctactgtccatgtttcctgagaattcactgtgtatacagaggggcaatagctcctcacctgtccactacacacgaccttttgttttctcttcacaatcattgggcataatataatagataaggcagaaatttttatgctcacagagtatggataagaacatgaaagtctatggtgacacaaactaacaacacagctataacaacaatccaaaacttctgactcctagtccatgctcttttcaccaagactaagactgcagggtggctaaaaaaccatctttaaccatatgaagataaattttaggatatgactgccatcttcacaactttcaaatgaggacatcagggaaaagggattgtattaaagcatttaccaaacttatttgacaaactaggaagaatgtgacatacaaccaatgaaattcaattaagaagtattcactaaaactatctagcactagataggactggggatacaaagaaaagatcccaatcttgccctcaaggagctcagattccagctgtctgtccaagcttagcaggggcctactggaagttaacctttatgtcagagaatgccatcagtctagccaaaagcacgccctcccaagttccctcccctctccccactcctagtggtttcaccctcagggcccttcctcagaggtgtgggcctcactgtcaccaagaatctggctgcttttttagatcaggctttgcccgtgtggagtccaaagtccttccctaacgaagtggagcctgagggtacagggaaggagaaagactgggatctcagagaccagctgcaaaagaagactttgcagctccaggccaaggaaaaggaggtgagagggtgacctgagatagtgagggctcatttgcgaaatagcagagaaacctgggaggcagtcaaaaagcagggatttcaaagtttaagttgtgagtggataaccacagacattcatttgcctacataaagtgtctgtgcttttgggctgacttgtcaatcttttcccttccttatttataccaactcctattcaaggttttattaaatgattaccttttagaaagtcgaccaaaactcaaacacatttaataaaaatattaacttctcaatatgtcgtcccacattgagtatcttaagtctttatatgtctcttaaagagtaaaactcttcctttgtacatactcacaaacatacacatccccagaagtattgatatgcaactagctcctgggaaagaaacttgtactaaggtcacttctaggtcgtttgttctataagaacttcatttttcggtgtctctcatttgcaaagcacttgcacgtaaagtcatataaaagaacttaaatgtataaaatgtaatactataatatgcattactgtcaatcatttaaatgaacacattccagacaatgtaagacagtcaaaagacaaactcaaatccctgagaatggctgggaagggaagatggtggtaaaaattccaaatgagtgaaacttacaaagggcagtctcccctgcctgggctctgtcctagacagaagtgacagtgatgactttggtgatgttctccccagtgcagagaactgcattcagaattagacaacctcagtgacgagtatctctcctgcctgcgtaagctgcagcactgtcgagaagagctgaaccagagccagcagctgcctcccagagtaagagggtctctccttcccataaagccctggatgatgggacgattccttctttaaccaagttttgcacataaaatatatcagcccacgccaacaactggccatcctgtcccactgtgcttggtttatactatactgacattatggcaaccattgaaaaaaacactggctcgtccatcaaagcccaactttcacagaactctcaatgccagaaggaaagacttactcttagctaaagtatgaaagggtgttcttttagccgatgataagcatggtggcaagaacagaaggacacaaaagtactggggaatacaaagaaagaatataattttgctgggttattttccacccttcattattcatatcagtatttatatatctggtccctgatggatacggctccctgggccagagaacattggttaagtggttttatcccaagacaggtgacaaaatgggagacagagtaaaaagctttttctccaccaccaacccagcgttttccactgggctagagtaggaagaagaaagatttttgcctatatcttttccaatccactcatggccactttcttctgtctccctgtccccctacagaggcaatgtgggcgatggctcccagtgctgatggtggtgattgctgcagcactggcagtgttcctggccaataaagacaacctgatgatctgaataatttgtgacaactgccttgggtgaaaatcagaagcaagcaactcagcgaaaaactcagaaggtttgggtacattacagcttgggttttccaactgacttaggatttctgactttttattaatttcttaacctactgtaaataaacttcacctgaccagattgttcctcagaactctcagtttattcctgaatggtgtattacattaacaagtatcacatatttaagcatactggtggtctactctcctcaaattcagttggaggcatataaacatgcagaaaagcccccagccctactttcctagcatgcagcacccacatagagcaggtatatttacaaggttaccatgcaagagtgtttggcttgtcttccatcaccctgcttttcctctatcatctccttccttctatcttttatccagtgaaaatgaaaacatctccactaagaggacttcctagtatagaaatggcaagtatgtactatctaccaatttgctactagcaccaccattacctatttacatgccctttgcatttgtggccaactgatctacagcattgtgccttagtgtattcaagacacttggaattggcagttgagatgattatttgccatccccaacctagagatgatcatttactgagtaccttctatatgggaggagagttaaagtcagagggccacagccggcagtgtgactatctcagaggagatgctgagat

SEQ ID NO: 72522 - DNA, 4077 bp, Homo sapiens
ctggattagggactccaaaggcagctgacagcatctggctttcagttcctcagtcaccactactttgtaccaaattcactgttttggctctgaaatctaattttgagtttagcaaggatgtctgcattgctcatgcaaatgaactaagcgttcattggaatgacaccatcaccacccaaatgaaaagaactggctggaatattcatcagcctactaatgtcatctcccaacccactctccaaactccatcccaaaaaagcatccagttcagaattgcccactgttggcaaagaaagaatgtcactaatttatttacagggagcagatagcagggacttacagatgaaccaggccctgcgatttttggaaaatgagcaccaggaactgcaggccaagattgaatgcctgcaaggggacagagacctgtgcagcttggatacccaggacctacaagatcaactaaaaaggtcagaggcagagaaactcaccctggtgaccagagtacagcagttgcagggtttgcttcaaaatcaatccttacagcttcaagaacaggagaaactcttaacaaagaaaggtcagcaaatttattaccacaaattctaagatattgctcttctcttacctgcctagaggcagcgggatggactacatgacctcctggagtcccagccagttctgggagtctgttaagtccgggatgtgtgggagctttttaaggactgatcattggctctgaggacacttcaactagttagccttctatcttgaggtatataaactgtgaaaaagggtttctattctctctgaaagcacatgtctgtgttgaacatttcaataaatttattttgaactcaggatttcatgtcaatttttacacacttgattttccaaatcacatccaactccccagccccaaaccacatagcagtccagagtcaactcactgttagccctagagagtctactgtccatgtttcctgagaattcactgtgtatacagaggggcaatagctcctcacctgtccactacacacgaccttttgttttctcttcacaatcattgggcataatataatagataaggcagaaatttttatgctcacagagtatggataagaacatgaaagtctatggtgacacaaactaacaacacagctataacaacaatccaaaacttctgactcctagtccatgctcttttcaccaagactaagactgcagggtggctaaaaaaccatctttaaccatatgaagataaattttaggatatgactgccatcttcacaactttcaaatgaggacatcagggaaaagggattgtattaaagcatttaccaaacttatttgacaaactaggaagaatgtgacatacaaccaatgaaattcaattaagaagtattcactaaaactatctagcactagataggactggggatacaaagaaaagatcccaatcttgccctcaaggagctcagattccagctgtctgtccaagcttagcaggggcctactggaagttaacctttatgtcagagaatgccatcagtctagccaaaagcacgccctcccaagttccctcccctctccccactcctagtggtttcaccctcagggcccttcctcagaggtgtgggcctcactgtcaccaagaatctggctgcttttttagatcaggctttgcccgtgtggagtccaaagtccttccctaacgaagtggagcctgagggtacagggaaggagaaagactgggatctcagagaccagctgcaaaagaagactttgcagctccaggccaaggaaaaggaggtgagagggtgacctgagatagtgagggctcatttgcgaaatagcagagaaacctgggaggcagtcaaaaagcagggatttcaaagtttaagttgtgagtggataaccacagacattcatttgcctacataaagtgtctgtgcttttgggctgacttgtcaatcttttcccttccttatttataccaactcctattcaaggttttattaaatgattaccttttagaaagtcgaccaaaactcaaacacatttaataaaaatattaacttctcaatatgtcgtcccacattgagtatcttaagtctttatatgtctcttaaagagtaaaactcttcctttgtacatactcacaaacatacacatccccagaagtattgatatgcaactagctcctgggaaagaaacttgtactaaggtcacttctaggtcgtttgttctataagaacttcatttttcggtgtctctcatttgcaaagcacttgcacgtaaagtcatataaaagaacttaaatgtataaaatgtaatactataatatgcattactgtcaatcatttaaatgaacacattccagacaatgtaagacagtcaaaagacaaactcaaatccctgagaatggctgggaagggaagatggtggtaaaaattccaaatgagtgaaacttacaaagggcagtctcccctgcctgggctctgtcctagacagaagtgacagtgatgactttggtgatgttctccccagtgcagagaactgcattcagaattagacaacctcagtgacgagtatctctcctgcctgcgtaagctgcagcactgtcgagaagagctgaaccagagccagcagctgcctcccagagtaagagggtctctccttcccataaagccctggatgatgggacgattccttctttaaccaagttttgcacataaaatatatcagcccacgccaacaactggccatcctgtcccactgtgcttggtttatactatactgacattatggcaaccattgaaaaaaacactggctcgtccatcaaagcccaactttcacagaactctcaatgccagaaggaaagacttactcttagctaaagtatgaaagggtgttcttttagccgatgataagcatggtggcaagaacagaaggacacaaaagtactggggaatacaaagaaagaatataattttgctgggttattttccacccttcattattcatatcagtatttatatatctggtccctgatggatacggctccctgggccagagaacattggttaagtggttttatcccaagacaggtgacaaaatgggagacagagtaaaaagctttttctccaccaccaacccagcgttttccactgggctagagtaggaagaagaaagatttttgcctatatcttttccaatccactcatggccactttcttctgtctccctgtccccctacagaggcaatgtgggcgatggctcccagtgctgatggtggtgattgctgcagcactggcagtgttcctggccaataaagacaacctgatgatctgaataatttgtgacaactgccttgggtgaaaatcagaagcaagcaactcagcgaaaaactcagaaggtttgggtacattacagcttgggttttccaactgacttaggatttctgactttttattaatttcttaacctactgtaaataaacttcacctgaccagattgttcctcagaactctcagtttattcctgaatggtgtattacattaacaagtatcacatatttaagcatactggtggtctactctcctcaaattcagttggaggcatataaacatgcagaaaagcccccagccctactttcctagcatgcagcacccacatagagcaggtatatttacaaggttaccatgcaagagtgtttggcttgtcttccatcaccctgcttttcctctatcatctccttccttctatcttttatccagtgaaaatgaaaacatctccactaagaggacttcctagtatagaaatggcaagtatgtactatctaccaatttgctactagcaccaccattacctatttacatgccctttgcatttgtggccaactgatctacagcattgtgccttagtgtattcaagacacttggaattggcagttgagatgattatttgccatccccaacctagagatgatcatttactgagtaccttctatatgggaggagagttaaagtcagagggccacagccggcagtgtgactatctcagaggagatgctgagat

SEQ ID NO: 72523 - DNA, 2246 bp, Homo sapiens
aggggcccacttagatgataccagagagcaagagagaggaactggggtttgcgaaccttgtggctttgtctgtttcctgtttcagcaaggctgctgtgcaaaaagaaagacggtaccaagaagggacgtgttaatggggcccagacctatggattgaaagcgtgtgctttacccatctgctgtcttgctccatctgagaccagagccaagatctgcccaggactggaatgctttcccgagtggcttgagttggagcctgggactaggagcagccttattgaggtacaattcatgtgcttgtgggtttggatggcacaatctgtgtctgggctaaggaaagcagacttggcaccaacattaaccctgacagatccaggcatctattccaggaactggaagccaagcgcaacaggtgcttggaggtcatcatgatcagcccagaccccaggccctcccctggcttggcccggtgggctgagagctatgaggccaagtgtgagcgcaggcaagagatccgtgaaagccgccgctgccgtcccaatgtgaccacttgccgccaggtggggaagacgctgaggatccaacagagagagcagctccagagagctcgactgcagcagttcttcaggaggaggaacctggagctagaggagaagggcaaagcgcagcatccccaggccagggagcaagggccctccaggcggccaggacaggtgactgtcctcaaggaacccttgtcttgtgccagaaggatttcttctcccagagagcaggtgacaggcaccagctctgaagtctttccagcccagcatcctcctccctcaggcatctgcagggatctgtctgaccacctctcctcacaggctgggggccttcctccacaggacactcccatcaagaagccacccaaacaccaccgtggtactcagacaaaggcagaaggaccaacaattaagaacgatgccagtcagcaaaccaattacggagttgcagttctggataaggaaatcatccagctttctgattacctcaaagaggccctacaaagggagctggtcctaaaacagaaaatggtgattctccaagacctactgtccactctgattcaggcctctgacagctcttggaagggacagcttaatgaagacaaactgaaggggaaactgagatccttagaaaaccagctatacacctgtacccagaaatactccccttggggaatgaaaaaagtactactggagatggaagaccagaaaaacagctatgagcagaaggccaaggagtcactgcagaaagtgctggaggagaaaatgaatgcagagcagcaactacagagcacacagcgatccctggccctggcagagcagaagtgtgaagagtggaggagccagtatgaggctctgaaggaggactggaggacccttgggacccagcacagggagctggagagccaactccacgtgcttcagtccaaactgcagggagcagatagcagggacttacagatgaaccaggccctgcgatttttggaaaatgagcaccaggaactgcaggccaagattgaatgcctgcaaggggacagagacctgtgcagcttggatacccaggacctacaagatcaactaaaaaggtcagaggcagagaaactcaccctggtgaccagagtacagcagttgcagggtttgcttcaaaatcaatccttacagcttcaagaacaggagaaactcttaacaaagaaagatcaggctttgcccgtgtggagtccaaagtccttccctaacgaagtggagcctgagggtacagggaaggagaaagactgggatctcagagaccagctgcaaaagaagactttgcagctccaggccaaggaaaaggagtgcagagaactgcattcagaattagacaacctcagtgacgagtatctctcctgcctgcgtaagctgcagcactgtcgagaagagctgaaccagagccagcagctgcctcccagaaggcaatgtgggcgatggctcccagtgctgatggtggtgattgctgcagcactggcagtgttcctggccaataaagacaacctgatgatctgaataatttgtgacaactgccttgggtgaaaatcagaagcaagcaactcagcgaaaaactcagaaggtttgggtacattacagcttgggttttccaactgacttaggatttctgactttttattaatttcttaacctactgtaaataaacttcacctgaccaga

SEQ ID NO: 72524 - DNA, 2109 bp, Homo sapiens
aggggcccacttagatgataccagagagcaagagagaggaactggggtttgcgaaccttgtggctttgtctgtttcctgtttcagcaaggctgctgtgcaaaaagaaagacggtaccaagaagggacgtgttaatggggcccagacctatggattgaaagcgtgtgctttacccatctgctgtcttgctccatctgagaccagagccaagatctgcccaggactggaatgctttcccgagtggcttgagttggagcctgggactaggagcagccttattgaggtacaattcatgtgcttgtgggtttggatggcacaatctgtgtctgggctaaggaaagcagacttggcaccaacattaaccctgacagatccaggcatctattccaggaactggaagccaagcgcaacaggtgcttggaggtcatcatgatcagcccagaccccaggccctcccctggcttggcccggtgggctgagagctatgaggccaagtgtgagcgcaggcaagagatccgtgaaagccgccgctgccgtcccaatgtgaccacttgccgccaggtggggaagacgctgaggatccaacagagagagcagctccagagagctcgactgcagcagttcttcaggaggaggaacctggagctagaggagaagggcaaagcgcagcatccccaggccagggagcaagggccctccaggcggccaggacaggtgactgtcctcaaggaacccttgtcttgtgccagaaggatttcttctcccagagagcaggtgacaggcaccagctctgaagtctttccagcccagcatcctcctccctcaggcatctgcagggatctgtctgaccacctctcctcacaggctgggggccttcctccacaggacactcccatcaagaagccacccaaacaccaccgtggtactcagacaaaggcagaaggaccaacaattaagaacgatgccagtcagcaaaccaattacggagttgcagttctggataaggaaatcatccagctttctgattacctcaaagaggccctacaaagggagctggtcctaaaacagaaaatggtgattctccaagacctactgtccactctgattcaggcctctgacagctcttggaagggacagcttaatgaagacaaactgaaggggaaactgagatccttagaaaaccagctatacacctgtacccagaaatactccccttggggaatgaaaaaagtactactggagatggaagaccagaaaaacagctatgagcagaaggccaaggagtcactgcagaaagtgctggaggagaaaatgaatgcagagcagcaactacagagcacacagcgatccctggccctggcagagcagaagtgtgaagagtggaggagccagtatgaggctctgaaggaggactggaggacccttgggacccagcacagggagctggagagccaactccacgtgcttcagtccaaactgcagggagcagatagcagggacttacagatgaaccaggccctgcgatttttggaaaatgagcaccaggaactgcaggccaagattgaatgcctgcaaggggacagagacctgtgcagcttggatacccaggacctacaagatcaactaaaaaggtcagaggcagagaaactcaccctggtgaccagagtacagcagttgcagggtttgcttcaaaatcaatccttacagcttcaagaacaggagaaactcttaacaaagaaagtgcagagaactgcattcagaattagacaacctcagtgacgagtatctctcctgcctgcgtaagctgcagcactgtcgagaagagctgaaccagagccagcagctgcctcccagaaggcaatgtgggcgatggctcccagtgctgatggtggtgattgctgcagcactggcagtgttcctggccaataaagacaacctgatgatctgaataatttgtgacaactgccttgggtgaaaatcagaagcaagcaactcagcgaaaaactcagaaggtttgggtacattacagcttgggttttccaactgacttaggatttctgactttttattaatttcttaacctactgtaaataaacttcacctgaccaga

SEQ ID NO: 72525 - DNA, 2457 bp, Homo sapiens
aggaatgttggtgctcccagcacctagcaccgggagactggagaggtttccaggagagtgacccgagtaggtcccctcctaattctggagccgtccctcgggctgcgcagtggagcgccgaggtggcgggaggctgcggggagcctgcgcggccaagcaccatctgcagtcaggagctcccgggcagcttgcagggcgcagtttttgaaagcgggtgctgcgtgcggaccgcgggcctgcagggatcttttgccagaaatgagggcatactggcctgacgtaattcactcgtttcccaatcgcagccgcttctggaagcatgagtgggaaaagcatgggacctgcgccgcccaggtggatgcgctcaactcccagaagaagtactttggcagaagcctggaactctacagggagctggacctcaacaggtgggtgcgcccttcccccggctgcacttcccagtggggatctctgctgtcgcccaagcctgacagctggatccaggggagtgggtgtagacctcactgccctccagcagcttctgcatgtgcactattcggctactgggatcattcctgaggaatgttctgagcctaccaagcctttccagatcattctacatcacgatcacacagagtgggtgcagagtattgggatgcccatctgggcaccatctcatcatcagagtcggccatagggaaaacgaggactccaaccagcatgtgccgaactctgtggccaagacagtctgacaataagttattgcccacagaggatgtctaagtctttgtgtccactctgtgatcgtgatctagaattttctaccaaggcttgatggggaactaggatattcttctgcaatgattcagaattttacagtgtacctttatactttaataagtgaattctatatatggtagtttggtaggattctgtgtagaagtgctttaggaggtgattgaaagctgtagggacttaccatacggttatgtattgcttggtgatggggtataaaattgtcatgtgaacatcttggagtgcacttacttagctgatacagcccacgacacacatatgctttgtggtatagcctgttgcttcgaggctacaaacctgtacagtgtgtgactctactgagtactgtaggcacctgtatgtaacacaatggtaaggatttgtgtatctaaacatatctcaacatagaaaaggcacagtagaaatgtggtcatatgggaccgccctcgtacatgcaggccttcactgactgaatgtcgtaatgtggcgcatgactgtgtttaaagatttgtccaaatgcagtttaccaggataagcctggaatccgatttcaattgctgtcttttaaagcaggtgtggcaaacgggtggtgatgtgtgtgccagctccactcggtggtggccccagcgctcccatgctccgaaggagtcaggaactggaaagggtacctgcctggagcagtttgtgtgtgtgctaaggggtggggaaggcggggactgggaaccatgtatttgcagtccatgttgacacatttgttgcataaagtcatagaaaacactttcctttaagagtgtcttaatttttaccatgaaatatgatacctgaaaagaacaagaaagcaaagtggaccttcattatacagctaacttttttaaatttaaattttagtgtgcttctaaaattggggataaaaccatccatcaattactaccaagtaagtcttgcttttgcttcttttctcgtgtgtctctcccggggacctccagtagggccgtttcagcctctgagtcaatgggctgtaaattgccccagtgcaaacccccttcctacttaaatgttatcatgtgaacagattttatttgcattttattttcctgcgcatgttgagtaggagctgaaggctgcttagaccagtgatttggaagcacagatttcatggctccctttgtgagaagtgtgtgctccagggtccggcagagcaggtggaatctgcagtttgaagagtcacattcacttttataacgtagtcttatatttgtttgtggtttgttttcatgataaaattgtgatttgttttatgataaaagaaactatagatatttaagcatgacaagatgttattagctggtaagcatatacaaaaagttgctttttgccaggtgtggtgactcacgcctataaatcccaggaccttgggaggctcaggctggaggattgcttgtggctagaatttcgagaccagcctgggcagcagagtgagacctctagaaagaagtaaaagtagctgagcatgatagtatgtgtctgtggtctcagctattcaggaagctaaggtcagaggattgcctgcgcccaggaatttgaggctgcagtgagccatggtcgccccactgcactccagtctgggcgacagccagatcacgtctctttaaaaaaaaaaga

SEQ ID NO: 72526 - DNA, 384 bp, Homo sapiens
agtattcttgttttccgtttcgcatgtttttgcgtgctcatcccccctcctcttcggttagaggatgaggaagtacagacaattggtcagatagaactgtgcctcactaagcaagaccagcagctgcaaaactgcaccgagccgggggagcagccgtcccccaagcaggaagtctggctggcaaatggggccgccgagagccggggtctgagagtctgtgaagatggcccagtcttctatcccccacctaaaaagaccaagcattgatgcccaagttttggaaatattctgttttaaaaagcaagagaaattcacaaactgcagctttctaatatacatcacggagcacagagaagttagtccgtttggcctcgttggccttaa

SEQ ID NO: 72527 - DNA, 598 bp, Homo sapiens
tgattcctgataaaggatagtgcattaataagtcgtttccttagaaagacggaaactctggaagtctgtaggtctttgccgcagaactcctggaacaagcaggcaggaaagagatgtgggccagggttctttaagccccagaaatgaccccaacctgcctaaatcgtccctgcctgccctcaccctctattcttgagaagtggaatacgttgtcccacttgagccagttgacttgtaaagcaaagtgccttctgagcgccacaccgagcccactcactgtccgaatctggttgctagagagcccagggtgtgcccttacctctccgtcgggacgtttcagggtgtcagcgtcttagctgctctcactgaccttcatcataagaggtcataataaaccagtgaagtcgtgaaaaacatgacaggcaattgcacagcctctgtgttgctgcttttggaattcacgcagcttgttttagagcaattctccttcaaatcagaataataccaggagccttagctaatcagctgtatttaaggtttctgaatcaaaactgcttaaaagatgaataaacctccattgcttatctagacatgtgct

SEQ ID NO: 72528 - DNA, 1977 bp, Homo sapiens
aggaatgttggtgctcccagcacctagcaccgggagactggagaggtttccaggagagtgacccgagtcggcaccatgcgccctgcagccctgcgcggggccctgctgggctgcctctgcctggcgttgctttgcctgggcggtgcggacaagcgcctgcgtgacaaccatgagtggaaaaaactaattatggttcagcactggcctgagacagtatgcgagaaaattcaaaacgactgtagagaccctccggattactggacaatacatggactatggcccgataaaagtgaaggatgtaatagatcgtggcccttcaatttagaagagattaaggatcttttgccagaaatgagggcatactggcctgacgtaattcactcgtttcccaatcgcagccgcttctggaagcatgagtgggaaaagcatgggacctgcgccgcccaggtggatgcgctcaactcccagaagaagtactttggcagaagcctggaactctacagggagctggacctcaacagtgtgcttctaaaattggggataaaaccatccatcaattactaccaagttgcagattttaaagatgcccttgccagagtatatggagtgatacccaaaatccagtgccttccaccaagccaggatgaggaagtacagacaattggtcagatagaactgtgcctcactaagcaagaccagcagctgcaaaactgcaccgagccgggggagcagccgtcccccaagcaggaagtctggctggcaaatggggccgccgagagccggggtctgagagtctgtgaagatggcccagtcttctatcccccacctaaaaagaccaagcattgatgcccaagttttggaaatattctgttttaaaaagcaagagaaattcacaaactgcagctttctaaaaaacaactccaaagtgaagtctgtttattttgctgtttcccctccatgcctgtgaattggatgttgtggtccctgtagagtgagtgcatgtggcgtacacggggagaaaggagctctcccacgcctgagtggctgttttgtgcttgggataaagctcacagattgtttttttttttctctattaaactcttcagtgccctggtagatcaggcaggcatacttggaatttagacagatggcaccgattcaggggactctcttgctcgagttttcccctcggagcctgttgccttcttggcgcagggaccctgtcaagacgaagagctccacgcatggcaggagcccacgctgatgcctggtgggcctggggggtgtctctagctcagactgggtctgttccatgtgaccagagccccaggacatcgttccttagccagctgctccgttgttggaggcctggtgtggtcacaggtgtgtcctagaacggtgactttgcccctcctgccctaggagatttgggtgtattcacagagcagccatctcctgtctccgtcagagcagtctcttccaggttactggaaggtcagtttctgtcaggcctcacttccttcttatcagagggtagccaggtccctgcactggtatctatttagaaatgtacatggagcccccagcgaaatgtgcctacattgtgtgttccagaaccggaggtacccttaccttctagatatgtgatgacatggctctcacgtcaggcagactgctgcacccacgctctcggcctgccgtgcagggatttcactcgtggagtgaggcatctgggggctgtgcagtgaggagctttccatgtgttgttaagacaacctgttagcattgtcttctcccgcgtctcctggcctcttctctctttaaatccttttctctgtttgtcttaatcacattaacgtcctatttatgttttattcaatatacatttaaaatagaacttactatgtgccaggcattgtgttcaacacgtgaaatatttaatccttagaataaccatattgtcagcataatttacaa

SEQ ID NO: 72529 - DNA, 2369 bp, Homo sapiens
ctcctgcctcggcctctctgagccaaccacggggcggggcgtgaacgccgggcggggacgtgccgttctggggggcgtgtccaccggcgggggcgtgccgtcctgggggcgtggctctctgctccggtgcaggcccgcagggcgccctgggctgggagcaacgcgactgaccgtggtcgtgggcggacggcggctgcagcgtggaggagctggggtcgctgtgggtcgcgaagcagagcccgggacgtgcgcgcttggtgcacgatcctgaaggggagctccgaggggcccgggtcgccagggctgctgcggccattcccggagcccggcgcggggcccgcgagatactggtttaggccgtcccagggctccgggcgcacccggtggccgctgctgcagcggagggagcgcggcggcgcgggggctcggagacagcgtttctcccggaagtcttcctcgggcagcaggtgggaagtgggagccggagcggcagctggcagcgttctctccgcaggtcggcaccatgcgccctgcagccctgcgcggggccctgctgggctgcctctgcctggcgttgctttgcctgggcggtgcggacaagcgcctgcgtgacaaccatgagtggaaaaaactaattatggttcagcactggcctgagacagtatgcgaggcccgataaaagtgaaggatgtaatagatcgtggcccttcaatttagaagagattaaggatcttttgccagaaatgagggcatactggcctgacgtaattcactcgtttcccaatcgcagccgcttctggaagcatgagtgggaaaagcatgggacctgcgccgcccaggtggatgcgctcaactcccagaagaagtactttggcagaagcctggaactctacagggagctggacctcaacagtgtgcttctaaaattggggataaaaccatccatcaattactaccaagttgcagattttaaagatgcccttgccagagtatatggagtgatacccaaaatccagtgccttccaccaagccaggatgaggaagtacagacaattggtcagatagaactgtgcctcactaagcaagaccagcagctgcaaaactgcaccgagccgggggagcagccgtcccccaagcaggaagtctggctggcaaatggggccgccgagagccggggtctgagagtctgtgaagatggcccagtcttctatcccccacctaaaaagaccaagcattgatgcccaagttttggaaatattctgttttaaaaagcaagagaaattcacaaactgcagctttctaaaaaacaactccaaagtgaagtctgtttattttgctgtttcccctccatgcctgtgaattggatgttgtggtccctgtagagtgagtgcatgtggcgtacacggggagaaaggagctctcccacgcctgagtggctgttttgtgcttgggataaagctcacagattgtttttttttttctctattaaactcttcagtgccctggtagatcaggcaggcatacttggaatttagacagatggcaccgattcaggggactctcttgctcgagttttcccctcggagcctgttgccttcttggcgcagggaccctgtcaagacgaagagctccacgcatggcaggagcccacgctgatgcctggtgggcctggggggtgtctctagctcagactgggtctgttccatgtgaccagagccccaggacatcgttccttagccagctgctccgttgttggaggcctggtgtggtcacaggtgtgtcctagaacggtgactttgcccctcctgccctaggagatttgggtgtattcacagagcagccatctcctgtctccgtcagagcagtctcttccaggttactggaaggtcagtttctgtcaggcctcacttccttcttatcagagggtagccaggtccctgcactggtatctatttagaaatgtacatggagcccccagcgaaatgtgcctacattgtgtgttccagaaccggaggtacccttaccttctagatatgtgatgacatggctctcacgtcaggcagactgctgcacccacgctctcggcctgccgtgcagggatttcactcgtggagtgaggcatctgggggctgtgcagtgaggagctttccatgtgttgttaagacaacctgttagcattgtcttctcccgcgtctcctggcctcttctctctttaaatccttttctctgtttgtcttaatcacattaacgtcctatttatgttttattcaatatacatttaaaatagaacttactatgtgccaggcattgtgttcaacacgtgaaatatttaatccttagaataaccatattgtcagcataatttacaa

SEQ ID NO: 72530 - DNA, 1937 bp, Homo sapiens
tcgacggctcattggtttttgttgctgaaaatattccattgtttggatgtacactttatcccttcacctataacagcttgtattttcgtgtgcagttttatgattactcaaattgcacttgtagatatatcttaacaaacacttcatacaaaataagcataggattattttattcaccaaagtattgttaattagcagagctcaattctttggtgtcagtttatcaaatttaccttctaggttttgagtttattattaagaacctgcgtagacttattttattttttaatgcataggatcttttgccagaaatgagggcatactggcctgacgtaattcactcgtttcccaatcgcagccgcttctggaagcatgagtgggaaaagcatgggacctgcgccgcccaggtggatgcgctcaactcccagaagaagtactttggcagaagcctggaactctacagggagctggacctcaacagtgtgcttctaaaattggggataaaaccatccatcaattactaccaagttgcagattttaaagatgcccttgccagagtatatggagtgatacccaaaatccagtgccttccaccaagccaggatgaggaagtacagacaattggtcagatagaactgtgcctcactaagcaagaccagcagctgcaaaactgcaccgagccgggggagcagccgtcccccaagcaggaagtctggctggcaaatggggccgccgagagccggggtctgagagtctgtgaagatggcccagtcttctatcccccacctaaaaagaccaagcattgatgcccaagttttggaaatattctgttttaaaaagcaagagaaattcacaaactgcagctttctaaaaaacaactccaaagtgaagtctgtttattttgctgtttcccctccatgcctgtgaattggatgttgtggtccctgtagagtgagtgcatgtggcgtacacggggagaaaggagctctcccacgcctgagtggctgttttgtgcttgggataaagctcacagattgtttttttttttctctattaaactcttcagtgccctggtagatcaggcaggcatacttggaatttagacagatggcaccgattcaggggactctcttgctcgagttttcccctcggagcctgttgccttcttggcgcagggaccctgtcaagacgaagagctccacgcatggcaggagcccacgctgatgcctggtgggcctggggggtgtctctagctcagactgggtctgttccatgtgaccagagccccaggacatcgttccttagccagctgctccgttgttggaggcctggtgtggtcacaggtgtgtcctagaacggtgactttgcccctcctgccctaggagatttgggtgtattcacagagcagccatctcctgtctccgtcagagcagtctcttccaggttactggaaggtcagtttctgtcaggcctcacttccttcttatcagagggtagccaggtccctgcactggtatctatttagaaatgtacatggagcccccagcgaaatgtgcctacattgtgtgttccagaaccggaggtacccttaccttctagatatgtgatgacatggctctcacgtcaggcagactgctgcacccacgctctcggcctgccgtgcagggatttcactcgtggagtgaggcatctgggggctgtgcagtgaggagctttccatgtgttgttaagacaacctgttagcattgtcttctcccgcgtctcctggcctcttctctctttaaatccttttctctgtttgtcttaatcacattaacgtcctatttatgttttattcaatatacatttaaaatagaacttactatgtgccaggcattgtgttcaacacgtgaaatatttaatccttagaataaccatattgtcagcataatttacaa

SEQ ID NO: 72531 - DNA, 3680 bp, Homo sapiens
ctcctgcctcggcctctctgagccaaccacggggcggggcgtgaacgccgggcggggacgtgccgttctggggggcgtgtccaccggcgggggcgtgccgtcctgggggcgtggctctctgctccggtgcaggcccgcagggcgccctgggctgggagcaacgcgactgaccgtggtcgtgggcggacggcggctgcagcgtggaggagctggggtcgctgtgggtcgcgaagcagagcccgggacgtgcgcgcttggtgcacgatcctgaaggggagctccgaggggcccgggtcgccagggctgctgcggccattcccggagcccggcgcggggcccgcgagatactggtttaggccgtcccagggctccgggcgcacccggtggccgctgctgcagcggagggagcgcggcggcgcgggggctcggagacagcgtttctcccggaagtcttcctcgggcagcaggtgggaagtgggagccggagcggcagctggcagcgttctctccgcaggtcggcaccatgcgccctgcagccctgcgcggggccctgctgggctgcctctgcctggcgttgctttgcctgggcggtgcggacaagcgcctgcgtgacaaccatgagtggaaaaaactaattatggttcagcactggcctgagacagtatgcgagaaaattcaaaacgactgtagagaccctccggattactggacaatacatggactatggcccgataaaagtgaaggatgtaatagatcgtggcccttcaatttagaagagattaaggatcttttgccagaaatgagggcatactggcctgacgtaattcactcgtttcccaatcgcagccgcttctggaagcatgagtgggaaaagcatgggacctgcgccgcccaggtggatgcgctcaactcccagaagaagtactttggcagaagcctggaactctacagggagctggacctcaacaggtgggtgcgcccttcccccggctgcacttcccagtggggatctctgctgtcgcccaagcctgacagctggatccaggggagtgggtgtagacctcactgccctccagcagcttctgcatgtgcactattcggctactgggatcattcctgaggaatgttctgagcctaccaagcctttccagatcattctacatcacgatcacacagagtgggtgcagagtattgggatgcccatctgggcaccatctcatcatcagagtcggccatagggaaaacgaggactccaaccagcatgtgccgaactctgtggccaagacagtctgacaataagttattgcccacagaggatgtctaagtctttgtgtccactctgtgatcgtgatctagaattttctaccaaggcttgatggggaactaggatattcttctgcaatgattcagaattttacagtgtacctttatactttaataagtgaattctatatatggtagtttggtaggattctgtgtagaagtgctttaggaggtgattgaaagctgtagggacttaccatacggttatgtattgcttggtgatggggtataaaattgtcatgtgaacatcttggagtgcacttacttagctgatacagcccacgacacacatatgctttgtggtatagcctgttgcttcgaggctacaaacctgtacagtgtgtgactctactgagtactgtaggcacctgtatgtaacacaatggtaaggatttgtgtatctaaacatatctcaacatagaaaaggcacagtagaaatgtggtcatatgggaccgccctcgtacatgcaggccttcactgactgaatgtcgtaatgtggcgcatgactgtgtttaaagatttgtccaaatgcagtttaccaggataagcctggaatccgatttcaattgctgtcttttaaagcaggtgtggcaaacgggtggtgatgtgtgtgccagctccactcggtggtggccccagcgctcccatgctccgaaggagtcaggaactggaaagggtacctgcctggagcagtttgtgtgtgtgctaaggggtggggaaggcggggactgggaaccatgtatttgcagtccatgttgacacatttgttgcataaagtcatagaaaacactttcctttaagagtgtcttaatttttaccatgaaatatgatacctgaaaagaacaagaaagcaaagtggaccttcattatacagctaacttttttaaatttaaattttagtgtgcttctaaaattggggataaaaccatccatcaattactaccaagttgcagattttaaagatgcccttgccagagtatatggagtgatacccaaaatccagtgccttccaccaagccaggatgaggaagtacagacaattggtcagatagaactgtgcctcactaagcaagaccagcagctgcaaaactgcaccgagccgggggagcagccgtcccccaagcaggaagtctggctggcaaatggggccgccgagagccggggtctgagagtctgtgaagatggcccagtcttctatcccccacctaaaaagaccaagcattgatgcccaagttttggaaatattctgttttaaaaagcaagagaaattcacaaactgcagctttctaaaaaacaactccaaagtgaagtctgtttattttgctgtttcccctccatgcctgtgaattggatgttgtggtccctgtagagtgagtgcatgtggcgtacacggggagaaaggagctctcccacgcctgagtggctgttttgtgcttgggataaagctcacagattgtttttttttttctctattaaactcttcagtgccctggtagatcaggcaggcatacttggaatttagacagatggcaccgattcaggggactctcttgctcgagttttcccctcggagcctgttgccttcttggcgcagggaccctgtcaagacgaagagctccacgcatggcaggagcccacgctgatgcctggtgggcctggggggtgtctctagctcagactgggtctgttccatgtgaccagagccccaggacatcgttccttagccagctgctccgttgttggaggcctggtgtggtcacaggtgtgtcctagaacggtgactttgcccctcctgccctaggagatttgggtgtattcacagagcagccatctcctgtctccgtcagagcagtctcttccaggttactggaaggtcagtttctgtcaggcctcacttccttcttatcagagggtagccaggtccctgcactggtatctatttagaaatgtacatggagcccccagcgaaatgtgcctacattgtgtgttccagaaccggaggtacccttaccttctagatatgtgatgacatggctctcacgtcaggcagactgctgcacccacgctctcggcctgccgtgcagggatttcactcgtggagtgaggcatctgggggctgtgcagtgaggagctttccatgtgttgttaagacaacctgttagcattgtcttctcccgcgtctcctggcctcttctctctttaaatccttttctctgtttgtcttaatcacattaacgtcctatttatgttttattcaatatacatttaaaatagaacttactatgtgccaggcattgtgttcaacacgtgaaatatttaatccttagaataaccatattgtcagcataatttacaa

SEQ ID NO: 72532 - DNA, 2379 bp, Homo sapiens
ctcctgcctcggcctctctgagccaaccacggggcggggcgtgaacgccgggcggggacgtgccgttctggggggcgtgtccaccggcgggggcgtgccgtcctgggggcgtggctctctgctccggtgcaggcccgcagggcgccctgggctgggagcaacgcgactgaccgtggtcgtgggcggacggcggctgcagcgtggaggagctggggtcgctgtgggtcgcgaagcagagcccgggacgtgcgcgcttggtgcacgatcctgaaggggagctccgaggggcccgggtcgccagggctgctgcggccattcccggagcccggcgcggggcccgcgagatactggtttaggccgtcccagggctccgggcgcacccggtggccgctgctgcagcggagggagcgcggcggcgcgggggctcggagacagcgtttctcccggaagtcttcctcgggcagcaggtgggaagtgggagccggagcggcagctggcagcgttctctccgcaggtcggcaccatgcgccctgcagccctgcgcggggccctgctgggctgcctctgcctggcgttgctttgcctgggcggtgcggacaagcgcctgcgtgacaaccatgagtggaaaaaactaattatggttcagcactggcctgagacagtatgcgagaaaattcaaaacgactgtagagaccctccggattactggacaatacatggactatggcccgataaaagtgaaggatgtaatagatcgtggcccttcaatttagaagagattaaggatcttttgccagaaatgagggcatactggcctgacgtaattcactcgtttcccaatcgcagccgcttctggaagcatgagtgggaaaagcatgggacctgcgccgcccaggtggatgcgctcaactcccagaagaagtactttggcagaagcctggaactctacagggagctggacctcaacaggttgcagattttaaagatgcccttgccagagtatatggagtgatacccaaaatccagtgccttccaccaagccaggatgaggaagtacagacaattggtcagatagaactgtgcctcactaagcaagaccagcagctgcaaaactgcaccgagccgggggagcagccgtcccccaagcaggaagtctggctggcaaatggggccgccgagagccggggtctgagagtctgtgaagatggcccagtcttctatcccccacctaaaaagaccaagcattgatgcccaagttttggaaatattctgttttaaaaagcaagagaaattcacaaactgcagctttctaaaaaacaactccaaagtgaagtctgtttattttgctgtttcccctccatgcctgtgaattggatgttgtggtccctgtagagtgagtgcatgtggcgtacacggggagaaaggagctctcccacgcctgagtggctgttttgtgcttgggataaagctcacagattgtttttttttttctctattaaactcttcagtgccctggtagatcaggcaggcatacttggaatttagacagatggcaccgattcaggggactctcttgctcgagttttcccctcggagcctgttgccttcttggcgcagggaccctgtcaagacgaagagctccacgcatggcaggagcccacgctgatgcctggtgggcctggggggtgtctctagctcagactgggtctgttccatgtgaccagagccccaggacatcgttccttagccagctgctccgttgttggaggcctggtgtggtcacaggtgtgtcctagaacggtgactttgcccctcctgccctaggagatttgggtgtattcacagagcagccatctcctgtctccgtcagagcagtctcttccaggttactggaaggtcagtttctgtcaggcctcacttccttcttatcagagggtagccaggtccctgcactggtatctatttagaaatgtacatggagcccccagcgaaatgtgcctacattgtgtgttccagaaccggaggtacccttaccttctagatatgtgatgacatggctctcacgtcaggcagactgctgcacccacgctctcggcctgccgtgcagggatttcactcgtggagtgaggcatctgggggctgtgcagtgaggagctttccatgtgttgttaagacaacctgttagcattgtcttctcccgcgtctcctggcctcttctctctttaaatccttttctctgtttgtcttaatcacattaacgtcctatttatgttttattcaatatacatttaaaatagaacttactatgtgccaggcattgtgttcaacacgtgaaatatttaatccttagaataaccatattgtcagcataatttacaa

SEQ ID NO: 72533 - DNA, 2304 bp, Homo sapiens
ctcctgcctcggcctctctgagccaaccacggggcggggcgtgaacgccgggcggggacgtgccgttctggggggcgtgtccaccggcgggggcgtgccgtcctgggggcgtggctctctgctccggtgcaggcccgcagggcgccctgggctgggagcaacgcgactgaccgtggtcgtgggcggacggcggctgcagcgtggaggagctggggtcgctgtgggtcgcgaagcagagcccgggacgtgcgcgcttggtgcacgatcctgaaggggagctccgaggggcccgggtcgccagggctgctgcggccattcccggagcccggcgcggggcccgcgagatactggtttaggccgtcccagggctccgggcgcacccggtggccgctgctgcagcggagggagcgcggcggcgcgggggctcggagacagcgtttctcccggaagtcttcctcgggcagcaggtgggaagtgggagccggagcggcagctggcagcgttctctccgcaggtcggcaccatgcgccctgcagccctgcgcggggccctgctgggctgcctctgcctggcgttgctttgcctgggcggtgcggacaagcgcctgcgtgacaaccatgagtggaaaaaactaattatggttcagcactggcctgagacagtatgcgagaaaattcaaaacgactgtagagaccctccggattactggacaatacatggactatggcccgataaaagtgaaggatgtaatagatcgtggcccttcaatttagaagagattaaggatcttttgccagaaatgagggcatactggcctgacgtaattcactcgtttcccaatcgcagccgcttctggaagcatgagtgggaaaagcatgggacctgcgccgcccaggtggatgcgctcaactcccagaagaagtactttggcagaagcctggaactctacagggagctggacctcaacaggatgaggaagtacagacaattggtcagatagaactgtgcctcactaagcaagaccagcagctgcaaaactgcaccgagccgggggagcagccgtcccccaagcaggaagtctggctggcaaatggggccgccgagagccggggtctgagagtctgtgaagatggcccagtcttctatcccccacctaaaaagaccaagcattgatgcccaagttttggaaatattctgttttaaaaagcaagagaaattcacaaactgcagctttctaaaaaacaactccaaagtgaagtctgtttattttgctgtttcccctccatgcctgtgaattggatgttgtggtccctgtagagtgagtgcatgtggcgtacacggggagaaaggagctctcccacgcctgagtggctgttttgtgcttgggataaagctcacagattgtttttttttttctctattaaactcttcagtgccctggtagatcaggcaggcatacttggaatttagacagatggcaccgattcaggggactctcttgctcgagttttcccctcggagcctgttgccttcttggcgcagggaccctgtcaagacgaagagctccacgcatggcaggagcccacgctgatgcctggtgggcctggggggtgtctctagctcagactgggtctgttccatgtgaccagagccccaggacatcgttccttagccagctgctccgttgttggaggcctggtgtggtcacaggtgtgtcctagaacggtgactttgcccctcctgccctaggagatttgggtgtattcacagagcagccatctcctgtctccgtcagagcagtctcttccaggttactggaaggtcagtttctgtcaggcctcacttccttcttatcagagggtagccaggtccctgcactggtatctatttagaaatgtacatggagcccccagcgaaatgtgcctacattgtgtgttccagaaccggaggtacccttaccttctagatatgtgatgacatggctctcacgtcaggcagactgctgcacccacgctctcggcctgccgtgcagggatttcactcgtggagtgaggcatctgggggctgtgcagtgaggagctttccatgtgttgttaagacaacctgttagcattgtcttctcccgcgtctcctggcctcttctctctttaaatccttttctctgtttgtcttaatcacattaacgtcctatttatgttttattcaatatacatttaaaatagaacttactatgtgccaggcattgtgttcaacacgtgaaatatttaatccttagaataaccatattgtcagcataatttacaa

SEQ ID NO: 72534 - DNA, 1743 bp, Homo sapiens
ctcctgcctcggcctctctgagccaaccacggggcggggcgtgaacgccgggcggggacgtgccgttctggggggcgtgtccaccggcgggggcgtgccgtcctgggggcgtggctctctgctccggtgcaggcccgcagggcgccctgggctgggagcaacgcgactgaccgtggtcgtgggcggacggcggctgcagcgtggaggagctggggtcgctgtgggtcgcgaagcagagcccgggacgtgcgcgcttggtgcacgatcctgaaggggagctccgaggggcccgggtcgccagggctgctgcggccattcccggagcccggcgcggggcccgcgagatactggtttaggccgtcccagggctccgggcgcacccggtggccgctgctgcagcggagggagcgcggcggcgcgggggctcggagacagcgtttctcccggaagtcttcctcgggcagcaggtgggaagtgggagccggagcggcagctggcagcgttctctccgcaggtcggcaccatgcgccctgcagccctgcgcggggccctgctgggctgcctctgcctggcgttgctttgcctgggcggtgcggacaagcgcctgcgtgacaaccatgagtggaaaaaactaattatggttcagcactggcctgagacagtatgcgagaaaattcaaaacgactgtagagaccctccggattactggacaatacatggactatggcccgataaaagtgaaggatgtaatagatcgtggcccttcaatttagaagagattaaggatcttttgccagaaatgagggcatactggcctgacgtaattcactcgtttcccaatcgcagccgcttctggaagcatgagtgggaaaagcatgggacctgcgccgcccaggtggatgcgctcaactcccagaagaagtactttggcagaagcctggaactctacagggagctggacctcaacagtgtgcttctaaaattggggataaaaccatccatcaattactaccaagtaagtcttgcttttgcttcttttctcgtgtgtctctcccggggacctccagtagggccgtttcagcctctgagtcaatgggctgtaaattgccccagtgcaaacccccttcctacttaaatgttatcatgtgaacagattttatttgcattttattttcctgcgcatgttgagtaggagctgaaggctgcttagaccagtgatttggaagcacagatttcatggctccctttgtgagaagtgtgtgctccagggtccggcagagcaggtggaatctgcagtttgaagagtcacattcacttttataacgtagtcttatatttgtttgtggtttgttttcatgataaaattgtgatttgttttatgataaaagaaactatagatatttaagcatgacaagatgttattagctggtaagcatatacaaaaagttgctttttgccaggtgtggtgactcacgcctataaatcccaggaccttgggaggctcaggctggaggattgcttgtggctagaatttcgagaccagcctgggcagcagagtgagacctctagaaagaagtaaaagtagctgagcatgatagtatgtgtctgtggtctcagctattcaggaagctaaggtcagaggattgcctgcgcccaggaatttgaggctgcagtgagccatggtcgccccactgcactccagtctgggcgacagccagatcacgtctctttaaaaaaaaaaga

SEQ ID NO: 72535 - DNA, 1566 bp, Homo sapiens
ctcctgcctcggcctctctgagccaaccacggggcggggcgtgaacgccgggcggggacgtgccgttctggggggcgtgtccaccggcgggggcgtgccgtcctgggggcgtggctctctgctccggtgcaggcccgcagggcgccctgggctgggagcaacgcgactgaccgtggtcgtgggcggacggcggctgcagcgtggaggagctggggtcgctgtgggtcgcgaagcagagcccgggacgtgcgcgcttggtgcacgatcctgaaggggagctccgaggggcccgggtcgccagggctgctgcggccattcccggagcccggcgcggggcccgcgagatactggtttaggccgtcccagggctccgggcgcacccggtggccgctgctgcagcggagggagcgcggcggcgcgggggctcggagacagcgtttctcccggaagtcttcctcgggcagcaggtgggaagtgggagccggagcggcagctggcagcgttctctccgcaggtcggcaccatgcgccctgcagccctgcgcggggccctgctgggctgcctctgcctggcgttgctttgcctgggcggtgcggacaagcgcctgcgtgacaaccatgagtggaaaaaactaattatggttcagcactggcctgagacagtatgcgagaaaattcaaaacgactgtagagaccctccggattactggacaatacatggactatggcccgataaaagtgaaggatgtaatagatcgtggcccttcaatttagaagagattaaggatcttttgccagaaatgagggcatactggcctgacgtaattcactcgtttcccaatcgcagccgcttctggaagcatgagtgggaaaagcatgggacctgcgccgcccaggtggatgcgctcaactcccagaagaagtactttggcagaagcctggaactctacagggagctggacctcaacagtgtgcttctaaaattggggataaaaccatccatcaattactaccaagagctgaaggctgcttagaccagtgatttggaagcacagatttcatggctccctttgtgagaagtgtgtgctccagggtccggcagagcaggtggaatctgcagtttgaagagtcacattcacttttataacgtagtcttatatttgtttgtggtttgttttcatgataaaattgtgatttgttttatgataaaagaaactatagatatttaagcatgacaagatgttattagctggtaagcatatacaaaaagttgctttttgccaggtgtggtgactcacgcctataaatcccaggaccttgggaggctcaggctggaggattgcttgtggctagaatttcgagaccagcctgggcagcagagtgagacctctagaaagaagtaaaagtagctgagcatgatagtatgtgtctgtggtctcagctattcaggaagctaaggtcagaggattgcctgcgcccaggaatttgaggctgcagtgagccatggtcgccccactgcactccagtctgggcgacagccagatcacgtctctttaaaaaaaaaaga

SEQ ID NO: 72536 - DNA, 1325 bp, Homo sapiens
ctcctgcctcggcctctctgagccaaccacggggcggggcgtgaacgccgggcggggacgtgccgttctggggggcgtgtccaccggcgggggcgtgccgtcctgggggcgtggctctctgctccggtgcaggcccgcagggcgccctgggctgggagcaacgcgactgaccgtggtcgtgggcggacggcggctgcagcgtggaggagctggggtcgctgtgggtcgcgaagcagagcccgggacgtgcgcgcttggtgcacgatcctgaaggggagctccgaggggcccgggtcgccagggctgctgcggccattcccggagcccggcgcggggcccgcgagatactggtttaggccgtcccagggctccgggcgcacccggtggccgctgctgcagcggagggagcgcggcggcgcgggggctcggagacagcgtttctcccggaagtcttcctcgggcagcaggtgggaagtgggagccggagcggcagctggcagcgttctctccgcaggtcggcaccatgcgccctgcagccctgcgcggggccctgctgggctgcctctgcctggcgttgctttgcctgggcggtgcggacaagcgcctgcgtgacaaccatgagtggaaaaaactaattatggttcagcactggcctgagacagtatgcgagaaaattcaaaacgactgtagagaccctccggattactggacaatacatggactatggcccgataaaagtgaaggatgtaatagatcgtggcccttcaatttagaagagattaaggatcttttgccagaaatgagggcatactggcctgacgtaattcactcgtttcccaatcgcagccgcttctggaagcatgagtgggaaaagcatgggacctgcgccgcccaggtggatgcgctcaactcccagaagaagtactttggcagaagcctggaactctacagggagctggacctcaacagtcaccagggaagaaccatctactgtcctgtcctgaagggagttcctcctagatctggtcggacctttgtatgaccacagaggaggatctcaacctggatgtggagcccaccacagaagacactgcagaagaagtaactatacacgttttattacactctgctttgtttggggagattgggcccagaaggtggtgaagggggaaatggaagtttgaaattaaatatctgtgagcagttattttagtgacatatgtgtctctatacatacacatgcacaaacgtgtatatatgcatatgtacatatcatgtgcttattatattcggtaatctccctcaaaaagaatagctggagcata

SEQ ID NO: 72537 - DNA, 3139 bp, Homo sapiens
aggaatgttggtgctcccagcacctagcaccgggagactggagaggtttccaggagagtgacccgagtaggtcccctcctaattctggagccgtccctcgggctgcgcagtggagcgccgaggtggcgggaggctgcggggagcctgcgcggccaagcaccatctgcagtcaggagctcccgggcagcttgcagggcgcagtttttgaaagcgggtgctgcgtgcggaccgcgggcctgcagggatcttttgccagaaatgagggcatactggcctgacgtaattcactcgtttcccaatcgcagccgcttctggaagcatgagtgggaaaagcatgggacctgcgccgcccaggtggatgcgctcaactcccagaagaagtactttggcagaagcctggaactctacagggagctggacctcaacaggtgggtgcgcccttcccccggctgcacttcccagtggggatctctgctgtcgcccaagcctgacagctggatccaggggagtgggtgtagacctcactgccctccagcagcttctgcatgtgcactattcggctactgggatcattcctgaggaatgttctgagcctaccaagcctttccagatcattctacatcacgatcacacagagtgggtgcagagtattgggatgcccatctgggcaccatctcatcatcagagtcggccatagggaaaacgaggactccaaccagcatgtgccgaactctgtggccaagacagtctgacaataagttattgcccacagaggatgtctaagtctttgtgtccactctgtgatcgtgatctagaattttctaccaaggcttgatggggaactaggatattcttctgcaatgattcagaattttacagtgtacctttatactttaataagtgaattctatatatggtagtttggtaggattctgtgtagaagtgctttaggaggtgattgaaagctgtagggacttaccatacggttatgtattgcttggtgatggggtataaaattgtcatgtgaacatcttggagtgcacttacttagctgatacagcccacgacacacatatgctttgtggtatagcctgttgcttcgaggctacaaacctgtacagtgtgtgactctactgagtactgtaggcacctgtatgtaacacaatggtaaggatttgtgtatctaaacatatctcaacatagaaaaggcacagtagaaatgtggtcatatgggaccgccctcgtacatgcaggccttcactgactgaatgtcgtaatgtggcgcatgactgtgtttaaagatttgtccaaatgcagtttaccaggataagcctggaatccgatttcaattgctgtcttttaaagcaggtgtggcaaacgggtggtgatgtgtgtgccagctccactcggtggtggccccagcgctcccatgctccgaaggagtcaggaactggaaagggtacctgcctggagcagtttgtgtgtgtgctaaggggtggggaaggcggggactgggaaccatgtatttgcagtccatgttgacacatttgttgcataaagtcatagaaaacactttcctttaagagtgtcttaatttttaccatgaaatatgatacctgaaaagaacaagaaagcaaagtggaccttcattatacagctaacttttttaaatttaaattttagtgtgcttctaaaattggggataaaaccatccatcaattactaccaagttgcagattttaaagatgcccttgccagagtatatggagtgatacccaaaatccagtgccttccaccaagccaggatgaggaagtacagacaattggtcagatagaactgtgcctcactaagcaagaccagcagctgcaaaactgcaccgagccgggggagcagccgtcccccaagcaggaagtctggctggcaaatggggccgccgagagccggggtctgagagtctgtgaagatggcccagtcttctatcccccacctaaaaagaccaagcattgatgcccaagttttggaaatattctgttttaaaaagcaagagaaattcacaaactgcagctttctaaaaaacaactccaaagtgaagtctgtttattttgctgtttcccctccatgcctgtgaattggatgttgtggtccctgtagagtgagtgcatgtggcgtacacggggagaaaggagctctcccacgcctgagtggctgttttgtgcttgggataaagctcacagattgtttttttttttctctattaaactcttcagtgccctggtagatcaggcaggcatacttggaatttagacagatggcaccgattcaggggactctcttgctcgagttttcccctcggagcctgttgccttcttggcgcagggaccctgtcaagacgaagagctccacgcatggcaggagcccacgctgatgcctggtgggcctggggggtgtctctagctcagactgggtctgttccatgtgaccagagccccaggacatcgttccttagccagctgctccgttgttggaggcctggtgtggtcacaggtgtgtcctagaacggtgactttgcccctcctgccctaggagatttgggtgtattcacagagcagccatctcctgtctccgtcagagcagtctcttccaggttactggaaggtcagtttctgtcaggcctcacttccttcttatcagagggtagccaggtccctgcactggtatctatttagaaatgtacatggagcccccagcgaaatgtgcctacattgtgtgttccagaaccggaggtacccttaccttctagatatgtgatgacatggctctcacgtcaggcagactgctgcacccacgctctcggcctgccgtgcagggatttcactcgtggagtgaggcatctgggggctgtgcagtgaggagctttccatgtgttgttaagacaacctgttagcattgtcttctcccgcgtctcctggcctcttctctctttaaatccttttctctgtttgtcttaatcacattaacgtcctatttatgttttattcaatatacatttaaaatagaacttactatgtgccaggcattgtgttcaacacgtgaaatatttaatccttagaataaccatattgtcagcataatttacaa

SEQ ID NO: 72538 - DNA, 1446 bp, Homo sapiens
aagtttaatttctaatacacttgtatttaaaatcaggttgcagattttaaagatgcccttgccagagtatatggagtgatacccaaaatccagtgccttccaccaagccaggatgaggaagtacagacaattggtcagatagaactgtgcctcactaagcaagaccagcagctgcaaaactgcaccgagccgggggagcagccgtcccccaagcaggaagtctggctggcaaatggggccgccgagagccggggtctgagagtctgtgaagatggcccagtcttctatcccccacctaaaaagaccaagcattgatgcccaagttttggaaatattctgttttaaaaagcaagagaaattcacaaactgcagctttctaaaaaacaactccaaagtgaagtctgtttattttgctgtttcccctccatgcctgtgaattggatgttgtggtccctgtagagtgagtgcatgtggcgtacacggggagaaaggagctctcccacgcctgagtggctgttttgtgcttgggataaagctcacagattgtttttttttttctctattaaactcttcagtgccctggtagatcaggcaggcatacttggaatttagacagatggcaccgattcaggggactctcttgctcgagttttcccctcggagcctgttgccttcttggcgcagggaccctgtcaagacgaagagctccacgcatggcaggagcccacgctgatgcctggtgggcctggggggtgtctctagctcagactgggtctgttccatgtgaccagagccccaggacatcgttccttagccagctgctccgttgttggaggcctggtgtggtcacaggtgtgtcctagaacggtgactttgcccctcctgccctaggagatttgggtgtattcacagagcagccatctcctgtctccgtcagagcagtctcttccaggttactggaaggtcagtttctgtcaggcctcacttccttcttatcagagggtagccaggtccctgcactggtatctatttagaaatgtacatggagcccccagcgaaatgtgcctacattgtgtgttccagaaccggaggtacccttaccttctagatatgtgatgacatggctctcacgtcaggcagactgctgcacccacgctctcggcctgccgtgcagggatttcactcgtggagtgaggcatctgggggctgtgcagtgaggagctttccatgtgttgttaagacaacctgttagcattgtcttctcccgcgtctcctggcctcttctctctttaaatccttttctctgtttgtcttaatcacattaacgtcctatttatgttttattcaatatacatttaaaatagaacttactatgtgccaggcattgtgttcaacacgtgaaatatttaatccttagaataaccatattgtcagcataatttacaa

SEQ ID NO: 72539 - DNA, 1255 bp, Homo sapiens
tcgacggctcattggtttttgttgctgaaaatattccattgtttggatgtacactttatcccttcacctataacagcttgtattttcgtgtgcagttttatgattactcaaattgcacttgtagatatatcttaacaaacacttcatacaaaataagcataggattattttattcaccaaagtattgttaattagcagagctcaattctttggtgtcagtttatcaaatttaccttctaggttttgagtttattattaagaacctgcgtagacttattttattttttaatgcataggatcttttgccagaaatgagggcatactggcctgacgtaattcactcgtttcccaatcgcagccgcttctggaagcatgagtgggaaaagcatgggacctgcgccgcccaggtggatgcgctcaactcccagaagaagtactttggcagaagcctggaactctacagggagctggacctcaacagtgtgcttctaaaattggggataaaaccatccatcaattactaccaagtaagtcttgcttttgcttcttttctcgtgtgtctctcccggggacctccagtagggccgtttcagcctctgagtcaatgggctgtaaattgccccagtgcaaacccccttcctacttaaatgttatcatgtgaacagattttatttgcattttattttcctgcgcatgttgagtaggagctgaaggctgcttagaccagtgatttggaagcacagatttcatggctccctttgtgagaagtgtgtgctccagggtccggcagagcaggtggaatctgcagtttgaagagtcacattcacttttataacgtagtcttatatttgtttgtggtttgttttcatgataaaattgtgatttgttttatgataaaagaaactatagatatttaagcatgacaagatgttattagctggtaagcatatacaaaaagttgctttttgccaggtgtggtgactcacgcctataaatcccaggaccttgggaggctcaggctggaggattgcttgtggctagaatttcgagaccagcctgggcagcagagtgagacctctagaaagaagtaaaagtagctgagcatgatagtatgtgtctgtggtctcagctattcaggaagctaaggtcagaggattgcctgcgcccaggaatttgaggctgcagtgagccatggtcgccccactgcactccagtctgggcgacagccagatcacgtctctttaaaaaaaaaaga

SEQ ID NO: 72540 - DNA, 2425 bp, Homo sapiens
ctcctgcctcggcctctctgagccaaccacggggcggggcgtgaacgccgggcggggacgtgccgttctggggggcgtgtccaccggcgggggcgtgccgtcctgggggcgtggctctctgctccggtgcaggcccgcagggcgccctgggctgggagcaacgcgactgaccgtggtcgtgggcggacggcggctgcagcgtggaggagctggggtcgctgtgggtcgcgaagcagagcccgggacgtgcgcgcttggtgcacgatcctgaaggggagctccgaggggcccgggtcgccagggctgctgcggccattcccggagcccggcgcggggcccgcgagatactggtttaggccgtcccagggctccgggcgcacccggtggccgctgctgcagcggagggagcgcggcggcgcgggggctcggagacagcgtttctcccggaagtcttcctcgggcagcaggtgggaagtgggagccggagcggcagctggcagcgttctctccgcaggtcggcaccatgcgccctgcagccctgcgcggggccctgctgggctgcctctgcctggcgttgctttgcctgggcggtgcggacaagcgcctgcgtgacaaccatgagtggaaaaaactaattatggttcagcactggcctgagacagtatgcgagaaaattcaaaacgactgtagagaccctccggattactggacaatacatggactatggcccgataaaagtgaaggatgtaatagatcgtggcccttcaatttagaagagattaaggatcttttgccagaaatgagggcatactggcctgacgtaattcactcgtttcccaatcgcagccgcttctggaagcatgagtgggaaaagcatgggacctgcgccgcccaggtggatgcgctcaactcccagaagaagtactttggcagaagcctggaactctacagggagctggacctcaacagtgtgcttctaaaattggggataaaaccatccatcaattactaccaagttgcagattttaaagatgcccttgccagagtatatggagtgatacccaaaatccagtgccttccaccaagccaggatgaggaagtacagacaattggtcagatagaactgtgcctcactaagcaagaccagcagctgcaaaactgcaccgagccgggggagcagccgtcccccaagcaggaagtctggctggcaaatggggccgccgagagccggggtctgagagtctgtgaagatggcccagtcttctatcccccacctaaaaagaccaagcattgatgcccaagttttggaaatattctgttttaaaaagcaagagaaattcacaaactgcagctttctaaaaaacaactccaaagtgaagtctgtttattttgctgtttcccctccatgcctgtgaattggatgttgtggtccctgtagagtgagtgcatgtggcgtacacggggagaaaggagctctcccacgcctgagtggctgttttgtgcttgggataaagctcacagattgtttttttttttctctattaaactcttcagtgccctggtagatcaggcaggcatacttggaatttagacagatggcaccgattcaggggactctcttgctcgagttttcccctcggagcctgttgccttcttggcgcagggaccctgtcaagacgaagagctccacgcatggcaggagcccacgctgatgcctggtgggcctggggggtgtctctagctcagactgggtctgttccatgtgaccagagccccaggacatcgttccttagccagctgctccgttgttggaggcctggtgtggtcacaggtgtgtcctagaacggtgactttgcccctcctgccctaggagatttgggtgtattcacagagcagccatctcctgtctccgtcagagcagtctcttccaggttactggaaggtcagtttctgtcaggcctcacttccttcttatcagagggtagccaggtccctgcactggtatctatttagaaatgtacatggagcccccagcgaaatgtgcctacattgtgtgttccagaaccggaggtacccttaccttctagatatgtgatgacatggctctcacgtcaggcagactgctgcacccacgctctcggcctgccgtgcagggatttcactcgtggagtgaggcatctgggggctgtgcagtgaggagctttccatgtgttgttaagacaacctgttagcattgtcttctcccgcgtctcctggcctcttctctctttaaatccttttctctgtttgtcttaatcacattaacgtcctatttatgttttattcaatatacatttaaaatagaacttactatgtgccaggcattgtgttcaacacgtgaaatatttaatccttagaataaccatattgtcagcataatttacaa

SEQ ID NO: 72541 - DNA, 2154 bp, Homo sapiens
aggaatgttggtgctcccagcacctagcaccgggagactggagaggtttccaggagagtgacccgagtaggtcccctcctaattctggagccgtccctcgggctgcgcagtggagcgccgaggtggcgggaggctgcggggagcctgcgcggccaagcaccatctgcagtcaggagctcccgggcagcttgcagggcgcagtttttgaaagcgggtgctgcgtgcggaccgcgggcctgcagggtcggcaccatgcgccctgcagccctgcgcggggccctgctgggctgcctctgcctggcgttgctttgcctgggcggtgcggacaagcgcctgcgtgacaaccatgagtggaaaaaactaattatggttcagcactggcctgagacagtatgcgagaaaattcaaaacgactgtagagaccctccggattactggacaatacatggactatggcccgataaaagtgaaggatgtaatagatcgtggcccttcaatttagaagagattaaggatcttttgccagaaatgagggcatactggcctgacgtaattcactcgtttcccaatcgcagccgcttctggaagcatgagtgggaaaagcatgggacctgcgccgcccaggtggatgcgctcaactcccagaagaagtactttggcagaagcctggaactctacagggagctggacctcaacagtgtgcttctaaaattggggataaaaccatccatcaattactaccaagttgcagattttaaagatgcccttgccagagtatatggagtgatacccaaaatccagtgccttccaccaagccaggatgaggaagtacagacaattggtcagatagaactgtgcctcactaagcaagaccagcagctgcaaaactgcaccgagccgggggagcagccgtcccccaagcaggaagtctggctggcaaatggggccgccgagagccggggtctgagagtctgtgaagatggcccagtcttctatcccccacctaaaaagaccaagcattgatgcccaagttttggaaatattctgttttaaaaagcaagagaaattcacaaactgcagctttctaaaaaacaactccaaagtgaagtctgtttattttgctgtttcccctccatgcctgtgaattggatgttgtggtccctgtagagtgagtgcatgtggcgtacacggggagaaaggagctctcccacgcctgagtggctgttttgtgcttgggataaagctcacagattgtttttttttttctctattaaactcttcagtgccctggtagatcaggcaggcatacttggaatttagacagatggcaccgattcaggggactctcttgctcgagttttcccctcggagcctgttgccttcttggcgcagggaccctgtcaagacgaagagctccacgcatggcaggagcccacgctgatgcctggtgggcctggggggtgtctctagctcagactgggtctgttccatgtgaccagagccccaggacatcgttccttagccagctgctccgttgttggaggcctggtgtggtcacaggtgtgtcctagaacggtgactttgcccctcctgccctaggagatttgggtgtattcacagagcagccatctcctgtctccgtcagagcagtctcttccaggttactggaaggtcagtttctgtcaggcctcacttccttcttatcagagggtagccaggtccctgcactggtatctatttagaaatgtacatggagcccccagcgaaatgtgcctacattgtgtgttccagaaccggaggtacccttaccttctagatatgtgatgacatggctctcacgtcaggcagactgctgcacccacgctctcggcctgccgtgcagggatttcactcgtggagtgaggcatctgggggctgtgcagtgaggagctttccatgtgttgttaagacaacctgttagcattgtcttctcccgcgtctcctggcctcttctctctttaaatccttttctctgtttgtcttaatcacattaacgtcctatttatgttttattcaatatacatttaaaatagaacttactatgtgccaggcattgtgttcaacacgtgaaatatttaatccttagaataaccatattgtcagcataatttacaa

SEQ ID NO: 72542 - DNA, 4146 bp, Homo sapiens
agcagcgagtccttgcctcccggcggctcaggacgagggcagatctcgttctggggcaagccgttgacactcgctccctgccaccgcccgggctccgtgccgccaagttttcattttccaccttctctgcctccagtcccccagcccctggccgagagaagggtcttaccggccgggattgctggaaacaccaagaggtggtttttgttttttaaaacttctgtttcttgggagggggtgtggcggggcaggatgagcaactccgttcctctgctctgtttctggagcctctgctattgctttgctgcggggagccccgtaccttttggtccagagggacggctggaagataagctccacaaacccaaagctacacagactgaggtcaaaccatctgtgaggtttaacctccgcacctccaaggacccagagcatgaaggatgctacctctccgtcggccacagccagcccttagaagactgcagtttcaacatgacagctaaaacctttttcatcattcacggatggacgatgagcggtatctttgaaaactggctgcacaaactcgtgtcagccctgcacacaagagagaaagacgccaatgtagttgtggttgactggctccccctggcccaccagctttacacggatgcggtcaataataccagggtggtgggacacagcattgccaggatgctcgactggctgcaggagaaggacgatttttctctcgggaatgtccacttgatcggctacagcctcggagcgcacgtggccgggtatgcaggcaacttcgtgaaaggaacggtgggccgaatcacaggtttggatcctgccgggcccatgtttgaaggggccgacatccacaagaggctctctccggacgatgcagattttgtggatgtcctccacacctacacgcgttccttcggcttgagcattggtattcagatgcctgtgggccacattgacatctaccccaatgggggtgacttccagccaggctgtggactcaacgatgtcttgggatcaattgcatatggaacaatcacagaggtggtaaaatgtgagcatgagcgagccgtccacctctttgttgactctctggtgaatcaggacaagccgagttttgccttccagtgcactgactccaatcgcttcaaaaaggggatctgtctgagctgccgcaagaaccgttgtaatagcattggctacaatgccaagaaaatgaggaacaagaggaacagcaaaatgtacctaaaaacccgggcaggcatgcctttcagagtttaccattatcagatgaaaatccatgtcttcagttacaagaacatgggagaaattgagcccaccttttacgtcaccctttatggcactaatgcagattcccagactctgccactggaaatagtggagcggatcgagcagaatgccaccaacaccttcctggtctacaccgaggaggacttgggagacctcttgaagatccagctcacctgggagggggcctctcagtcttggtacaacctgtggaaggagtttcgcagctacctgtctcaaccccgcaaccccggacgggagctgaatatcaggcgcatccgggtgaagtctggggaaacccagcggaaactgacattttgtacagaagaccctgagaacaccagcatatccccaggccgggagctctggtttcgcaagtgtcgggatggctggaggatgaaaaacgaaaccagtcccactgtggagcttccctgagggtgcccgggcaagtcttgccagcaaggcagcaagacttcctgctatccaagcccatggaggaaagttactgctgaggacccacccaatggaaggattcttctcagccttgaccctggagcactgggaacaactggtctcctgtgatggctgggactcctcgcgggaggggactgcgctgctatagctcttgctgcctctcttgaatagctctaactccaaacctctgtccacacctccagagcaccaagtccagatttgtgtgtaagcagctgggtgcctggggcctctcgtgcacactggattggtttctcagttgctgggcgagcctgtactctgcctgacgaggaacgctggctccgaagaggccctgtgtagaaggctgtcagctgctcagcctgctttgagcctcagtgagaagtccttccgacaggagctgactcatgtcaggatggcaggcctggtatcttgctcgggccctagctgttggggttctcatgggttgcactgaccatactgcttacgtcttagccattccgtcctgctccccagctcactctctgaagcacacatcattggctttcctatttttctgttcattttttaattgagcaaatgtctattgaacacttaaaattaattagaatgtggtaatggacatattactgagcctctccatttggaacccagtggagttgggatttctagaccctctttctgtttggatggtgtatgtgtatatgcatggggaaaggcacctggggcctgggggaggctataggatataagcattagggaccctgaggctttaagtggtttctatttcttcttagttattatgtgccaccttcttagttattatgtgccacctcccctatgagtgacgtgtttgatcactagcagaatagcaagcagagtatcattcatgctggggccagaatgatggccggttgccagatataactgctttggagcaaatctcttctgtttagagagatagaagttatgacatatgtaatacacatctgtgtacacagaaaccggcacctgccagacagagctggttctaagatttaatacagtgctttttttcctctttgaaatattttactttaataccagtgccttttcttgttgaacttcttggaaaagccaccaattctagatcttgatttgaattaatacacacaatatctgagacacttacacttttcaaaagatttgtgtatgcattgcctaattagagtagggggagaagggcaactattattatccctattttacaaaactgaggcttagtgaggttcagccacatgcctagacttatatactagttagtggtgcagccagggagaggactcagatttcctggaggcaaagtctatctctgaaactccatgaagacttttgcagccagttcccaccaatatgccccagacgtgagacaaacaaggacttttttttttatatagagccatccataaaatcctaagcccttttattaatgtataaccaggagaacatctgtgccaacggttggactttttatggctgagattcgggaggaagtgtgacaccaagcaggagaggaagaatgattttctttgtacttaggttttctaaggacattgttttaatctgtatcgtgccaaagttgtatcactgttaaacttctgaagacataaccagttgagtcttatttcaagatatgttctcaagccaattgtgtgcttctcttgtttctgtgattgctttctagccaaagcgaagcttgtacaggttgagtatcccttatccaaaatgcttggaaccagaagtgtttcaaattttagattattttcagattttggaatgtttgcatatacataatgagatattttgggaataggacccgagcctaaacacaaaattcattgatgtgtcagttacaccttatccacatagcctgagggtaattttatacgatattttaaatagttgtgtacatgaagcatggtttgtggtaacttatgtgaggggttttcccattttttgtcttgttggtgctcaaaaagttttggattttggagcatttcggattttggatttttggattagggttgctcaacccatattattggctgtacatcctggtcacttctgacttctgtttttactaatggaagctttgcaaattgaattctcagtgagttgtatatttatacacctggcttgaagccttaattgtatataatgatgctttttaaaaaatgctatttggaagactatttatttctcgtgtatataatgtatataaaaaaatatggttagtgtttacctaaggttaaccaatttcaagattaaaatttttaaatagtaaaataataaaaaattataaagttcttaatggtc

SEQ ID NO: 72543 - DNA, 2393 bp, Homo sapiens
tattccaacactacttactatccaagagaggcagcaagacttcctgctatccaagcccatggaggaaagttactgctgaggacccacccaatggaaggattcttctcagccttgaccctggagcactgggaacaactggtctcctgtgatggctgggactcctcgcgggaggggactgcgctgctatagctcttgctgcctctcttgaatagctctaactccaaacctctgtccacacctccagagcaccaagtccagatttgtgtgtaagcagctgggtgcctggggcctctcgtgcacactggattggtttctcagttgctgggcgagcctgtactctgcctgacgaggaacgctggctccgaagaggccctgtgtagaaggctgtcagctgctcagcctgctttgagcctcagtgagaagtccttccgacaggagctgactcatgtcaggatggcaggcctggtatcttgctcgggccctagctgttggggttctcatgggttgcactgaccatactgcttacgtcttagccattccgtcctgctccccagctcactctctgaagcacacatcattggctttcctatttttctgttcattttttaattgagcaaatgtctattgaacacttaaaattaattagaatgtggtaatggacatattactgagcctctccatttggaacccagtggagttgggatttctagaccctctttctgtttggatggtgtatgtgtatatgcatggggaaaggcacctggggcctgggggaggctataggatataagcattagggaccctgaggctttaagtggtttctatttcttcttagttattatgtgccaccttcttagttattatgtgccacctcccctatgagtgacgtgtttgatcactagcagaatagcaagcagagtatcattcatgctggggccagaatgatggccggttgccagatataactgctttggagcaaatctcttctgtttagagagatagaagttatgacatatgtaatacacatctgtgtacacagaaaccggcacctgccagacagagctggttctaagatttaatacagtgctttttttcctctttgaaatattttactttaataccagtgccttttcttgttgaacttcttggaaaagccaccaattctagatcttgatttgaattaatacacacaatatctgagacacttacacttttcaaaagatttgtgtatgcattgcctaattagagtagggggagaagggcaactattattatccctattttacaaaactgaggcttagtgaggttcagccacatgcctagacttatatactagttagtggtgcagccagggagaggactcagatttcctggaggcaaagtctatctctgaaactccatgaagacttttgcagccagttcccaccaatatgccccagacgtgagacaaacaaggacttttttttttatatagagccatccataaaatcctaagcccttttattaatgtataaccaggagaacatctgtgccaacggttggactttttatggctgagattcgggaggaagtgtgacaccaagcaggagaggaagaatgattttctttgtacttaggttttctaaggacattgttttaatctgtatcgtgccaaagttgtatcactgttaaacttctgaagacataaccagttgagtcttatttcaagatatgttctcaagccaattgtgtgcttctcttgtttctgtgattgctttctagccaaagcgaagcttgtacaggttgagtatcccttatccaaaatgcttggaaccagaagtgtttcaaattttagattattttcagattttggaatgtttgcatatacataatgagatattttgggaataggacccgagcctaaacacaaaattcattgatgtgtcagttacaccttatccacatagcctgagggtaattttatacgatattttaaatagttgtgtacatgaagcatggtttgtggtaacttatgtgaggggttttcccattttttgtcttgttggtgctcaaaaagttttggattttggagcatttcggattttggatttttggattagggttgctcaacccatattattggctgtacatcctggtcacttctgacttctgtttttactaatggaagctttgcaaattgaattctcagtgagttgtatatttatacacctggcttgaagccttaattgtatataatgatgctttttaaaaaatgctatttggaagactatttatttctcgtgtatataatgtatataaaaaaatatggttagtgtttacctaaggttaaccaatttcaagattaaaatttttaaatagtaaaataataaaaaattataaagttcttaatggtc

SEQ ID NO: 72544 - DNA, 3446 bp, Homo sapiens
gcaatgtggtgaaaccctgtatctacaaaaactacaaaaattagccaggtgtggtggtcatgtgcctgtcgtcccagatactggggaggctgaggtgagaggatcacctgaatctcggaagttgaggctgctgtgagcggggggtcgtgattgtcccactgcactctaacctgggcaagagtgagaccttgtctcaacacaaataaacaagcaaaagaattacatgaaaatactaacagcaacaataaacagctatcactgttgaggagtacagtatttattatttgagtgtctaatcatcaagaagggctcatcctgcatgctttttatctctcccacccccagcaatcacagaggtggtaaaatgtgagcatgagcgagccgtccacctctttgttgactctctggtgaatcaggacaagccgagttttgccttccagtgcactgactccaatcgcttcaaaaaggggatctgtctgagctgccgcaagaaccgttgtaatagcattggctacaatgccaagaaaatgaggaacaagaggaacagcaaaatgtacctaaaaacccgggcaggcatgcctttcagagtttaccattatcagatgaaaatccatgtcttcagttacaagaacatgggagaaattgagcccaccttttacgtcaccctttatggcactaatgcagattcccagactctgccactggaaatagtggagcggatcgagcagaatgccaccaacaccttcctggtctacaccgaggaggacttgggagacctcttgaagatccagctcacctgggagggggcctctcagtcttggtacaacctgtggaaggagtttcgcagctacctgtctcaaccccgcaaccccggacgggagctgaatatcaggcgcatccgggtgaagtctggggaaacccagcggaaactgacattttgtacagaagaccctgagaacaccagcatatccccaggccgggagctctggtttcgcaagtgtcgggatggctggaggatgaaaaacgaaaccagtcccactgtggagcttccctgagggtgcccgggcaagtcttgccagcaaggcagcaagacttcctgctatccaagcccatggaggaaagttactgctgaggacccacccaatggaaggattcttctcagccttgaccctggagcactgggaacaactggtctcctgtgatggctgggactcctcgcgggaggggactgcgctgctatagctcttgctgcctctcttgaatagctctaactccaaacctctgtccacacctccagagcaccaagtccagatttgtgtgtaagcagctgggtgcctggggcctctcgtgcacactggattggtttctcagttgctgggcgagcctgtactctgcctgacgaggaacgctggctccgaagaggccctgtgtagaaggctgtcagctgctcagcctgctttgagcctcagtgagaagtccttccgacaggagctgactcatgtcaggatggcaggcctggtatcttgctcgggccctagctgttggggttctcatgggttgcactgaccatactgcttacgtcttagccattccgtcctgctccccagctcactctctgaagcacacatcattggctttcctatttttctgttcattttttaattgagcaaatgtctattgaacacttaaaattaattagaatgtggtaatggacatattactgagcctctccatttggaacccagtggagttgggatttctagaccctctttctgtttggatggtgtatgtgtatatgcatggggaaaggcacctggggcctgggggaggctataggatataagcattagggaccctgaggctttaagtggtttctatttcttcttagttattatgtgccaccttcttagttattatgtgccacctcccctatgagtgacgtgtttgatcactagcagaatagcaagcagagtatcattcatgctggggccagaatgatggccggttgccagatataactgctttggagcaaatctcttctgtttagagagatagaagttatgacatatgtaatacacatctgtgtacacagaaaccggcacctgccagacagagctggttctaagatttaatacagtgctttttttcctctttgaaatattttactttaataccagtgccttttcttgttgaacttcttggaaaagccaccaattctagatcttgatttgaattaatacacacaatatctgagacacttacacttttcaaaagatttgtgtatgcattgcctaattagagtagggggagaagggcaactattattatccctattttacaaaactgaggcttagtgaggttcagccacatgcctagacttatatactagttagtggtgcagccagggagaggactcagatttcctggaggcaaagtctatctctgaaactccatgaagacttttgcagccagttcccaccaatatgccccagacgtgagacaaacaaggacttttttttttatatagagccatccataaaatcctaagcccttttattaatgtataaccaggagaacatctgtgccaacggttggactttttatggctgagattcgggaggaagtgtgacaccaagcaggagaggaagaatgattttctttgtacttaggttttctaaggacattgttttaatctgtatcgtgccaaagttgtatcactgttaaacttctgaagacataaccagttgagtcttatttcaagatatgttctcaagccaattgtgtgcttctcttgtttctgtgattgctttctagccaaagcgaagcttgtacaggttgagtatcccttatccaaaatgcttggaaccagaagtgtttcaaattttagattattttcagattttggaatgtttgcatatacataatgagatattttgggaataggacccgagcctaaacacaaaattcattgatgtgtcagttacaccttatccacatagcctgagggtaattttatacgatattttaaatagttgtgtacatgaagcatggtttgtggtaacttatgtgaggggttttcccattttttgtcttgttggtgctcaaaaagttttggattttggagcatttcggattttggatttttggattagggttgctcaacccatattattggctgtacatcctggtcacttctgacttctgtttttactaatggaagctttgcaaattgaattctcagtgagttgtatatttatacacctggcttgaagccttaattgtatataatgatgctttttaaaaaatgctatttggaagactatttatttctcgtgtatataatgtatataaaaaaatatggttagtgtttacctaaggttaaccaatttcaagattaaaatttttaaatagtaaaataataaaaaattataaagttcttaatggtc

SEQ ID NO: 72545 - DNA, 852 bp, Homo sapiens
agcagcgagtccttgcctcccggcggctcaggacgagggcagatctcgttctggggcaagccgttgacactcgctccctgccaccgcccgggctccgtgccgccaagttttcattttccaccttctctgcctccagtcccccagcccctggccgagagaagggtcttaccggccgggattgctggaaacaccaagaggtggtttttgttttttaaaacttctgtttcttgggagggggtgtggcggggcaggatgagcaactccgttcctctgctctgtttctggagcctctgctattgctttgctgcggggagccccgtaccttttggtccagagggacggctggaagataagctccacaaacccaaagctacacagactgaggtcaaaccatctgtgaggtttaacctccgcacctccaaggacccagagcatgaaggatgctacctctccgtcggccacagccagcccttagaagactgcagtttcaacatgacagctaaaacctttttcatcattcacggatggacgatgagcggtatctttgaaaactggctgcacaaactcgtgtcagccctgcacacaagagagaaagacgccaatgtagttgtggttgactggctccccctggcccaccagctttacacggatgcggtcaataataccagggtggtgggacacagcattgccaggatgctcgactggctgcaggtactgggggatgagagggagtctcctgtcaccagcaggatctcaaacccaatcttcttaagaaatgcaggtcatgcatctgttgccatgaacttctggagtctgataaaaatctttgagattaaaagttttattgaatta

SEQ ID NO: 72546 - DNA, 807 bp, Homo sapiens
ttccacagtatatattattatataataaaatgcttagaatatacacacagtaactaaacactacttataaaatatggctctagatatgtttgataaatatttccttcatgaaaacatggaggaattaattagcagtatctctctgcagcctttagccctcgagaatcatgtagaaaagagggagctgtcttctcttttagcagaacatctgtcagagatggtttcccctgacttagacaattgtgtttttttcccttcagaatgattgagtctcagaattgttctttaatcctcagtatttccattaagaagagcttctatcaagtgcttcaaaagtacccaatgtgaaggagtaataatgactccctgctggtgagcgaagtgtggaggacacaggtccctcagccgtccactggatgctgcactgtttggcctgagccaacatgggcagaaatacaggcggcagcataagcagatgccaagaacctgtcttgcttctactgttttcattgggttactatatctcctttgtagtccaacctgcaaattactttgagaaggggagatacacccctggaccaatctaggactatatttgttcccttgctaaagtaggaaaaaaaatacagaacctttaaatattgaactcaagggcaactaatttaaattcctttcctttcatgttgaaagtcttttgactgggttattctgaagccatagcaattaggttacagtttacttctctgttactttaccatctttaaatttggcaccttcaaaaggttgttctgtgcgtttaaaaaaaaa

SEQ ID NO: 72547 - DNA, 372 bp, Homo sapiens
caggcactgggttacactgggccttgtacctccagcacctcaaaaggagccaggaacctcataaggacctagaaatgcccaccaccatcctaatctgtaaaatggatcagccccttcaggcctagaggggtggggtagggggctgggctaggcaggaagaggggacttagagggtgtcactgattcgtgcagcccctcccaccatctgaccaactctcaagggcatggagtcacttattcattcaacaaacatcaggtcagacatggtggctcacacctgtaatccgaccatgctgggaagccaaggcaagaggatgacttgagctcaggagtttgagatcagcctgggcaacacagggaaaccctacctct

SEQ ID NO: 72548 - DNA, 537 bp, Homo sapiens
tgttacaaatggacttaaaaaaaatcagtgacagtgtgacatagtgaaaagaacagtgagttgaatgtaagaagacccacatgttaagtcttattttgctctattactagttgtgtagtcttcaataatttacttgttccttttggtgatgaacattgaattcattcctactcttttttttctgatacttacagtactattaaaatagttagattaattaagatagaaaggaactgtagcatctgaagatttgagaatttttcccaaattaaatacagagtaatcaatgaaagactttagagcattaaactgttacattaggacaaattctctgaaggaagtggaatggaaatacaagcttaaggaggaagatgcagtgtaaaatttccaattgttagaggtttgcccattaattaattaattatttttgagctggagtcttcctctgtcacccaggctggagcacagttgcagtgagctgagatcgtgccattgcactccagcctgagtgacagagcaagactgtctcaaaaagac

SEQ ID NO: 72549 - DNA, 280 bp, Homo sapiens
gatagcaggagctgagcagtgtcttgtaaccctcttgagttcatgctcatgattgcagctccaagcatcacttcttcacctcagcatcataaggaggaagaaaggatagaaaagaggtcattcctctgacaacactcttattttgggggatagaagatctctactctaaaacccccagtggacttctctttatatcccattggccagaagtggggcacgtgtccactccaagaccaattattggcaagaagcgacggagttaacatgagtggtttacaac

SEQ ID NO: 72550 - DNA, 389 bp, Homo sapiens
gaaaataaaactaaaaaaaaagtaaaagatatgattaattcagtaaaaatattaacagtaaaactactacacattatattaatataaataacatactttaaatgtaaaccactatatttcccaaaacaatcaaagaaataaagccatctaatgagaagaatgccactgttttacattttcataaatttatggcctctgtctgacttaatagaagatgactggattctcaaatctgcttctgcatttaatctgttgtaatatgttagtttggttaaaatatacaaagaaaatctggctttacacagacagagaaagtatctggcattttcagataattttgggatattctttaggcgctacatgcaaaacttgacaagtagtagtttctt

SEQ ID NO: 72551 - DNA, 363 bp, Homo sapiens
gtcttggtacaattattagttcattgtgtgtctggaagtatttgaagtatatagggtatgccccccactaaagcataatttaacttaatcaattgagatgctcatcaaatttcaagaccaatctttattcagtagactaatttgcattgcataattcaaagtaatcagggccagttgaaatttagaagcttttaaaagagaataatatttaataagaacaaataaaagtttaggccctcagggaagaaacataaaccattactcagtgtgaagaggacaagctcagctagaggtttctggtaaggggggtaaacataaatttgtaacataatgcagtgggaatctcacctctttatagtggct

SEQ ID NO: 72552 - DNA, 465 bp, Homo sapiens
caaagattaagccatgcatgtctaagtacgcacagccaagaaaagcctgatatttacatttgtactggcctccaaaggatgtgcaaaactctgagaggagagcgatgcttggattaaaatgattttatttttaatagactttttggtgcagtgttagacttacagaaagttaagcagaaagtacagagttgccttatgttcccattctcccactattttcttctactatcagaatcttgcgctagtgtggtacatttgttacgattgatgaaccaatattactacattattattaaccaacgtccatggtttacattaggattcactctttggattgcacattctaaggatttttaacagatatgtagagatatttatccaccattaccatattatatagaataggtttactacccggaaaattccctgtgctccttctatttctcccttcctcctcccaaatcc

SEQ ID NO: 72553 - DNA, 362 bp, Homo sapiens
gaggttgcagtgagctgagatcctgccactgcactccagcctgggcgaaacagtgagattccatgtcaataaataaataaataaataataaaattagcccctacacctcccactgtttgttattctttatctcataatcttattactttactatacctatcactatctgaaattgtcttatttttatacttatttacttgcttgttatttatttccttacaaatagaatgaaagctccatgagagtaaagaccttgtttgtcttgtttaccactgtgtctttgtcttatggtaaacagtactggtacatagtaggttctcaataattatatattggatgaactaataaactgaataaatcat

SEQ ID NO: 72554 - DNA, 517 bp, Homo sapiens
agatgcagtttttgcatttgtcgcccaggctggagtgcaatggcaccatctcagctcactgcgacctctgcctcttggtttcgagcaattctcctgcctcagcctcccgagtagccgggattacaggcacccaccaccatgcctggctactttttttttatttttagtagagacggggtttcacctcaggtgatccacctgcctcagccttccaaagtgttgggattacagccatgagccactgcgcccagctggggaagcgacttttgaagagtaaattacttattctgtataagttcagtacagaatcccaggtctgtagctcccaattaagatagatcattttttacatgaaggtcacccctctacaggactcatctctttggtgccctctatctttgagaatctaggtctcttatattactcagaacacactacccatatctatccttccatgcgcattgttccatctcaggccctaatctcctccttaagccttcaatcccatcctctatct

SEQ ID NO: 72555 - DNA, 323 bp, Homo sapiens
gatcttgaactcctgggctccagtgatctgcctgcctcagcctcccaaaatgctgggattataggtgtgagccactgcgccttgctgatggcatcttagaaataaagaaatactaagtaaactcatactttattttactttttacttttctctgtgaaaatgttaacaagtcattcaatatctgtggtactcaatttatttgtaaaatggggatgatgatagcccagttaataagctaccttagcaatttcttaggcttggtctgaagctatatgaaataacttttaaagagcaaagcactcttaaaattcagattttattat

SEQ ID NO: 72556 - DNA, 272 bp, Homo sapiens
tattaaaatccataataaactttcccaaatataggccggtgcctaccttcaggagtgcattctgtcatttgggactaaatattctatgttccgtgggggaaagatatttttaaaaacactgacctatacactaggagttctcactccagcaacaataggtgtgtgaggataaagccttctaaaattgcgcacacatctggggaggaagcgcgcgtgagcagttttctgggtgaagcattcataatgtttctcagcttctcaaaggaatgtgt

SEQ ID NO: 72557 - DNA, 1143 bp, Homo sapiens
aattgagttttaggaaactcagactactttttctcaatgtagcttttccttcatagataggcaattctggttcaaccaggaattgtgatgacatcataaacacgtaaactcttagcaatttatttattttaaaatattctcttagagtgctttttacttactatctgttccaaaagaaaccccctcaaaggagaatagagttcactgctctttgggacaagattacctttatatccagcagttatcaaagttggtttagattatggcctcaagcaaattttactaaaatgtgaaaatatgccaccttccaagtcagaaataaactttggagtatgttcatttaaagagtttttacatatttataattgaatttccacaattagaataaacagttgcatgtctttttgtactttgttaaataatgaaatggaagtaatgacaatataacttcaggattgttatttctctacaaggtaaagcactttaagagatcaaattatacataataaaatattaagctttttaaatgataaactctaatactggcatgtattgcaatgaacgagttcacacactcatatcttgtggattataaaatgacattattcttttggaaagtattatgtataagaaccataagaagttcatactctttgattcattaattctagtcttaggaaacgatgcttgaaaaacagtttttaaaaagtgtattcagtttagctaatgtttgtcacgtacctcatacgaattagacactgtggtgggagctgcagattaaaaaaatgaaaggtttaatgttattagaagaaagatgtttattgcagtcttattaaagaggaaaagaaaaatggaacaaccttgatgttcaacaatttgtgaatgctgttaaattaatattttggcatattatgcagctttaaaagtgataattgtacatactttaggaaaatgtagagaaaatttaagtaaaaaaaattaattacatcagcactagaattatgtatttaaaaagtcttatagaccagggacagtggctcatgcctataatcccagcactttgggaggttgaggcgggagaattgcttgagtccaggagttcaagaccagccagggcagcatagctataccctcatccctacc

SEQ ID NO: 72558 - DNA, 319 bp, Homo sapiens
ggtaaagagctttgtcttactttgatgaaaggtttttgaagtgtctgttgattagtgtttgctactattatcagaatttacaaagtttgttttcccttttggaaaatatattaaggctaaaaaaagtgtaagttaattacatagccattgaggggttaaacgtgcattgtgattgagactgaatagtgttttcccaacctttccctttttacaatggagaaaacaggtaattaaattttgtacagtaaaatgtcaattgaacatttattgccaaataacacctcaggcatagcagggcattatgaaaagatatcaggag

SEQ ID NO: 72559 - DNA, 1010 bp, Homo sapiens
cgaaaggatcatacagtactataggcctgccacatgggcacaagacgactcatagggataccatacccccatctacatgctcaactggatcatacggttacaggccatcttagaaataatcactagtgaaactggcagagctttaactcttttagcccagcaggaaacccaaatgagaaatgccatctatcagaatagattggccttagactatttgctggcagctgaaggaggagtctgtgaaaaattcaacttgaccaagtgctgtctgcaaagagatgatcaaggacaagtagtcaaaaatatagttagagacatgacaaagctggcacatgtacccatgcaggtttggcataggtttgatcctggatccctgtttggaaaatggcttccagctctaggaggatttaaaactcttataataggaatgataatggtgttaggaacctgcatgttactcccctgtatgttacccatatttctccagttactaagaagcttcgttatcaccttagttcatcaaaagacctcagcacaagtatactacatgaatcactattgatctgtctcacaggaagatctagatagtgaggatgataatgagaactcccactagtgagtgaggttctcaaaggggggaatgaggagagaggccatttctcctactgtcccctatctccaaagaaaaggaggaagtaaaaactgaaaaaataacagactgatcagcaccactggccaggcccgtaggttaaagattaacccacaccctaaccgcttgtgctgtctatagatcacagacaatggtatggagaaacacttgccttgctcaccacccccacctagccatgtaccccatgcttgttcaatctatcacgaccctttcatgtggaccccttagagctgtaagcccttaaaagggccaagaactctttctctgggactcagttcttgagacgcaagcctgccgatgctcctggccgaataaagcctcttccttctttaacccagtg

SEQ ID NO: 72560 - DNA, 329 bp, Homo sapiens
gattgatcagttgactaaggtgataaccctgctagcatttccattgtaaaagtacattttctgttttttggttagcacataatctgtgatgatacttggctgtgtgcaaatatcctttttttcccccaacaaccattgagctaatgtttttggcatcccttgcttactctttcctgaattcattatttcatgggagttgcaaaatggtgattttcctaattctaccattcctttcacatttatttgctggtattaaagaaaagcttccctcattcaccttagatgaactatataatatctcctatagaggcagggcaaatgccctttaa

SEQ ID NO: 72561 - DNA, 414 bp, Homo sapiens
gccatctgaagaaatgtatagtagtatcccattgtcattttaatttgcattatcctgatgactgatgatgttaagcatttttatgtgcatattaaccatccacatttttttctttgttaaagtgtctgttcaaatctttagcccattttatactgagttgtttgttttcttattactgggttttgagaattctttatatttctggatacaagtattttatcagatgtaggattagaaaatatttctcctgattctagggcttggctttctattgtcttaagtgtgtcttccaaaggccaggaatttttaattttgatgtttaatttattagttttttttttttcttttacaaatcaaggttttggtgtcatatttaagaaatctttgaacaacacacactgtggcctgttggca

SEQ ID NO: 72562 - DNA, 817 bp, Homo sapiens
ttggaaatacagtgaagtctggcacaatacaaaaacgtacacctgtatttaattttacactgatctttttaaagcatagggtttaaggtacagatttctctgcaaacacagtttagctgcatttcacacattttgatatgctgaatttgccacatagtttataatttttctaatttctcacaaatttcaaaaagtgttttgatcaaaggttgaaatcccagagggtttaggataaatttttaaaaaatacttgacattgaggattcccttgaagtaaatgatactagaagaaataaaagaactgacacctaaaaaaaaaagaggtaatgaaataaaagttgaaagtgagacttgggaaaaaataagaagatggatctatagatttattaatggaagttgggatatagatgggaatttagctcatatctattgttaaagaaaaatcatcaaaattttatggagcaaaaggactataatatcattgccaattgtactctaatttttatatgaacacagcttttgttgttgttgtttttgaaacagcattttgcttttttgcccaggctggagtgcagtggcatgatcacggttcactgcaaccttgaactcctgagctcaagcagtcctcccaccttagcctcctaagaagcctggactacaagcagaagctacctcgcccagctaattttttaatttttagtagagacaaggtctcgctgtgttgaataggctgatcttgaatttctgggttcaagcaatcctgccttggcctcccacaatgctgggattacaggcgtgagccatcctgccaagtcca

SEQ ID NO: 72563 - DNA, 417 bp, Homo sapiens
aacaacacccatttattagcccacagttctgtaggtcagaagtctggatcagcttggctaggttttctgctcagagtctcacaagctgttggccaaaatgggctcttacctggaggctcaggggaagaatagccttccatgctcattcacgttgacagaatccagttccttgcaggtgtatgtctaagttccttgctggctgtcaggtggagacactcactgctcccagaagccatctgtatttcttttcatgtgtgcatgtcaaaatcgcctagtgcttaaaatccctgacttccccttgtggctgctcttttgctaccacccagagaaagttctctgcttttaaagactcctgtgattagattacctcacccagataatctcttctcctcaggtcagctatgccatataacatga

SEQ ID NO: 72564 - DNA, 436 bp, Homo sapiens
tattcattttttaaaacttaagttcaagtgtcaccaaaggggcaccttgaccgacaccactcaaccctcatccaagtggatactaactcctctttctcttttttcccaaggcatgaagggcccttctctgctggcattcacactgtactgtgctgaattattgaccagattttagctctttgtaagacaagcacctttcctcatttggctttctacttccagcactcggtgcaatgcttattacatgccaggcactgtcctaactgatgggggttaatgaatggtacaatctaccaagattcaacccaaagtcatcaacatttcttagatcctttcttctccaagttctgatatctaaacactaaattagtgattcataaaatgtttaaataatttgaataatttaaaaaatttaatcttaaataatttaatcttg

SEQ ID NO: 72565 - DNA, 915 bp, Homo sapiens
cacatttcttgcagcattattcaaggtacccaatttatggaagcaacataagtgcctattagcgaatggatcgatgagaaagatgtggtgtatatgtacacaatgaaatactgttcagcctttattaattgattgatcgagacagggtctcactctgtcactcaggctggagtgcagtggattgaccagggctcactgcagcctcaaactcccaggctcagatgatcctcccaccatagtctcccttgtagcttctgggagcacaggcacgcacacacccagccttttttgttgttgttgttgtagagatggggtctcactgtgtggcccaggctggtcttgaactcctgggctcaagcaatcctcctgccttggcctgacaaagtgctgagattaaaggcgtaaaacaacatgcccatgtccccaaagaaggaaattctgtcattttcaacaacgtggacaaacctgaaggacattgtgctaagtaaataagccagggacagaaagacaaacaccatctcacttatgtggaatctaaaacaattgaactcatagaagcagagagtagaatggtgtttaccagaggcggggggccgaggggaatggaggagatgatagtcagagggcatgaagtttctgttaggaggaatacatttttttgagatttattgcaaagcatggtgaccatagttgttaatactgtgtattttgcaattctgagggagcagatttcaaatgttctcaccataaaacataaaaatttgaggcaatggatactaattagcttgatttaatgtgtccacattgtatacgatatcataacatcagttttgtacccataaatatagtttgtcaatgtaaattttgaaaattttttttcatgaattgaagtaaacaagatcataatatacattg

SEQ ID NO: 72566 - DNA, 398 bp, Homo sapiens
tgaaattagttaatggtgatggttgcacaactctgtatatactaaaaaccattgaattgcacattctaaatgggtgaatttatttgttgtgactttaatctgaataatgctgttaaaaaagaacttttatattccatttcaataatcatccaacgtggtagatgtttgcattatattttcatatcatatgaatcagtagcattgggaaagagagaagaggacaagatccaaggcccaggctcaaaaaatgtttggagcttggtttttttcttgccaagtcattcctggtatcatctggatgaggggaacggctcctgtttattttccccaatcaatcagtaaacatagttagatttgtttgtgacagttttcctgccatgcttcagttcagaaactaa

SEQ ID NO: 72567 - DNA, 257 bp, Homo sapiens
caggattggcgaggctgagaagggtatctctgccctgcatcaatcagctatgggagtgtgtccttccttaagctgtgtaacactgggaaagttacttgacctctttttgcctctgtttaattacctgtgaaagggagatgatcatagtacctgcctctggaggaattgttgtgactgggtctttaagttccagttggtgtttaatactgtttggacctagaacatgtgtaatttggaaactccctctaggcacttct

SEQ ID NO: 72568 - DNA, 447 bp, Homo sapiens
ggttcccatgagccccttaagatctgaggagagtctggaagcggtggctcatgcctgtaatccaagcactttgggaggccgaggtgggtggatcagctgaggtcaggagtttgagactagccatggccaacatggtaaaaccctgtgtctactaaaaatacaaaaattagctgggcatggtggtggctgcctgtaatcccagctactctggaggctgaggcaggagaattgcttgaacctgggaggtggaggttacagtgagcagagatcgcgccactgcattccaacctgggggacaagagcaaaactccatctcaaaaaaaagaaaaaagaaaaatctgaggagagagtttaatgaggtgagctgcatgcttggattagaagatgccagaagtatgatggaatgcagcaacttggatggaaacgtccagtggtccgccccatggc

SEQ ID NO: 72569 - DNA, 299 bp, Homo sapiens
aatcctttgttgtgctaagacatgcaaacaactgacactgaataacataatttattatttgcatttgacatgtcacattaaaggctagatgggcacattgttgttgtttttttttaaatcagtcatctgattatattttcttgcttattgaaattaaaccgagctcataattaacatccaattaacactaccaggtgaagtactttagtgttgtctcttctctaagtaacagtgattttcttctgatggccttctacttcttggaaggtcagcaggtccccaattcagactcttgttcc

SEQ ID NO: 72570 - DNA, 2071 bp, Homo sapiens
aggcagcgagagacacgaggagcaaagcaagtgaaggcacagacgcacgggacaggagagcctgggcaagactggagagcccagacctgggatggcggattcgtgcaggaacctcacctacgtgcggggctcggtggggccggccaccagcaccctgatgttcgtggccggtgtggtgggcaacgggctggccctgggcatcctgagcgcacggcgaccggcgcgcccctcggccttcgcggtgctggtcaccggactggcggccaccgacctgctgggcaccagcttcctgagcccggccgtgttcgtggcctatgcgcgcaacagctccctgctgggcctggcccgaggcggccccgccctgtgcgatgccttcgccttcgccatgaccttcttcggcctggcgtccatgctcatcctctttgccatggccgtggagcgctgcctggcgctgagccacccctacctctacgcgcagctggacgggccccgctgcgcccgcctggcgctgccagccatctacgccttctgcgtcctcttctgcgcgctgcccctgctgggcctgggccaacaccagcagtactgccccggcagctggtgcttcctccgcatgcgctgggcccagccgggcggcgccgccttctcgctggcctacgccggcctggtggccctgctggtggctgccatcttcctctgcaacggctcggtcaccctcagcctctgccgcatgtaccgccagcagaagcgccaccagggctctctgggtccacggccgcgcaccggagaggacgaggtggaccacctgatcctgctggccctcatgacagtggtcatggccgtgtgctccctgcctctcacgatccgctgcttcacccaggctgtcgcccctgacagcagcagtgagatgggggacctccttgccttccgcttctacgccttcaaccccatcctggacccctgggtcttcatccttttccgcaaggctgtcttccagcgactcaagctctgggtctgctgcctgtgcctcgggcctgcccacggagactcgcagacacccctttcccagctcgcctccgggaggagggacccaagggccccctctgctcctgtgggaaaggaggggagctgcgtgcctttgtcggcttggggcgaggggcaggtggagcccttgcctcccacacagcagtccagcggcagcgccgtgggaacgtcgtccaaagcagaagccagcgtcgcctgctccctctgctgacatttcaagctgaccctgtgatctctgccctgtcttcgggcgacaggagccagaaaatcagggacatggctgatggctgcggatgctggaaccttggcccccaaactctggggccgatcagctgctgtttctcctgcggcagggcagtcgctgctggctctgggaagagagtgagggacagaggaaacgtttatcctggagtgcagaaagaatggttctctcaaaataaccagtggcctggccgacctgctctggccctggattccccatccatctcattgtctaaatatttagaaggcggagaagttcccagaggcttctgtacagtcaggtctgctctggtctgggtgctggctccaatctgcgtccacttaggaggcccaactgcccaccccaagtccccaggggatggccctccccctctaccaagccactccaagagccagcccctttctgctccacaaaaaccacagttattggaaaagctccctgccttcccttgccgctggtcccccaccaggcttgggagccctggcatcccaaaggggcaacgggaggaaggggaggctgctgcattgtgggtgatgacgtaggacatgtgcttggtacaaaaagggcctgagacattccacctagcttgactggctgcaagatgagaactgggggggtgcaggtggtggggagacagatggagaagctggcagatgaagggtgggggctgcggatcccagggactgccccagaacacaaacctaagtcctgtgcctgtccccagggtcctgaataaataaaagcctccttgcagagcctgacctcatg

SEQ ID NO: 72571 - DNA, 745 bp, Homo sapiens
caacaccagcagtactgccccggcagctggtgcttcctccgcatgcgctgggcccagccgggcggcgccgccttctcgctggcctacgccggcctggtggccctgctggtggctgccatcttcctctgcaacggctcggtcaccctcagcctctgccgcatgtaccgccagcagaagcgccaccagggctctctgggtccacggccgcgcaccggagaggacgaggtggaccacctgatcctgctggccctcatgacagtggtcatggccgtgtgctccctgcctctcacggtgagtcccctccggagctgggaggagtggggagaggaggagggcagctctgtgggttgtgcccatgtcacagatggggagactgaggctcaaaagaggtgagacatcgtgggcatggtggctcacgcctgtaatcccagcatgtagaaaggccgaggcaggaccggatgcggtggctcacacctgtaatcccagcactttgggaggccgaggccggcggatcatttgaggtcaggagttcgagaccagtctggccaacatgatgaaaccctgtctctactaaaaatacaacaaataaataaataaaaagtagccggacgtagtggcacatgcctgaagtcccagctacttgggaggctgagccaggagaatcgcttgaaccccggaggcggaggttgcagtgagctgagatcgtgccactgcactatagcctgggtgacagagtgagaccccg

SEQ ID NO: 72572 - DNA, 288 bp, Homo sapiens
agagaattggtacttgtcatcattctgccatctgcaaaagctggattcccctgcccctgcttttctttattaaatataattttattttttgctttggttttagactgcttttagacagagaatatccatatatccctcccctagctttcccttctgttaacatcttaatacagttatccagtagtccgtggtacatgttatccaatcatatttatgtagttatcaaaaccaggaaacattggtttgatgctattaactaaaaatcttactcagattttaccagttttc

SEQ ID NO: 72573 - DNA, 425 bp, Homo sapiens
ccacacatggtccctttttggcagcacctctgtctggctggagcaggccctgctctgtctgctttgtagaggtcagagtcttctgtttcatggcacagtggcatcatgggctcaagtaactttggcagcttcaattccaaagacttggcaaaaagaaagcagaagagagaggagaaacctctttttatttttcttgtcaccattctcctgacctccatcaactagaccccgtttccactatcccagagaaagggtggccacagctaaactgcatggagaaaccaaagaatttaaatattggaattttcaaaagtgtagttgtgggggttcgaggaacatttaaagattattggattctttgtagttttgctgtatgctctaattttaaacttaactcctattacagtgttatctgattttcttat

SEQ ID NO: 72574 - DNA, 1629 bp, Homo sapiens
gatattacccagcatgttgtcatagctgaaggttttctctctagtgcatagtgatgggtgatatctattgaagctgggagggtcacagtatcagtgagtggtcccccaatttcttcttgagcatcgatgaattagcagtggtgtaatattgtggatctgacttcatgtgtcactaagaacaggagatccaagactgctcttctggggatgagacttggaagaaacctccatcctcagggatttgaagaaggttatactggaacctgtgtgaaggctgagacaaccgtcccttttgtggtggcctgaggggattttcttaatcccaatgttgccctgaaatttatgtccaggattcaaaaagtttaggactgctaagagacattactgccgggagtgttgagtgaagggaccaggtggagatgatgcctcaggagcagtacactcaccaccggagcaccatgcctggctctgtggggccacaggtatacaaggtggggatttatggctggcggaaacgatgcctgtatttctttgtcctgctcctcatgattttaatactggtgaacttggccatgaccatctggattctcaaagtcatgaacttcacaattgatggaatgggaaacctgaggatcacagaaaaaggtctaaagctagaaggagactctgaattcttacaacctctctacgccaaagaaatccagtcccgaccaggtaatgccctgtacttcaagtctgccagaaatgttacagtgaacattctcaatgaccagactaaagtgctaactcagcttataacaggtccaaaagccgtagaagcttatggtaaaaaatttgaggtaaaaactgtttctggaaaattgctcttctctgcagacaataatgaagtggtagtaggagctgaaagattacgagttttaggagcggagggcacagtgttccctaaatctatagaaacacctaatgtcagggcagaccccttcaaagaactaaggttggagtccccaacccggtctctagtgatggaggccccaaaaggagtggaaatcaatgcagaagctggcaatatggaagccacctgcaggacagagctgagactggaatccaaagatggagagattaagttagatgctgcgaaaatcaggctacctagactgcctcatggatcctacacgcctacaggaacgaggcagaaggtcttcgagatctgcgtctgcgccaatgggagattattcctgtctcaggcaggagctgggtccacttgtcagataaacacaagtgtctgcctctgaaagactatccatagtggacattgttggcagcataaaggccttttttggctttagacactggctgccagctatttttactagaacacagaaagcctatcaaagaccttgtgtgtatgtgtacgtgtgtgtgcgtgcttgagtgtgttcgcgtgtgtgggtggatataaatatatataaatatatataaataaatatatatatcctctgtataaaatgaggtttcagtacaaaaggaaccatgggtgaccctgcgatatccactgtcattttccatcccatccccaccacctgagtgacagaaatctaaacacacatccgtcccaacattccccagacc

SEQ ID NO: 72575 - DNA, 1476 bp, Homo sapiens
gatattacccagcatgttgtcatagctgaaggttttctctctagtgcatagtgatgggtgatatctattgaagctgggagggtcacagtatcagtgagtggtcccccaatttcttcttgagcatcgatgaattagcagtggtgtaatattgtggatctgacttcatgtgtcactaagaacaggagatccaagactgctcttctggggatgagacttggaagaaacctccatcctcagggatttgaagaaggttatactggaacctgtgtgaaggctgagacaaccgtcccttttgtggtggcctgaggggattttcttaatcccaatgttgccctgaaatttatgtccaggattcaaaaagtttaggactgctaagagacattactgccgggagtgttgagtgaagggaccaggtggagatgatgcctcaggagcagtacactcaccaccggagcaccatgcctggctctgtggggccacaggtatacaaggtggggatttatggctggcggaaacgatgcctgtatttctttgtcctgctcctcatgattttaatactggtgaacttggccatgaccatctggattctcaaagtcatgaacttcacaattgatggaatgggaaacctgaggatcacagaaaaaggtctaaagctagaaggagactctgaattcttacaacctctctacgccaaagaaatccagtcccgaccaggtaatgccctgtacttcaagtctgccagaaatgttacagtgaacattctcaatgaccagactaaagtgctaactcagcttataacaggtccaaaagccgtagaagcttatggtaaaaaatttgaggtaaaaactgtttctggaaaattgctcttctctgcagacaataatgaagtggtagtaggagctgaaagattacgagttttaggagcggagggcacagtgttccctaaatctatagaaacacctaatgtcagggcagaccccttcaaagaactaaggttggagtccccaacccggtctctagtgatggaggccccaaaaggagtggaaatcaatgcagaagctggcaatatggaagccacctgcaggacagagctgagactggaatccaaagatggagaggtgagggatgagaaggacagaagttcaaagagctacagcttcaacaggccaacccttcccataactggttgacctcggagttggatcctacagtgtatcaacaaaaggagccaagcaggttttatttctgaaacaattaattgagcagcatgattataagccaaacccacaatccatcaaagtgatgatttcttatttgtaaaatgcagagataatggcatgtattccaagtacagaattatatgaccatgaaaatgaatgctattttcaaattctctcttgtcaccttaaaataagattttgttagccaacataattaagctgtatatattatacacatctggctcaagatgaaaaa

SEQ ID NO: 72576 - DNA, 1553 bp, Homo sapiens
ttgatagctggagacagcccagtagctgtgagtcggtctgacaaagccatattgaagtacggagtacggtttcaaagcagtcagaaaaagaacgggaatgctgttcaggaaattcttcaggcatgggcagggacttggctgcagttctgcagttggaaaatctgactggggcagcttctgagcgcaggctgggcctgcacacactcagcgggccgagtggccacctccttcagagctgctcagcacgccctgggatcgcgggcggttttcatcggccggtttgtgaaacggacaagagagagacattactgccgggagtgttgagtgaagggaccaggtggagatgatgcctcaggagcagtacactcaccaccggagcaccatgcctggctctgtggggccacaggtatacaaggtggggatttatggctggcggaaacgatgcctgtatttctttgtcctgctcctcatgattttaatactggtgaacttggccatgaccatctggattctcaaagtcatgaacttcacaattgatggaatgggaaacctgaggatcacagaaaaaggtctaaagctagaaggagactctgaattcttacaacctctctacgccaaagaaatccagtcccgaccaggtaatgccctgtacttcaagtctgccagaaatgttacagtgaacattctcaatgaccagactaaagtgctaactcagcttataacaggtccaaaagccgtagaagcttatggtaaaaaatttgaggtaaaaactgtttctggaaaattgctcttctctgcagacaataatgaagtggtagtaggagctgaaagattacgagttttaggagcggagggcacagtgttccctaaatctatagaaacacctaatgtcagggcagaccccttcaaagaactaaggttggagtccccaacccggtctctagtgatggaggccccaaaaggagtggaaatcaatgcagaagctggcaatatggaagccacctgcaggacagagctgagactggaatccaaagatggagagattaagttagatgctgcgaaaatcaggctacctagactgcctcatggatcctacacgcctacaggaacgaggcagaaggtcttcgagatctgcgtctgcgccaatgggagattattcctgtctcaggcaggagctgggtccacttgtcagataaacacaagtgtctgcctctgaaagactatccatagtggacattgttggcagcataaaggccttttttggctttagacactggctgccagctatttttactagaacacagaaagcctatcaaagaccttgtgtgtatgtgtacgtgtgtgtgcgtgcttgagtgtgttcgcgtgtgtgggtggatataaatatatataaatatatataaataaatatatatatcctctgtataaaatgaggtttcagtacaaaaggaaccatgggtgaccctgcgatatccactgtcattttccatcccatccccaccacctgagtgacagaaatctaaacacacatccgtcccaacattccccagacc

SEQ ID NO: 72577 - DNA, 1513 bp, Homo sapiens
ttgatagctggagacagcccagtagctgtgagtcggtctgacaaagccatattgaagtacggagtacggtttcaaagcagtcagaaaaagaacgggaatgctgttcaggaaattcttcaggcatgggcagggacttggctgcagttctgcagttggaaaatctgactggggcagcttctgagcgcaggctgggcctgcacacactcagcgggccgagtggccacctccttcagagctgctcagcacgccctgggatcgcgggcggttttcatcggccggtttgtgaaacggacaagagagagacattactgccgggagtgttgagtgaagggaccaggtggagatgatgcctcaggagcagtacactcaccaccggagcaccatgcctggctctgtggggccacaggtatacaaggtggggatttatggctggcggaaacgatgcctgtatttctttgtcctgctcctcatgattttaatactggtgaacttggccatgaccatctggattctcaaagtcatgaacttcacaattagcatccatctgcttctgagatttaactggctattcagatgttgtggaatgagctgagaggagccagaaccaggagccaggtgactcagattccagtacccactttgctgctggatggaatgggaaacctgaggatcacagaaaaaggtctaaagctagaaggagactctgaattcttacaacctctctacgccaaagaaatccagtcccgaccaggtaatgccctgtacttcaagtctgccagaaatgttacagtgaacattctcaatgaccagactaaagtgctaactcagcttataacaggtccaaaagccgtagaagcttatggtaaaaaatttgaggtaaaaactgtttctggaaaattgctcttctctgcagacaataatgaagtggtagtaggagctgaaagattacgagttttaggagcggagggcacagtgttccctaaatctatagaaacacctaatgtcagggcagaccccttcaaagaactaaggttggagtccccaacccggtctctagtgatggaggccccaaaaggagtggaaatcaatgcagaagctggcaatatggaagccacctgcaggacagagctgagactggaatccaaagatggagaggtgagggatgagaaggacagaagttcaaagagctacagcttcaacaggccaacccttcccataactggttgacctcggagttggatcctacagtgtatcaacaaaaggagccaagcaggttttatttctgaaacaattaattgagcagcatgattataagccaaacccacaatccatcaaagtgatgatttcttatttgtaaaatgcagagataatggcatgtattccaagtacagaattatatgaccatgaaaatgaatgctattttcaaattctctcttgtcaccttaaaataagattttgttagccaacataattaagctgtatatattatacacatctggctcaagatgaaaaa

SEQ ID NO: 72578 - DNA, 770 bp, Homo sapiens
gcacccttctccaacaccaccacttcttggaaattacaatccttgtgtcatctgacctctgcatgcagcccctgatcctgctgatgactcaccaagatctcctttcccttggcttccaggaaccacatactactagatattttcttctttcctctctgactagtccttagtagcctctgaagccaccattccctgttggtgacctcaccccctactcccacagctataattaaaacctaactgcttctagcttccaaatctctaagtccaaacataactcgagtactagacttttacacaccactgtccacaatatatctgcatctaaatatcccactaccactcaaattccaggtgcctaaaatttgagttgagtgaatgcttacatctaattactaggtttccaactacagaggaaatgcagtcccagcatcccagcagcttttgcagtatctctaaacactagtacactagctaacattttctgacgcttttttgagaataggaacttgtagagtcaccatgcctaggtgtgctagttggagggtaaggttttcacctcaggaaagggaagaactggaacagggagtaaaaggaggcctccaggtttagccactctgttaacacttacaggtaattcacataggacaagataaatgtcattatttataaactaactttaaaccacccaaaactatcaccataaaaaagaaatgaaaactgaatgtaaaatattttaaatttcaaataaatactacctttaaaacatt

SEQ ID NO: 72579 - DNA, 394 bp, Homo sapiens
ggcacgagggatcacgtcactgtactccagcctgggcaacaagagcgagactctgtctgaagaaaaaaaaaaaaaaagatgggctggtgcagtcgtcacgcctgtaatccaaggtgctgaaattacaggcatgagccaccaggcctgtaaatgtttcttatcagatttaaagagtgtgttctatcagtaattctaaaagggaggagggtatgttgaggcatgtccggctcccccttcccatcacggcctgaactagttcttcaggttcactttggaaagcccttggcctagaggaggggtccactcagatggctggcaggcttagaattttatttttggtttatagtcactaaagttggtatacaggcgcccactactaaattccactggcttc

SEQ ID NO: 72580 - DNA, 830 bp, Homo sapiens
aagccacaggctccctggctggcgtcagctaaagtggctgttgggtgtccgcaggcttctgcctggccgccgccgcctataagctaccaggaggagctttacgacttcccgtcctgcgggaagtggcgggcacgatcgcaaggtagcgcagaagcttctcaatggccagcgccagctgcagccccggcggcgcactcgcctcacctgagcctgggaggaaaattcttccaaggatgatctcccactcagagctgaggaagcttttctactcagcagatgctgtgtgttttgatgttgacagcacggtcatcagtgaagaaggaatcggatgctttcattggatttggaggaaatgtgatcaggcaacaagtcaaggataacgccaaatggtatatcactgattttgtagagctgctgggagaaccggaagaataacatccattgtcatacagctccaaacaacttcagatgaatttttacaagttacacagattgatactgtttgcttacaattgcctattacaacttgctatagaaagttggtacagatgatctgcactgtcaagtaaactacagttaggaatcctcaaagattggtttgtttgtttttaactgtagttccagtattatatgatcactatcgatttcctggagagttttgtaatctgaattctttatgtatattcctagctatatttcatacaaagtgttttaagagtggagagtcaattaaacacctttactcttaggaatatagattcggcagccttcagtgaatattggtttttttccctttggtatgtcaataaaagtttatccatgtgtcagaa

SEQ ID NO: 72581 - DNA, 857 bp, Homo sapiens
aagccacaggctccctggctggcgtcagctaaagtggctgttgggtgtccgcaggcttctgcctggccgccgccgcctataagctaccaggaggagctttacgacttcccgtcctgcgggaagtggcgggcacgatcgcaaggtagcgcagaagcttctcaatggccagcgccagctgcagccccggcggcgcactcgcctcacctgagcctgggaggaaaattcttccaaggatgatctcccactcagagctgaggaagcttttctactcagcagatgctgtgtgttttgatgttgacagcacggtcatcagtgaagaaggaatcggatgctttcattggatttggaggaaatgtgatcaggcaacaagtcaaggataacgccaaatggtatatcactgattttgtagagctgctgggagaaccggaagaataacatccattgtcatacagctccaaacaacttcagatgaatttttacaagttacacagattgatactgtttgcttacaattgcctattacaacttgctatagaaagttggtacagatgatctgcactgtcaagtaaactacagttaggaatcctcaaagattggtttgtttgtttttaactgtagttccagtattatatgatcactatcgatttcctggagagttttgtaatctgaattctttatgtatattcctagctatatttcatacaaagtgttttaagagtggagagtcaattaaacacctttactcttaggaatatagattcggcagccttcagtgaatattggtttttttccctttggtatgtcaataaaagtttatccatgtgtcagaaaaaacacaagagggaacaacacaaaag

SEQ ID NO: 72582 - DNA, 700 bp, Homo sapiens
gcaagagtattcaggatagattattagtcgtatgaacataaaaaaaaaaaaatttaaagaggcgtttcgccgtgttggccaggatggtctcgatcttctgacctagtgatccgcccgccttggcctcccaaagtgctgggattacaggggtgagctgccgcacccggccttcacctggtatttcatcacaatcaacagatgctttcattggatttggaggaaatgtgatcaggcaacaagtcaaggataacgccaaatggtatatcactgattttgtagagctgctgggagaaccggaagaataacatccattgtcatacagctccaaacaacttcagatgaatttttacaagttacacagattgatactgtttgcttacaattgcctattacaacttgctatagaaagttggtacagatgatctgcactgtcaagtaaactacagttaggaatcctcaaagattggtttgtttgtttttaactgtagttccagtattatatgatcactatcgatttcctggagagttttgtaatctgaattctttatgtatattcctagctatatttcatacaaagtgttttaagagtggagagtcaattaaacacctttactcttaggaatatagattcggcagccttcagtgaatattggtttttttccctttggtatgtcaataaaagtttatccatgtgtcagaa

SEQ ID NO: 72583 - DNA, 863 bp, Homo sapiens
  misc_feature (38)..(38): n is a, c, g, or t
tctctccaacatagcacttccaaaacaaataaaaatanacactaccagaggcgtttcgccgtgttggccaggatggtctcgatcttctgacctagtgatccgcccgccttggcctcccaaagtgctgggattacaggggtgagctgccgcacccggccttcacctggtatttcatcacaatcaacagatgctttcattggatttggaggaaatgtgatcaggcaacaagtcaaggataacgccaaatggtatatcactgattttgtagagctgctgggagaaccggaagaataacatccattgtcatacagctccaaacaacttcagatgaatttttacaagttacacagattgatactgtttgcttacaattgcctattacaacttgctatagaaagttggtacagatgatctgcactgtcaagtaaactacagttaggaatcctcaaagattggtttgtttgtttttaactgtagttccagtattatatgatcactatcgatttcctggagagttttgtaatctgaattctttatgtatattcctagctatatttcatacaaagtgttttaagagtggagagtcaattaaacacctttactcttaggaatatagattcggcagccttcagtgaatattggtttttttccctttggtatgtcaataaaagtttatccatgtgtcagaaaaaaaaaaaaatcggccctcctggccctcacccgcgccaccttctcccgccctttcccctttattggagggcaattcaataaccctcccccactgactccttgcgtcattttattcggacttcgtaagcgttattatttatttaagggcggtttccggtttccccaatacctgg

SEQ ID NO: 72584 - DNA, 705 bp, Homo sapiens
ctaaggctaggtacgaggctgggtggttgcttctcaatggccagcgccagctgcagccccggcggcgcactcgcctcacctgagcctgggaggaaaattcttccaaggatgatctcccactcagagctgaggaagcttttctactcagcagatgctgtgtgttttgatgttgacagcacggtcatcagtgaagaaggaatcggatgctttcattggatttggaggaaatgtgatcaggcaacaagtcaaggataacgccaaatggtatatcactgattttgtagagctgctgggagaaccggaagaataacatccattgtcatacagctccaaacaacttcagatgaatttttacaagttacacagattgatactgtttgcttacaattgcctattacaacttgctatagaaagttggtacagatgatctgcactgtcaagtaaactacagttaggaatcctcaaagattggtttgtttgtttttaactgtagttccagtattatatgatcactatcgatttcctggagagttttgtaatctgaattctttatgtatattcctagctatatttcatacaaagtgttttaagagtggagagtcaattaaacacctttactcttaggaatatagattcggcagccttcagtgaatattggtttttttccctttggtatgtcaataaaagtttatccatgtgtcagaa

SEQ ID NO: 72585 - DNA, 1004 bp, Homo sapiens
aagccacaggctccctggctggcgtcagctaaagtggctgttgggtgtccgcaggcttctgcctggccgccgccgcctataagctaccaggaggagctttacgacttcccgtcctgcgggaagtggcgggcacgatcgcaaggtagcgcagaagcttctcaatggccagcgccagctgcagccccggcggcgcactcgcctcacctgagcctgggaggaaaattcttccaaggatgatctcccactcagagctgaggaagcttttctactcagcagatgctgtgtgttttgatgttgacagcacggtcatcagtgaagaaggaatcggatgctttcattggatttggaggaaatgtgatcaggcaacaagtcaaggataacgccaaatggtatatcactgattttgtagagctgctgggagaaccggaagaataacatccattgtcatacagctccaaacaacttcagatgaatttttacaagttacacagattgatactgtttgcttacaattgcctattacaacttgctatagaaagttggtacagatgatctgcactgtcaagtaaactacagttaggaatcctcaaagattggtttgtttgtttttaactgtagttccagtattatatgatcactatcgatttcctggagagttttgtaatctgaattctttatgtatattcctagctatatttcatacaaagtgttttaagagtggagagtcaattaaacacctttactcttaggaatatagattcggcagccttcagtgaatattggtttttttccctttggtatgtcaataaaagtttatccatgtgtcagaaaaaaaaaaaaatcggccctcctggccctcacccgcgccaccttctcccgccctttcccctttattggagggcaattcaataaccctcccccactgactccttgcgtcattttattcggacttcgtaagcgttattatttatttaagggcggtttccggtttccccaatacctgg

SEQ ID NO: 72586 - DNA, 693 bp, Homo sapiens
tgctgggattacaggcgtgagtcagcgcacccggcctgccaaattgttttttaactattcagtttaaactgtgagagacaccatgtcaaggaagcagtgtgagctagcgtctaaggattgtgaaaactgagcaagtgcccagaactagaaacttcccagccccctgaactcagcctcagggtaagcgagtttaatagtgcttcctttgattttcaaatctgtggaaggtttgtttcagtttttcccagacaaatattgttgggatagtgtttcttttcaaaaatggataggattcaatgctcatcagtgggaagatagtgactcctgaccattttcctcctagctggaaactacagaagactcccaagtatcaggaaatttggagaatttgtacaggaattatattcagagatagcaatttatttactcatcaaagagagctattggatagccaccataaagaccactcattaaaaaacaaaattgcatgatattcttaacattgtctttcactttttttaaccaggcttggtggagtttcaagatgctgatgaacttaaggtctggcgcttgaaagaatcagtgaagcttttcaagtagaggaggtatatttgaatatgtaacctttagtatctacagaatagaggttgcttttttttttttttttttgtccctttcacagtggtagcaagg

SEQ ID NO: 72587 - DNA, 898 bp, Homo sapiens
tgctgggattacaggcgtgagtcagcgcacccggcctgccaaattgttttttaactattcagtttaaactgtgagagacaccatgtcaaggaagcagtgtgagctagcgtctaaggattgtgaaaactgagcaagtgcccagaactagaaacttcccagccccctgaactcagcctcagggtaagcgagtttaatagtgcttcctttgattttcaaatctgtggaaggtttgtttcagtttttcccagacaaatattgttgggatagtgtttcttttcaaaaatggataggattcaatgctcatcagtgggaagatagtgactcctgaccattttcctcctagctggaaactacagaagactcccaagtatcaggaaatttggagaatttgtacaggaattatattcagagatagcaatttatttactcatcaaagagagctattggatagccaccataaagaccactcattaaaaaacaaaattgcatgatattcttaacattgtctttcactttttttaaccaggcttggtggagtttcaagatgctgatgaacttaaggtctggcgcttgaaagaatcagtgaagcttttcaagtagaggagtactctactttgaagaaaggaatggaacagaaggtgtctgcataactaaatggggatctagagaaagtggagactgcctctggagcagggaggtgagtggaccagatcactgtgggcctgggcctactcagctgattttcaagctaaaaccaggggtaacttttcctcttgagacgaaagccatgctcacattctgtgaacagccagagatgtgttcgaaaggcttacttttattttgtactagaaaagattgtctttccaaaatttacctcgtattcataaactggaaagtt

SEQ ID NO: 72588 - DNA, 1456 bp, Homo sapiens
  misc_feature (542)..(542): n is a, c, g, or t
aattccggagaggggttggaggaatggggagcctgtccctttaagccatgcaatcctagtgagattctctgctcttgatactctggcttcctgtcctgtaggacctccctctcctgaggccaccactgggcccccttctgagtgtcccctgagcactctctcagcatgaactgcatatccgacttcttcacctatgagaccaccaagtcggtggttgtgaagagctggaccatcgggatcatcaaccgagtagttcagcttctgatcatctcctactttgtagggtgggttttcttgcacgagaaggcttaccaggtacgggacacagccattgagtcctcggtggtaaccaaggtgaagggctccggactctacgccaacagagtcatggatgtgtctgattacgtgacgccacctcagggcacctcggtctttgtcatcatcaccaagatgattgttactgaaaatcagatgcaaggattctgcccagagagtgaggagaaataccgctgtgtatcagacagccagtgcgggcctgagcncttgccaggtggggggatcctcactggccgctgcgtgaactacagctctgtgctccggacctgtgagatccagggctggtgccccacggaggtggacacagtggaaacgcccatcatgatggaagctgagaacttcactattttcatcaagaacagcatccgtttccccctcttcaactttgagaagggaaacctccttcccaacctgacagccagggacatgaagacctgccgcttccacccggacaaggaccctttctgccccatcttgcgggtaggggacgtggtcaagtttgcggggcaggattttgccaaactggcgcgcacggggggagttctgggcattaagatcggctgggtgtgcgacttggacaaggcctgggaccagtgcatccccaaatactccttcacccggctcgacagcgtttctgagaaaagcagcgtgtccccaggctacaacttcaggtttgccaagtactacaaaatggaaaatggcagtgagtaccgcaccctcctgaaggcttttggcatccgcttcgacgtgctggtatacgggaatgctggcaagttcaacatcatccccaccatcatcagctctgtggcggcctttacttctgtgggagtgggaactgttctctgtgacatcatcctgctcaacttcctcaagggggccgaccagtacaaagccaagaagtttgaggaggtgaatgagactacgctgaaaatcgcggctttgaccaacccagtgtaccccagcgaccagaccacagcggagaagcagtccaccgattcgggggccttctccataggccactagggcctctttccagggccccacactcacaaaggctccaggcctccccacagaggaccctgcctgagcaagggggcatgggaaatcgaattcctgctgt

SEQ ID NO: 72589 - DNA, 2022 bp, Homo sapiens
tttttttttgagtcaagtctctatcacccaggctgctggagtgcagtggtgtgatctcgcctcactgcaacctccgcctcctgggttcaagtgattctcgtgcctcagcctcccgagtggctgggattacaggcgcgtgctaccacacctggctaatattttttgtatttttagtagagacagggtttcgccatgttggctaggctggtctctaactcctgacctcaggtgatccgcccaccttggcctcccaaagtgctgggattacaggcataagccaccatgcccagtccctaatatgatcttatttagttgacatttgcctctttccccaaaaatagatcaaaggaaatgtttccctttgtcccgtttcacactaaacgggttggggaggaaccaggggagatgtcaaccgtctgccggtgactgggaagttttctgcaagtcctccacagcatagccagcaggccacttttcactaacagaagtcacaagccaagtgagacactcatccaagaggaaggatggccagtatcttttctaagttgctaactggccgcaatgcttctctgctgtttgctaccatgggcaccagtgtcctgaccaccgggtacctgctgaaccggcagaaagtgtgtgccgaggtccgggagcagcctaggctatttcctccaagcgcagactacccagacctgcgcaacacaacaactgcatggccgagtgcctcacccccgccatttatgccaagcttcgcaacaaggtgacacccaacggctacacgctggaccagtgcatccagactggagtggacaaccctggccaccccttcataaagactgtgggcatggtggctggtgacgaggagtcctatgaggtgtttgctgacctttttgaccccgtcatcaaactaagacacaacggctatgaccccagggtgatgaagcacacaacggatctggatgcatcaaagatcacccaagggcagttcgacgagcattacgtgctgtcttctcgggtgcgcactggccgcagcatccgtgggctgagcctgcctccagcctgcacccgggccgagcgaagggaggtagagaacgtggccatcactgccctggagggcctcaagggggacctggctggccgctactacaagctgtccgagatgacggagcaggaccagcagcggctcatcgatgaccactttctgtttgataagccagtgtcccctttattaacatgtgctgggatggcccgtgactggccagatgccaggggaatctggcataattatgataagacatttctcatctggataaatgaggaggatcacaccagggtaatctcaatggaaaaaggaggcaatatgaaacgagtatttgagcgattctgtcgtggactaaaagaagtagaacggttaatccaagaacgaggctgggagttcatgtggaatgagcgcctaggatacattttgacctgtccttcgaaccttggaacaggactacgagctggtgtccacgttaggatcccaaagctcagcaaggacccacgcttttctaagatcctggaaaacctaagactccagaagcgtggcacaggtggtgtggacactgccgcggtcgcagatgtgtacgacatttccaacatagatagaattggtcgatcagaggttgagcttgttcagatagtcatcgatggagtcaattacctggtggattgtgaaaagaagttggagagaggccaagatattaaggtgccaccccctctgcctcagtttggcaaaaagtaaactttccctttcccaatttataaataatctgtctgctggtacgacagacataaatctctactctgagagtttttatacacttggaaaaatataaaattgtagatcctgcctatctttacaataaaactctccttaatataaaaaaaataattaatctaaaaaaaactcaaggggggcccctgtcccaaattcccctatggaactctttacaattaaatggccgagttttaacacttcag

SEQ ID NO: 72590 - DNA, 1581 bp, Homo sapiens
ccctgcatacacttcttggctgtgtgcgctcagcaggacgtgggaggctccggcttcaaggtgacactcatccaagaggaaggatggccagtatcttttctaagttgctaactggccgcaatgcttctctgctgtttgctaccatgggcaccagtgtcctgaccaccgggtacctgctgaaccggcagaaagtgtgtgccgaggtccgggagcagcctaggctatttcctccaagcgcagactacccagacctgcgcaacacaacaactgcatggccgagtgcctcacccccgccatttatgccaagcttcgcaacaaggtgacacccaacggctacacgctggaccagtgcatccagactggagtggacaaccctggccaccccttcataaagactgtgggcatggtggctggtgacgaggagtcctatgaggtgtttgctgacctttttgaccccgtcatcaaactaagacacaacggctatgaccccagggtgatgaagcacacaacggatctggatgcatcaaagatcacccaagggcagttcgacgagcattacgtgctgtcttctcgggtgcgcactggccgcagcatccgtgggctgagcctgcctccagcctgcacccgggccgagcgaagggaggtagagaacgtggccatcactgccctggagggcctcaagggggacctggctggccgctactacaagctgtccgagatgacggagcaggaccagcagcggctcatcgatgaccactttctgtttgataagccagtgtcccctttattaacatgtgctgggatggcccgtgactggccagatgccaggggaatctggcataattatgataagacatttctcatctggataaatgaggaggatcacaccagggtaatctcaatggaaaaaggaggcaatatgaaacgagtatttgagcgattctgtcgtggactaaaagaagtagaacggttaatccaagaacgaggctgggagttcatgtggaatgagcgcctaggatacattttgacctgtccttcgaaccttggaacaggactacgagctggtgtccacgttaggatcccaaagctcagcaaggacccacgcttttctaagatcctggaaaacctaagactccagaagcgtggcacaggtggtgtggacactgccgcggtcgcagatgtgtacgacatttccaacatagatagaattggtcgatcagaggttgagcttgttcagatagtcatcgatggagtcaattacctggtggattgtgaaaagaagttggagagaggccaagatattaaggtgccaccccctctgcctcagtttggcaaaaagtaaactttccctttcccaatttataaataatctgtctgctggtacgacagacataaatctctactctgagagtttttatacacttggaaaaatataaaattgtagatcctgcctatctttacaataaaactctccttaatataaaaaaaataattaatctaaaaaaaactcaaggggggcccctgtcccaaattcccctatggaactctttacaattaaatggccgagttttaacacttcag

SEQ ID NO: 72591 - DNA, 1524 bp, Homo sapiens
ccctgcatacacttcttggctgtgtgcgctcagcaggacgtgggaggctccggcttcaaggtgacactcatccaagaggaaggatggccagtatcttttctaagttgctaactggccgcaatgcttctctgctgtttgctaccatgggcaccagtgtcctgaccaccgggtacctgctgaaccggcagaaagtgtgtgccgaggtccgggagcagcctaggctatttcctccaagcgcagactacccagacctgcgcaacacaacaactgcatggccgagtgcctcacccccgccatttatgccaagcttcgcaacaaggtgacacccaacggctacacgctggaccagtgcatccagactggagtggacaaccctggccaccccttcataaagactgtgggcatggtggctggtgacgaggagtcctatgaggtgtttgctgacctttttgaccccgtcatcaaactaagacacaacggctatgaccccagggtgatgaagcacacaacggatctggatgcatcaaagatcacccaagggcagttcgacgagcattacgtgctgtcttctcgggtgcgcactggccgcagcatccgtgggctgagcctgcctccagcctgcacccgggccgagcgaagggaggtagagaacgtggccatcactgccctggagggcctcaagggggacctggctggccgctactacaagctgtccgagatgtcccctttattaacatgtgctgggatggcccgtgactggccagatgccaggggaatctggcataattatgataagacatttctcatctggataaatgaggaggatcacaccagggtaatctcaatggaaaaaggaggcaatatgaaacgagtatttgagcgattctgtcgtggactaaaagaagtagaacggttaatccaagaacgaggctgggagttcatgtggaatgagcgcctaggatacattttgacctgtccttcgaaccttggaacaggactacgagctggtgtccacgttaggatcccaaagctcagcaaggacccacgcttttctaagatcctggaaaacctaagactccagaagcgtggcacaggtggtgtggacactgccgcggtcgcagatgtgtacgacatttccaacatagatagaattggtcgatcagaggttgagcttgttcagatagtcatcgatggagtcaattacctggtggattgtgaaaagaagttggagagaggccaagatattaaggtgccaccccctctgcctcagtttggcaaaaagtaaactttccctttcccaatttataaataatctgtctgctggtacgacagacataaatctctactctgagagtttttatacacttggaaaaatataaaattgtagatcctgcctatctttacaataaaactctccttaatataaaaaaaataattaatctaaaaaaaactcaaggggggcccctgtcccaaattcccctatggaactctttacaattaaatggccgagttttaacacttcag

SEQ ID NO: 72592 - DNA, 1226 bp, Homo sapiens
ccctgcatacacttcttggctgtgtgcgctcagcaggacgtgggaggctccggcttcaaggtgacactcatccaagaggaaggatggccagtatcttttctaagttgctaactggccgcaatgcttctctgctgtttgctaccatgggcaccagtgtcctgaccaccgggtacctgctgaaccggcagaaagtgtgtgccgaggtccgggagcagcctaggctatttcctccaagcgcagactacccagacctgcgcaacacaacaactgcatggccgagtgcctcacccccgccatttatgccaagcttcgcaacaaggtgacacccaacggctacacgctggaccagtgcatccagactggagtggacaaccctggccaccccttcataaagactgtgggcatggtggctggtgacgaggagtcctatgaggtgtttgctgacctttttgaccccgtcatcaaactaagacacaacggctatgaccccagggtgatgaagcacacaacggatctggatgcatcaaagatcacccaagggcagttcgacgagcattacgtgctgtcttctcgggtgcgcactggccgcagcatccgtgggctgagcctgcctccagcctgcacccgggccgagcgaagggaggtagagaacgtggccatcactgccctggagggcctcaagggggacctggctggccgctactacaagctgtccgagatgacggagcaggaccagcagcggctcatcgatgaccactttctgtttgataagccagtgtcccctttattaacatgtgctgggatggcccgtgactggccagatgccaggggaatctggcataattatgataagacatttctcatctggataaatgaggaggatcacaccagggtaatctcaatggaaaaaggaggcaatatgaaacgagtatttgagcgattctgtcgtggactaaaagaagtagaacggttaatccaagaacgaggctgggagttcatgtggaatgagcgcctaggatacattttgacctgtccttcgaaccttggaacaggactacgagctggtgtccacgttaggatcccaaagctcagcaaggtactgttatgtgcccagtggccctgatgggccaggatcagctcagatgcgactgctttgtggaggaagaaaacatcactgcccattccttaacccttactttctctatctacaatataaaaataagaaa

SEQ ID NO: 72593 - DNA, 1344 bp, Homo sapiens
ccctgcatacacttcttggctgtgtgcgctcagcaggacgtgggaggctccggcttcaaggtgacactcatccaagaggaaggatggccagtatcttttctaagttgctaactggccgcaatgcttctctgctgtttgctaccatgggcaccagtgtcctgaccaccgggtacctgctgaaccggcagaaagtgtgtgccgaggtccgggagcagcctaggctatttcctccaagcgcagactacccagacctgcgcaacacaacaactgcatggccgagtgcctcacccccgccatttatgccaagcttcgcaacaaggtgacacccaacggctacacgctggaccagtgcatccagactggagtggacaaccctggccaccccttcataaagactgtgggcatggtggctggtgacgaggagtcctatgaggtgtttgctgacctttttgaccccgtcatcaaactaagacacaacggctatgaccccagggtgatgaagcacacaacggatctggatgcatcaaagatcacccaagggcagttcgacgagcattacgtgctgtcttctcgggtgcgcactggccgcagcatccgtgggctgagcctgcctccagcctgcacccgggccgagcgaagggaggtagagaacgtggccatcactgccctggagggcctcaagggggacctggctggccgctactacaagctgtccgagatgacggagcaggaccagcagcggctcatcgatgaccactttctgtttgataagccagtgtcccctttattaacatgtgctgggatggcccgtgactggccagatgccaggggaatctggcataattatgataagacatttctcatctggataaatgaggaggatcacaccagggtaatctcaatggaaaaaggaggcaatatgaaacgagtatttgagcgattctgtcgtggactaaaagaagtagaacggttaatccaagaacgaggctgggagttcatgtggaatgagcgcctaggatacattttgacctgtccttcgaaccttggaacaggactacgagctggtgtccacgttaggatcccaaagctcagcaaggacccacgcttttctaagatcctggaaaacctaagactccagaagcgtggcacaggtggtgtggacactgccgcggtcgcagatgtgtacgacatttccaacatagatagaattggtcgatcagaggtaacgtctctctcactttcctaacatgaactaacaaaatcagcctaagagagaatagagaaaagcaaacagcctagccgttttcacaaaattcgagacctcctcttcgcccattgagtcct

SEQ ID NO: 72594 - DNA, 1160 bp, Homo sapiens
ccctgcatacacttcttggctgtgtgcgctcagcaggacgtgggaggctccggcttcaaggtgacactcatccaagaggaaggatggccagtatcttttctaagttgctaactggccgcaatgcttctctgctgtttgctaccatgggcaccagtgtcctgaccaccgggtacctgctgaaccggcagaaagtgtgtgccgaggtccgggagcagcctaggctatttcctccaagcgcagactacccagacctgcgcaacacaacaactgcatggccgagtgcctcacccccgccatttatgccaagcttcgcaacaaggtgacacccaacggctacacgctggaccagtgcatccagactggagtggacaaccctggccaccccttcataaagactgtgggcatggtggctggtgacgaggagtcctatgaggtgtttgctgacctttttgaccccgtcatcaaactaagacacaacggctatgaccccagggtgatgaagcacacaacggatctggatgcatcaaagatcacccaagggcagttcgacgagcattacgtgctgtcttctcgggtgcgcactggccgcagcatccgtgggctgagcctgcctccagcctgcacccgggccgagcgaagggaggtagagaacgtggccatcactgccctggagggcctcaagggggacctggctggccgctactacaagctgtccgagatgacggagcaggaccagcagcggctcatcgatgaccactttctgtttgataagccagtgtcccctttattaacatgtgctgggatggcccgtgactggccagatgccaggggaatctggcataattatgataagacatttctcatctggataaatgaggaggatcacaccagggtaatctcaatggaaaaaggaggcaatatgaaacgagtatttgagcgattctgtcgtggactaaaagaagtaagatgttatctgagatttctggatatttattaaaataaaattaccgtattgtttgttcttgaaagaagacactatggtaacttccaagatggagctaatttttttctagaaatcaaagcaactgccgcctcccaggttcaagtgattatcccgcctcagcctctagagtagctgggattacaggtgccaccaccac

SEQ ID NO: 72595 - DNA, 1074 bp, Homo sapiens
ccctgcatacacttcttggctgtgtgcgctcagcaggacgtgggaggctccggcttcaaggtgacactcatccaagaggaaggatggccagtatcttttctaagttgctaactggccgcaatgcttctctgctgtttgctaccatgggcaccagtgtcctgaccaccgggtacctgctgaaccggcagaaagtgtgtgccgaggtccgggagcagcctaggctatttcctccaagcgcagactacccagacctgcgcaacacaacaactgcatggccgagtgcctcacccccgccatttatgccaagcttcgcaacaaggtgacacccaacggctacacgctggaccagtgcatccagactggagtggacaaccctggccaccccttcataaagactgtgggcatggtggctggtgacgaggagtcctatgaggtgtttgctgacctttttgaccccgtcatcaaactaagacacaacggctatgaccccagggtgatgaagcacacaacggatctggatgcatcaaagatcacccaagggcagttcgacgagcattacgtgctgtcttctcgggtgcgcactggccgcagcatccgtgggctgagcctgcctccagcctgcacccgggccgagcgaagggaggtagagaacgtggccatcactgccctggagggcctcaagggggacctggctggccgctactacaagctgtccgagatgacggagcaggaccagcagcggctcatcgatgcataattatgataagacatttctcatctggataaatgaggaggatcacaccagggtaatctcaatggaaaaaggaggcaatatgaaacgagtatttgagcgattctgtcgtggactaaaagaagtaagatgttatctgagatttctggatatttattaaaataaaattaccgtattgtttgttcttgaaagaagacactatggtaacttccaagatggagctaatttttttctagaaatcaaagcaactgccgcctcccaggttcaagtgattatcccgcctcagcctctagagtagctgggattacaggtgccaccaccac

SEQ ID NO: 72596 - DNA, 1381 bp, Homo sapiens
cctgggttaaaaccagagttccctatttataatcaagttttctaccagatttataccaagatagagtcctactggcagtgagtgagagacctatctcaccatactctcaccaacactggaagggatcaaaaggataaatagaaaatatgtgttttagttagtagtgactaacattctgattcaaccctctcttggggcctaagtttccttatgcatataaagagatagatagggaggcagctggagtatgtgatgcctgagagctaacattcaatggtcccttccatccttgctgctcattctttagttgtataatgtatgtctggaattaactaatttctctcttaatttgggtttccttgggggcagtacaagtcatttgcttaggaggtgatcccaggggaaaaaaaaattaagtagatgtgctctggtttaaggaaaacaaatatttggaaaccaaagttctatacagagttttttaagaacaggaattttagaaagtatatcttaatttgcaaaactcatttcattaataagcttgcctagcatagtacaaacatgatttagttgccaaacatttgacattaatttttcaggaagacacccactgtattaatgatgatatctgagctacattagcatatccagtgctcagatagattagtggcaggtcagaattcagatccaggccaaagaataacacgagggtgtcactgtagtcttacttctagacaaactctgatattttatagcagacactggtaggaaaaaatgttagagatgcaaactaatggttttcacatagtaaaaaagctttcacatacaaagtagtatccccatcttaactatggaaagattgagagaaacccttatatctctgccttccatttctgagaaggaaggaattgttgtgaagtccatctaagtggcaagttctcatttatcacagtgctgttcctgttaatcaatgccctgcagatgcttctattcaaattaatcattcatcttcttcactgtcaaaggttgagcttgttcagatagtcatcgatggagtcaattacctggtggattgtgaaaagaagttggagagaggccaagatattaaggtgccaccccctctgcctcagtttggcaaaaagtaaactttccctttcccaatttataaataatctgtctgctggtacgacagacataaatctctactctgagagtttttatacacttggaaaaatataaaattgtagatcctgcctatctttacaataaaactctccttaatataaaaaaaataattaatctaaaaaaaactcaaggggggcccctgtcccaaattcccctatggaactctttacaattaaatggccgagttttaacacttcag

SEQ ID NO: 72597 - DNA, 233 bp, Homo sapiens
gtgttgaaacaaatgcaattaacactcagtaccatatttctctcttcattaggcataattatgataagacatttctcatctggataaatgaggaggatcacaccagggtaatctcaatggaaaaaggaggcaatatgaaacgagtatttgagcgattctgtcgtggactaaaagaagtaagatgttatctgagatttctggatatttattaaaataaaattaccgtattgttt

SEQ ID NO: 72598 - DNA, 144 bp, Homo sapiens
gcggccgcctactactactactgctcgaattcaagcttctaacgatgtacggggacatgtgttgtttggggggaattggcaccattttttcctgactatgtttcaattaactaaagaataaatgatgaagaaattctccttgta

SEQ ID NO: 72599 - DNA, 5623 bp, Homo sapiens
  misc_feature (1342)..(1342): n is a, c, g, or t
catccacaattacagcacagggccgcagatcagccagtagacatgatgagcatcaaagcctttacgcttgtctctgctgtggagcgggagctgctgatgggcgacaaggagcgcgtcaacatagagtgcgtggagtgctgcggcagggacctctacgtgggcaccaacgactgcttcgtctaccacttcctgttggaggagaggccagtgcctgctgggccagccacgttcactgccaccaaacagctgcagagacacttgggcttcaagaagcccgtgaacgagctgcgcgcggcctcagcactcaacaggctgctggtgctgtgtgacaactccatcagcctggtcaacatgctgaacctcgagccagtgccttcgggggcccgcatcaagggggcagccacgtttgcactgaacgagaaccctgtgagtggggaccccttctgtgtagaagtttgcatcatctctgtcaaacgcagaaccatccagatgtttctggtgtacgaggaccgggtgcagatcgtcaaggaggtgtcgactgccgagcagcccctcgctgtggctgtggacggccacttcctgtgtctggctctgaccactcagtacatcatccacaattacagcacaggcgtctcccaggacctgtttccctactgcagtgaggagaggccgccgatcgtcaagaggatagggagacaggagttcctgctggcgggccccggagggctgggcatgtttgccacagtcgcagggatatcccagcgcgcccccgtgcactggtcggagaatgtgattggggcggctgtgtcctttccatacgtcatagcgctcgatgacgaattcattcacagtccacagcatgttggatcagcaacagaagcagacgctgccctttaaggagggccatatcctacaggactttgaaggaagagtgatcgttgccacaagtaaaggagtttacatcttggttccattacctttggaaaaacaaatacaggatcttctagcaagccgcagagtagaagaggctttggttttagcaaaaggagcccggaggaacattccaaaggaaaaatttcaggtaatgtacagaaggattctgcagcaggcgggatttatacagtttgcacaacttcagttcctggaagctaaagagctcttcagaagcggccagcttgatgtccgggagctgatctctctctaccccttcctgttgcccacctcctcctccttcacccggtcccaccctcctcttcatgagtacgcagacctgaaccagctgacccagggggaccaggagaagatggccaagtgcaaacgcttcctcatgagctacctgaangaggtccgcagcacagaggtagcaaatggctacaaggaggacatcgacacagccttgctcaaactgtatgcagaggctgaccacgacagcctgctggacctcctggtcactgagaacttctgtcttctgacggacagtgctgcctggctagagaagcacaaaaagtattttgcacttggactgctctatcattataataaccaagatgctgctgcagttcagttgtgggtgaacattgtgaatggcgatgtccaggactccacacgctcagacctgtatgaatacatcgtggattttcttacctactgcttagacgaggaactagtgtgggcctatgctgattgggtcctgcagaaaagtgaagaggtcggagttcaggttttcaccaagagacctttggatgaacagcagaagaacagttttaatccagacgacattatcaattgccttaaaaaataccctaaagcccttgtgaagtatctggaacatcttgtgatagacaagagactgcagaaagaagagtatcacacccacttagctgtgctgtacctggaagaggtgctgctgcagagggcctccgccagtggcaagggtgcagaggccaccgagacgcaggccaagctgcggcggctgctccagaaatctgatttataccgagtccactttcttctcgagaggctgcagggagctggcctgcccatggagagcgccatcctgcacgggaagctgggcgagcatgagaaggcgctgcatatcctggtgcacgagctgcaggactttgcagcggccgaggactactgcctgtggtgctccgagggccgagacccaccccaccgccagcaactctttcacacgctgctggccatctacctgcatgctggccccactgcccacgagctggccgtggctgccgtggacctgctgaaccgccacgccaccgaatttgatgcagcccaggtgctgcagatgctgcctgacacctggtcagtgcagctcctctgcccattcctgatgggggccatgagggacagcatccatgccaggaggaccatgcaggtggctctcggcctggccaggtccgaaaacttaatctacacctacgataagatgaagttgaaaggaagctcaatccaactctcagacaaaaagctttgtcagatatgccaaaatcccttttgtgagcctgtgtttgttagatacccaaatggtggtcttgtgcacacccactgtgccgccagcagacacacaaaccccagctcatccagtcctggcactcggacttgaaaagcttggcccaagggtgcgaggggaactccgagttctttctgagcctgctggacatgaagagcagatgaccaccatgctctgtgtcagccaggacgaagggagacatctgggtgccagggagccttccgtccatacgcaacaaggactcctcgctgctgaccaggctctatgaatgtacatggaaaacccctaaaaatccccaaaacagaaacatacaagagttcacctgtccaggtacatagtaatccaagacagaggtctactttgaaaaaaaaaaaagggagtcttcctcatgcagtccaagacccaggtgggggatcccccaccacccccacactccaacctttagactcatgtttgcactggaaacgtggcttcaccatggctggcgacaaagtcctctcttgcctgggtgagtggcgagggcacagagcctcatgggggtcagccttgccctcctgcagaaacacgttctccatccacgccgctcactcatgggcccatttcccagggttacctcgtgggctctgcctttgccctcagaaacggctgaccctggagaagtacctttgttccttctttcttcctctccggctctcagctcccaaaagattctgccttgtgtacccaagcactcactcttgggtgaactaatgcttctggctgcctagcaagtgaagatctgttgagaaactgagaacgctccaagagagaagctgctctcccctccttgaagaagccgcggacacgggaaacccacggcgggcaagggcccagctgtgtgctcctttcctgtcatggcatctgctgatttgaaactccatgacgaacacgttgaactaaacatttttatttaaatttgtatcatgttcgtagttgctctcttgttgagagagtcatctgtcctgtttgttaggggtattttttcttgttaaaatgtatctcctgttgaatactcgggaaattcaaagggaagtgtggtcagcacacactgagcgttcttttctggagaggccggttttagcctcgtacctttagcaggaccgacagcgggtggaagggcccgtgtgctggatgggggtgtcgcctcctggatggcacaccctcccgaggacatccagacaggctgtgtcaccctccagcactttatgtgcctgctctgaggtgtcctgaacacacagcaacggcctctccttcatcacaggccggggattccttttgtgtttctgtataacatcgatgacgagctgaagctgttgtcacttcactgccctctttggaatttcttcattgtgctgactgattctattaggggctaacaataaaggcagtctacccactactatcatgcttgggaaacaagcgtcagcttgtacatatgacaagagaggaccctgaatacaccctctcttcatcagcccaagccttactgaggtgggatgaagacctcattctctgttctttaaaacatgtttcgtgaactaatattggtccatgtattttttgtccttttgggactctaagtgggtcaagaagcaaaaacatccatgtgttgtttggggggaattggcaccattttttcctgactatgtttcaattaactaaagaataaatgatgaagaaattctccttgtagcacaactgtatgctgtgtaaattggtgtgagctcaaagcccagtcatgtgttttacctgtgggtgactctgttgtagaatggtcatattactgcatatgttatcatgacaacttgtgagtttgagtttatatttctcaaagaacaagttacccgtatatgcaacattgcgccattaaaagcttatttctctgtacacaaaatgggtaaaatcttgaaaaaacttagtaatttctcattcctaacacacagacagagtctcactctgtcacccaggctggagtgcagtggcgcaatctcggctcactgcaacctccacctcctgggttcaagcaattctgctgcctcagcctcccgagtagctgggactacaggtgcatgccaccacgcccagctaatttttgtatttttagtagagacggggtttcaccatgttggccaggatggtctcggtctcctgacctcgtgatctgcctgcctcggcctcccaaagtgctgggattacaggcgtgagccactgcgcccagccaacactagtcatttttattttttcactgaacattgatcaatactctaaaatgtttgtcatcctttagaataatgggaattaaagttgagcagttttccatctctaccaaatccttcaccacaagcagcattctattacagtatgaagaattgtctcatatgttaaaactgtacttttctctaacctttctctcactcctacaaggcccttttctcaaatcatatttctgagagaaatgtatggttctttctcacaggcctgctgatttgtaactgtgccatcgaatagagcaattagatccatcagacctttttcccctcattaggttcagtggaaccattctggttaaaacagcatgaactgaactcagtttacattcatattctatgggcaataccatttggtttttggaactgtttatctgctgttccctatcaagtattaatgtagggatgtcactcaggctgcgttgcactgggctgagttcaactgcgacgctctcactgacgcgtgcttacatgtgcttctcacttccggagcacaggcaggtggctgcggggtcccagctctgaatggatgcccatgatgcaactggggcagcccttgctttttgcttgctctcccacagaaacctttgtccttgcaactttatcctttgtcccgattgggtcccagatacacaaaatgtacaaatgtaaacttgctcattttattaaaattcttttagttctttgttctttctgtaattttttaaaataaaaattgccttgatggagtgatggttttcactcgcaccatacctagtctaaataaagagttctagaatctgta

SEQ ID NO: 72600 - DNA, 5359 bp, Homo sapiens
  misc_feature (1078)..(1078): n is a, c, g, or t
gtagctgggactacagatgtgcaccaccacacctggctaatttttatattttttgtaagggtgaggttttgccatgttgcccaggctagtcttgaactcctgagctcaagcaccatctgcccgcctctgtctcccaacatgttgggattacaggtgtgagccaccacgtccggcctattttattttttattttgctaagtttgtggtaatattattacaacttcatttttaattggaagtaaatatcagatatacattctgggtaaggtagttctcttcacagaaataaattcctgtagggctcttcacacatacagcatattatattgtttttccttccttgaaatataagactgtacaggaaaattgctggtgggcaggggtcggtctgcatccagacatagctacaggaaaatgacaccatgcttatttggaagcctacctaactctttcttcttacttctaggcatgtttgccacagtcgcagggatatcccagcgcgcccccgtgcactggtcggagaatgtgattggggcggctgtgtcctttccatacgtcatagcgctcgatgacgaattcattcacagtccacagcatgttggatcagcaacagaagcagacgctgccctttaaggagggccatatcctacaggactttgaaggaagagtgatcgttgccacaagtaaaggagtttacatcttggttccattacctttggaaaaacaaatacaggatcttctagcaagccgcagagtagaagaggctttggttttagcaaaaggagcccggaggaacattccaaaggaaaaatttcaggtaatgtacagaaggattctgcagcaggcgggatttatacagtttgcacaacttcagttcctggaagctaaagagctcttcagaagcggccagcttgatgtccgggagctgatctctctctaccccttcctgttgcccacctcctcctccttcacccggtcccaccctcctcttcatgagtacgcagacctgaaccagctgacccagggggaccaggagaagatggccaagtgcaaacgcttcctcatgagctacctgaangaggtccgcagcacagaggtagcaaatggctacaaggaggacatcgacacagccttgctcaaactgtatgcagaggctgaccacgacagcctgctggacctcctggtcactgagaacttctgtcttctgacggacagtgctgcctggctagagaagcacaaaaagtattttgcacttggactgctctatcattataataaccaagatgctgctgcagttcagttgtgggtgaacattgtgaatggcgatgtccaggactccacacgctcagacctgtatgaatacatcgtggattttcttacctactgcttagacgaggaactagtgtgggcctatgctgattgggtcctgcagaaaagtgaagaggtcggagttcaggttttcaccaagagacctttggatgaacagcagaagaacagttttaatccagacgacattatcaattgccttaaaaaataccctaaagcccttgtgaagtatctggaacatcttgtgatagacaagagactgcagaaagaagagtatcacacccacttagctgtgctgtacctggaagaggtgctgctgcagagggcctccgccagtggcaagggtgcagaggccaccgagacgcaggccaagctgcggcggctgctccagaaatctgatttataccgagtccactttcttctcgagaggctgcagggagctggcctgcccatggagagcgccatcctgcacgggaagctgggcgagcatgagaaggcgctgcatatcctggtgcacgagctgcaggactttgcagcggccgaggactactgcctgtggtgctccgagggccgagacccaccccaccgccagcaactctttcacacgctgctggccatctacctgcatgctggccccactgcccacgagctggccgtggctgccgtggacctgctgaaccgccacgccaccgaatttgatgcagcccaggtgctgcagatgctgcctgacacctggtcagtgcagctcctctgcccattcctgatgggggccatgagggacagcatccatgccaggaggaccatgcaggtggctctcggcctggccaggtccgaaaacttaatctacacctacgataagatgaagttgaaaggaagctcaatccaactctcagacaaaaagctttgtcagatatgccaaaatcccttttgtgagcctgtgtttgttagatacccaaatggtggtcttgtgcacacccactgtgccgccagcagacacacaaaccccagctcatccagtcctggcactcggacttgaaaagcttggcccaagggtgcgaggggaactccgagttctttctgagcctgctggacatgaagagcagatgaccaccatgctctgtgtcagccaggacgaagggagacatctgggtgccagggagccttccgtccatacgcaacaaggactcctcgctgctgaccaggctctatgaatgtacatggaaaacccctaaaaatccccaaaacagaaacatacaagagttcacctgtccaggtacatagtaatccaagacagaggtctactttgaaaaaaaaaaaagggagtcttcctcatgcagtccaagacccaggtgggggatcccccaccacccccacactccaacctttagactcatgtttgcactggaaacgtggcttcaccatggctggcgacaaagtcctctcttgcctgggtgagtggcgagggcacagagcctcatgggggtcagccttgccctcctgcagaaacacgttctccatccacgccgctcactcatgggcccatttcccagggttacctcgtgggctctgcctttgccctcagaaacggctgaccctggagaagtacctttgttccttctttcttcctctccggctctcagctcccaaaagattctgccttgtgtacccaagcactcactcttgggtgaactaatgcttctggctgcctagcaagtgaagatctgttgagaaactgagaacgctccaagagagaagctgctctcccctccttgaagaagccgcggacacgggaaacccacggcgggcaagggcccagctgtgtgctcctttcctgtcatggcatctgctgatttgaaactccatgacgaacacgttgaactaaacatttttatttaaatttgtatcatgttcgtagttgctctcttgttgagagagtcatctgtcctgtttgttaggggtattttttcttgttaaaatgtatctcctgttgaatactcgggaaattcaaagggaagtgtggtcagcacacactgagcgttcttttctggagaggccggttttagcctcgtacctttagcaggaccgacagcgggtggaagggcccgtgtgctggatgggggtgtcgcctcctggatggcacaccctcccgaggacatccagacaggctgtgtcaccctccagcactttatgtgcctgctctgaggtgtcctgaacacacagcaacggcctctccttcatcacaggccggggattccttttgtgtttctgtataacatcgatgacgagctgaagctgttgtcacttcactgccctctttggaatttcttcattgtgctgactgattctattaggggctaacaataaaggcagtctacccactactatcatgcttgggaaacaagcgtcagcttgtacatatgacaagagaggaccctgaatacaccctctcttcatcagcccaagccttactgaggtgggatgaagacctcattctctgttctttaaaacatgtttcgtgaactaatattggtccatgtattttttgtccttttgggactctaagtgggtcaagaagcaaaaacatccatgtgttgtttggggggaattggcaccattttttcctgactatgtttcaattaactaaagaataaatgatgaagaaattctccttgtagcacaactgtatgctgtgtaaattggtgtgagctcaaagcccagtcatgtgttttacctgtgggtgactctgttgtagaatggtcatattactgcatatgttatcatgacaacttgtgagtttgagtttatatttctcaaagaacaagttacccgtatatgcaacattgcgccattaaaagcttatttctctgtacacaaaatgggtaaaatcttgaaaaaacttagtaatttctcattcctaacacacagacagagtctcactctgtcacccaggctggagtgcagtggcgcaatctcggctcactgcaacctccacctcctgggttcaagcaattctgctgcctcagcctcccgagtagctgggactacaggtgcatgccaccacgcccagctaatttttgtatttttagtagagacggggtttcaccatgttggccaggatggtctcggtctcctgacctcgtgatctgcctgcctcggcctcccaaagtgctgggattacaggcgtgagccactgcgcccagccaacactagtcatttttattttttcactgaacattgatcaatactctaaaatgtttgtcatcctttagaataatgggaattaaagttgagcagttttccatctctaccaaatccttcaccacaagcagcattctattacagtatgaagaattgtctcatatgttaaaactgtacttttctctaacctttctctcactcctacaaggcccttttctcaaatcatatttctgagagaaatgtatggttctttctcacaggcctgctgatttgtaactgtgccatcgaatagagcaattagatccatcagacctttttcccctcattaggttcagtggaaccattctggttaaaacagcatgaactgaactcagtttacattcatattctatgggcaataccatttggtttttggaactgtttatctgctgttccctatcaagtattaatgtagggatgtcactcaggctgcgttgcactgggctgagttcaactgcgacgctctcactgacgcgtgcttacatgtgcttctcacttccggagcacaggcaggtggctgcggggtcccagctctgaatggatgcccatgatgcaactggggcagcccttgctttttgcttgctctcccacagaaacctttgtccttgcaactttatcctttgtcccgattgggtcccagatacacaaaatgtacaaatgtaaacttgctcattttattaaaattcttttagttctttgttctttctgtaattttttaaaataaaaattgccttgatggagtgatggttttcactcgcaccatacctagtctaaataaagagttctagaatctgta

SEQ ID NO: 72601 - DNA, 4264 bp, Homo sapiens
  misc_feature (1342)..(1342): n is a, c, g, or t
catccacaattacagcacagggccgcagatcagccagtagacatgatgagcatcaaagcctttacgcttgtctctgctgtggagcgggagctgctgatgggcgacaaggagcgcgtcaacatagagtgcgtggagtgctgcggcagggacctctacgtgggcaccaacgactgcttcgtctaccacttcctgttggaggagaggccagtgcctgctgggccagccacgttcactgccaccaaacagctgcagagacacttgggcttcaagaagcccgtgaacgagctgcgcgcggcctcagcactcaacaggctgctggtgctgtgtgacaactccatcagcctggtcaacatgctgaacctcgagccagtgccttcgggggcccgcatcaagggggcagccacgtttgcactgaacgagaaccctgtgagtggggaccccttctgtgtagaagtttgcatcatctctgtcaaacgcagaaccatccagatgtttctggtgtacgaggaccgggtgcagatcgtcaaggaggtgtcgactgccgagcagcccctcgctgtggctgtggacggccacttcctgtgtctggctctgaccactcagtacatcatccacaattacagcacaggcgtctcccaggacctgtttccctactgcagtgaggagaggccgccgatcgtcaagaggatagggagacaggagttcctgctggcgggccccggagggctgggcatgtttgccacagtcgcagggatatcccagcgcgcccccgtgcactggtcggagaatgtgattggggcggctgtgtcctttccatacgtcatagcgctcgatgacgaattcattcacagtccacagcatgttggatcagcaacagaagcagacgctgccctttaaggagggccatatcctacaggactttgaaggaagagtgatcgttgccacaagtaaaggagtttacatcttggttccattacctttggaaaaacaaatacaggatcttctagcaagccgcagagtagaagaggctttggttttagcaaaaggagcccggaggaacattccaaaggaaaaatttcaggtaatgtacagaaggattctgcagcaggcgggatttatacagtttgcacaacttcagttcctggaagctaaagagctcttcagaagcggccagcttgatgtccgggagctgatctctctctaccccttcctgttgcccacctcctcctccttcacccggtcccaccctcctcttcatgagtacgcagacctgaaccagctgacccagggggaccaggagaagatggccaagtgcaaacgcttcctcatgagctacctgaangaggtccgcagcacagaggtagcaaatggctacaaggaggacatcgacacagccttgctcaaactgtatgcagaggctgaccacgacagcctgctggacctcctggtcactgagaacttctgtcttctgacggacagtgctgcctggctagagaagcacaaaaagtattttgcacttggactgctctatcattataataaccaagatgctgctgcagttcagttgtgggtgaacattgtgaatggcgatgtccaggactccacacgctcagacctgtatgaatacatcgtggattttcttacctactgcttagacgaggaactagtgtgggcctatgctgattgggtcctgcagaaaagtgaagaggtcggagttcaggttttcaccaagagacctttggatgaacagcagaagaacagttttaatccagacgacattatcaattgccttaaaaaataccctaaagcccttgtgaagtatctggaacatcttgtgatagacaagagactgcagaaagaagagtatcacacccacttagctgtgctgtacctggaagaggtgctgctgcagagggcctccgccagtggcaagggtgcagaggccaccgagacgcaggccaagctgcggcggctgctccagaaatctgatttataccgagtccactttcttctcgagaggctgcagggagctggcctgcccatggagagcgccatcctgcacgggaagctgggcgagcatgagaaggcgctgcatatcctggtgcacgagctgcaggactttgcagcggccgaggactactgcctgtggtgctccgagggccgagacccaccccaccgccagcaactctttcacacgctgctggccatctacctgcatgctggccccactgcccacgagctggccgtggctgccgtggacctgctgaaccgccacgccaccgaatttgatgcagcccaggtgctgcagatgctgcctgacacctggtcagtgcagctcctctgcccattcctgatgggggccatgagggacagcatccatgccaggaggaccatgcaggtggctctcggcctggccaggtccgaaaacttaatctacacctacgataagatgaagttgaaaggaagctcaatccaactctcagacaaaaagctttgtcagatatgccaaaatcccttttgtgagcctgtgtttgttagatacccaaatggtggtcttgtgcacacccactgtgccgccagcagacacacaaaccccagctcatccagtcctggcactcggacttgaaaagcttggcccaagggtgcgaggggaactccgagttctttctgagcctgctggacatgaagagcagatgaccaccatgctctgtgtcagccaggacgaagggagacatctgggtgccagggagccttccgtccatacgcaacaaggactcctcgctgctgaccaggctctatgaatgtacatggaaaacccctaaaaatccccaaaacagaaacatacaagagttcacctgtccaggtacatagtaatccaagacagaggtctactttgaaaaaaaaaaaagggagtcttcctcatgcagtccaagacccaggtgggggatcccccaccacccccacactccaacctttagactcatgtttgcactggaaacgtggcttcaccatggctggcgacaaagtcctctcttgcctgggtgagtggcgagggcacagagcctcatgggggtcagccttgccctcctgcagaaacacgttctccatccacgccgctcactcatgggcccatttcccagggttacctcgtgggctctgcctttgccctcagaaacggctgaccctggagaagtacctttgttccttctttcttcctctccggctctcagctcccaaaagattctgccttgtgtacccaagcactcactcttgggtgaactaatgcttctggctgcctagcaagtgaagatctgttgagaaactgagaacgctccaagagagaagctgctctcccctccttgaagaagccgcggacacgggaaacccacggcgggcaagggcccagctgtgtgctcctttcctgtcatggcatctgctgatttgaaactccatgacgaacacgttgaactaaacatttttatttaaatttgtatcatgttcgtagttgctctcttgttgagagagtcatctgtcctgtttgttaggggtattttttcttgttaaaatgtatctcctgttgaatactcgggaaattcaaagggaagtgtggtcagcacacactgagcgttcttttctggagaggccggttttagcctcgtacctttagcaggaccgacagcgggtggaagggcccgtgtgctggatgggggtgtcgcctcctggatggcacaccctcccgaggacatccagacaggctgtgtcaccctccagcactttatgtgcctgctctgaggtgtcctgaacacacagcaacggcctctccttcatcacaggccggggattccttttgtgtttctgtataacatcgatgacgagctgaagctgttgtcacttcactgccctctttggaatttcttcattgtgctgactgattctattaggggctaacaataaaggcagtctacccactactatcatgcttgggaaacaagcgtcagcttgtacatatgacaagagaggaccctgaatacaccctctcttcatcagcccaagccttactgaggtgggatgaagacctcattctctgttctttaaaacatgtttcgtgaactaatattggtccatgtattttttgtccttttgggactctaagtgggtcaagaagcaaaaacatccatgtgttgtttggggggaattggcaccattttttcctgactatgtttcaattaactaaagaataaatgatgaagaaattctccttgta

SEQ ID NO: 72602 - DNA, 5707 bp, Homo sapiens
  misc_feature (1398)..(1398): n is a, c, g, or t
ccagcccaggagccgcgggccggagcggggcggcggggccccaggccgcggggcggcgcgggacggcgggcgccggcgccgcagatcagccagtagacatgatgagcatcaaagcctttacgcttgtctctgctgtggagcgggagctgctgatgggcgacaaggagcgcgtcaacatagagtgcgtggagtgctgcggcagggacctctacgtgggcaccaacgactgcttcgtctaccacttcctgttggaggagaggccagtgcctgctgggccagccacgttcactgccaccaaacagctgcagagacacttgggcttcaagaagcccgtgaacgagctgcgcgcggcctcagcactcaacaggctgctggtgctgtgtgacaactccatcagcctggtcaacatgctgaacctcgagccagtgccttcgggggcccgcatcaagggggcagccacgtttgcactgaacgagaaccctgtgagtggggaccccttctgtgtagaagtttgcatcatctctgtcaaacgcagaaccatccagatgtttctggtgtacgaggaccgggtgcagatcgtcaaggaggtgtcgactgccgagcagcccctcgctgtggctgtggacggccacttcctgtgtctggctctgaccactcagtacatcatccacaattacagcacaggcgtctcccaggacctgtttccctactgcagtgaggagaggccgccgatcgtcaagaggatagggagacaggagttcctgctggcgggccccggagggctgggcatgtttgccacagtcgcagggatatcccagcgcgcccccgtgcactggtcggagaatgtgattggggcggctgtgtcctttccatacgtcatagcgctcgatgacgaattcattcacagtccacagcatgttggatcagcaacagaagcagacgctgccctttaaggagggccatatcctacaggactttgaaggaagagtgatcgttgccacaagtaaaggagtttacatcttggttccattacctttggaaaaacaaatacaggatcttctagcaagccgcagagtagaagaggctttggttttagcaaaaggagcccggaggaacattccaaaggaaaaatttcaggtaatgtacagaaggattctgcagcaggcgggatttatacagtttgcacaacttcagttcctggaagctaaagagctcttcagaagcggccagcttgatgtccgggagctgatctctctctaccccttcctgttgcccacctcctcctccttcacccggtcccaccctcctcttcatgagtacgcagacctgaaccagctgacccagggggaccaggagaagatggccaagtgcaaacgcttcctcatgagctacctgaangaggtccgcagcacagaggtagcaaatggctacaaggaggacatcgacacagccttgctcaaactgtatgcagaggctgaccacgacagcctgctggacctcctggtcactgagaacttctgtcttctgacggacagtgctgcctggctagagaagcacaaaaagtattttgcacttggactgctctatcattataataaccaagatgctgctgcagttcagttgtgggtgaacattgtgaatggcgatgtccaggactccacacgctcagacctgtatgaatacatcgtggattttcttacctactgcttagacgaggaactagtgtgggcctatgctgattgggtcctgcagaaaagtgaagaggtcggagttcaggttttcaccaagagacctttggatgaacagcagaagaacagttttaatccagacgacattatcaattgccttaaaaaataccctaaagcccttgtgaagtatctggaacatcttgtgatagacaagagactgcagaaagaagagtatcacacccacttagctgtgctgtacctggaagaggtgctgctgcagagggcctccgccagtggcaagggtgcagaggccaccgagacgcaggccaagctgcggcggctgctccagaaatctgatttataccgagtccactttcttctcgagaggctgcagggagctggcctgcccatggagagcgccatcctgcacgggaagctgggcgagcatgagaaggcgctgcatatcctggtgcacgagctgcaggactttgcagcggccgaggactactgcctgtggtgctccgagggccgagacccaccccaccgccagcaactctttcacacgctgctggccatctacctgcatgctggccccactgcccacgagctggccgtggctgccgtggacctgctgaaccgccacgccaccgaatttgatgcagcccaggtgctgcagatgctgcctgacacctggtcagtgcagctcctctgcccattcctgatgggggccatgagggacagcatccatgccaggaggaccatgcaggtggctctcggcctggccaggtccgaaaacttaatctacacctacgataagatgaagttgaaaggaagctcaatccaactctcagacaaaaagctttgtcagatatgccaaaatcccttttgtgagcctgtgtttgttagatacccaaatggtggtcttgtgcacacccactgtgccgccagcagacacacaaaccccagctcatccagtcctggcactcggacttgaaaagcttggcccaagggtgcgaggggaactccgagttctttctgagcctgctggacatgaagagcagatgaccaccatgctctgtgtcagccaggacgaagggagacatctgggtgccagggagccttccgtccatacgcaacaaggactcctcgctgctgaccaggctctatgaatgtacatggaatgaccaggctctatgaatgtacatggaaaacccctaaaaatccccaaaacagaaacatacaagagttcacctgtccaggtacatagtaatccaagacagaggtctactttgaaaaaaaaaaaagggagtcttcctcatgcagtccaagacccaggtgggggatcccccaccacccccacactccaacctttagactcatgtttgcactggaaacgtggcttcaccatggctggcgacaaagtcctctcttgcctgggtgagtggcgagggcacagagcctcatgggggtcagccttgccctcctgcagaaacacgttctccatccacgccgctcactcatgggcccatttcccagggttacctcgtgggctctgcctttgccctcagaaacggctgaccctggagaagtacctttgttccttctttcttcctctccggctctcagctcccaaaagattctgccttgtgtacccaagcactcactcttgggtgaactaatgcttctggctgcctagcaagtgaagatctgttgagaaactgagaacgctccaagagagaagctgctctcccctccttgaagaagccgcggacacgggaaacccacggcgggcaagggcccagctgtgtgctcctttcctgtcatggcatctgctgatttgaaactccatgacgaacacgttgaactaaacatttttatttaaatttgtatcatgttcgtagttgctctcttgttgagagagtcatctgtcctgtttgttaggggtattttttcttgttaaaatgtatctcctgttgaatactcgggaaattcaaagggaagtgtggtcagcacacactgagcgttcttttctggagaggccggttttagcctcgtacctttagcaggaccgacagcgggtggaagggcccgtgtgctggatgggggtgtcgcctcctggatggcacaccctcccgaggacatccagacaggctgtgtcaccctccagcactttatgtgcctgctctgaggtgtcctgaacacacagcaacggcctctccttcatcacaggccggggattccttttgtgtttctgtataacatcgatgacgagctgaagctgttgtcacttcactgccctctttggaatttcttcattgtgctgactgattctattaggggctaacaataaaggcagtctacccactactatcatgcttgggaaacaagcgtcagcttgtacatatgacaagagaggaccctgaatacaccctctcttcatcagcccaagccttactgaggtgggatgaagacctcattctctgttctttaaaacatgtttcgtgaactaatattggtccatgtattttttgtccttttgggactctaagtgggtcaagaagcaaaaacatccatgtgttgtttggggggaattggcaccattttttcctgactatgtttcaattaactaaagaataaatgatgaagaaattctccttgtagcacaactgtatgctgtgtaaattggtgtgagctcaaagcccagtcatgtgttttacctgtgggtgactctgttgtagaatggtcatattactgcatatgttatcatgacaacttgtgagtttgagtttatatttctcaaagaacaagttacccgtatatgcaacattgcgccattaaaagcttatttctctgtacacaaaatgggtaaaatcttgaaaaaacttagtaatttctcattcctaacacacagacagagtctcactctgtcacccaggctggagtgcagtggcgcaatctcggctcactgcaacctccacctcctgggttcaagcaattctgctgcctcagcctcccgagtagctgggactacaggtgcatgccaccacgcccagctaatttttgtatttttagtagagacggggtttcaccatgttggccaggatggtctcggtctcctgacctcgtgatctgcctgcctcggcctcccaaagtgctgggattacaggcgtgagccactgcgcccagccaacactagtcatttttattttttcactgaacattgatcaatactctaaaatgtttgtcatcctttagaataatgggaattaaagttgagcagttttccatctctaccaaatccttcaccacaagcagcattctattacagtatgaagaattgtctcatatgttaaaactgtacttttctctaacctttctctcactcctacaaggcccttttctcaaatcatatttctgagagaaatgtatggttctttctcacaggcctgctgatttgtaactgtgccatcgaatagagcaattagatccatcagacctttttcccctcattaggttcagtggaaccattctggttaaaacagcatgaactgaactcagtttacattcatattctatgggcaataccatttggtttttggaactgtttatctgctgttccctatcaagtattaatgtagggatgtcactcaggctgcgttgcactgggctgagttcaactgcgacgctctcactgacgcgtgcttacatgtgcttctcacttccggagcacaggcaggtggctgcggggtcccagctctgaatggatgcccatgatgcaactggggcagcccttgctttttgcttgctctcccacagaaacctttgtccttgcaactttatcctttgtcccgattgggtcccagatacacaaaatgtacaaatgtaaacttgctcattttattaaaattcttttagttctttgttctttctgtaattttttaaaataaaaattgccttgatggagtgatggttttcactcgcaccatacctagtctaaataaagagttctagaatctgta

SEQ ID NO: 72603 - DNA, 827 bp, Homo sapiens
ccagcccaggagccgcgggccggagcggggcggcggggccccaggccgcggggcggcgcgggacggcgggcgccggcgccgcagatcagccagtagacatgatgagcatcaaagcctttacgcttgtctctgctgtggagcgggagctgctgatgggcgacaaggagcgcgtcaacatagagtgcgtggagtgctgcggcagggacctctacgtgggcaccaacgactgcttcgtctaccacttcctgttggaggagaggccagtgcctgctgggccagccacgttcactgccaccaaacagctgcagagacacttgggcttcaagaagcccgtgaacgagctgcgcgcggcctcagcactcaacaggctgctggtgctgtgtgacaactccatcagcctggtcaacatgctgaacctcgagccagtgccttcgggggcccgcatcaagggggcagccacgtttgcactgaacgagaaccctgtgagtggggaccccttctgtgtagaagtttgcatcatctctgtcaaacgcagaaccatccagatgtttctggtgtacgaggaccgggtgcagatcgtcaaggaggtgtcgactgccgagcagcccctcgctgtggctgtggacggccacttcctgtgtctggctctgaccactcagtacatcatccacaattacagcacaggcgtctcccaggacctgtttccctactgcagtgaggagaggccgccgatcgtcaagaggatagggagacaggagttcctgctggcgggccccggagggctgggtgaggaggatgcatttgtgcgcctgatctttttgggtggc

SEQ ID NO: 72604 - DNA, 5679 bp, Homo sapiens
  misc_feature (1398)..(1398): n is a, c, g, or t
ccagcccaggagccgcgggccggagcggggcggcggggccccaggccgcggggcggcgcgggacggcgggcgccggcgccgcagatcagccagtagacatgatgagcatcaaagcctttacgcttgtctctgctgtggagcgggagctgctgatgggcgacaaggagcgcgtcaacatagagtgcgtggagtgctgcggcagggacctctacgtgggcaccaacgactgcttcgtctaccacttcctgttggaggagaggccagtgcctgctgggccagccacgttcactgccaccaaacagctgcagagacacttgggcttcaagaagcccgtgaacgagctgcgcgcggcctcagcactcaacaggctgctggtgctgtgtgacaactccatcagcctggtcaacatgctgaacctcgagccagtgccttcgggggcccgcatcaagggggcagccacgtttgcactgaacgagaaccctgtgagtggggaccccttctgtgtagaagtttgcatcatctctgtcaaacgcagaaccatccagatgtttctggtgtacgaggaccgggtgcagatcgtcaaggaggtgtcgactgccgagcagcccctcgctgtggctgtggacggccacttcctgtgtctggctctgaccactcagtacatcatccacaattacagcacaggcgtctcccaggacctgtttccctactgcagtgaggagaggccgccgatcgtcaagaggatagggagacaggagttcctgctggcgggccccggagggctgggcatgtttgccacagtcgcagggatatcccagcgcgcccccgtgcactggtcggagaatgtgattggggcggctgtgtcctttccatacgtcatagcgctcgatgacgaattcattcacagtccacagcatgttggatcagcaacagaagcagacgctgccctttaaggagggccatatcctacaggactttgaaggaagagtgatcgttgccacaagtaaaggagtttacatcttggttccattacctttggaaaaacaaatacaggatcttctagcaagccgcagagtagaagaggctttggttttagcaaaaggagcccggaggaacattccaaaggaaaaatttcaggtaatgtacagaaggattctgcagcaggcgggatttatacagtttgcacaacttcagttcctggaagctaaagagctcttcagaagcggccagcttgatgtccgggagctgatctctctctaccccttcctgttgcccacctcctcctccttcacccggtcccaccctcctcttcatgagtacgcagacctgaaccagctgacccagggggaccaggagaagatggccaagtgcaaacgcttcctcatgagctacctgaangaggtccgcagcacagaggtagcaaatggctacaaggaggacatcgacacagccttgctcaaactgtatgcagaggctgaccacgacagcctgctggacctcctggtcactgagaacttctgtcttctgacggacagtgctgcctggctagagaagcacaaaaagtattttgcacttggactgctctatcattataataaccaagatgctgctgcagttcagttgtgggtgaacattgtgaatggcgatgtccaggactccacacgctcagacctgtatgaatacatcgtggattttcttacctactgcttagacgaggaactagtgtgggcctatgctgattgggtcctgcagaaaagtgaagaggtcggagttcaggttttcaccaagagacctttggatgaacagcagaagaacagttttaatccagacgacattatcaattgccttaaaaaataccctaaagcccttgtgaagtatctggaacatcttgtgatagacaagagactgcagaaagaagagtatcacacccacttagctgtgctgtacctggaagaggtgctgctgcagagggcctccgccagtggcaagggtgcagaggccaccgagacgcaggccaagctgcggcggctgctccagaaatctgatttataccgagtccactttcttctcgagaggctgcagggagctggcctgcccatggagagcgccatcctgcacgggaagctgggcgagcatgagaaggcgctgcatatcctggtgcacgagctgcaggactttgcagcggccgaggactactgcctgtggtgctccgagggccgagacccaccccaccgccagcaactctttcacacgctgctggccatctacctgcatgctggccccactgcccacgagctggccgtggctgccgtggacctgctgaaccgccacgccaccgaatttgatgcagcccaggtgctgcagatgctgcctgacacctggtcagtgcagctcctctgcccattcctgatgggggccatgagggacagcatccatgccaggaggaccatgcaggtggctctcggcctggccaggtccgaaaacttaatctacacctacgataagatgaagttgaaaggaagctcaatccaactctcagacaaaaagctttgtcagatatgccaaaatcccttttgtgagcctgtgtttgttagatacccaaatggtggtcttgtgcacacccactgtgccgccagcagacacacaaaccccagctcatccagtcctggcactcggacttgaaaagcttggcccaagggtgcgaggggaactccgagttctttctgagcctgctggacatgaagagcagatgaccaccatgctctgtgtcagccaggacgaagggagacatctgggtgccagggagccttccgtccatacgcaacaaggactcctcgctgctgaccaggctctatgaatgtacatggaaaacccctaaaaatccccaaaacagaaacatacaagagttcacctgtccaggtacatagtaatccaagacagaggtctactttgaaaaaaaaaaaagggagtcttcctcatgcagtccaagacccaggtgggggatcccccaccacccccacactccaacctttagactcatgtttgcactggaaacgtggcttcaccatggctggcgacaaagtcctctcttgcctgggtgagtggcgagggcacagagcctcatgggggtcagccttgccctcctgcagaaacacgttctccatccacgccgctcactcatgggcccatttcccagggttacctcgtgggctctgcctttgccctcagaaacggctgaccctggagaagtacctttgttccttctttcttcctctccggctctcagctcccaaaagattctgccttgtgtacccaagcactcactcttgggtgaactaatgcttctggctgcctagcaagtgaagatctgttgagaaactgagaacgctccaagagagaagctgctctcccctccttgaagaagccgcggacacgggaaacccacggcgggcaagggcccagctgtgtgctcctttcctgtcatggcatctgctgatttgaaactccatgacgaacacgttgaactaaacatttttatttaaatttgtatcatgttcgtagttgctctcttgttgagagagtcatctgtcctgtttgttaggggtattttttcttgttaaaatgtatctcctgttgaatactcgggaaattcaaagggaagtgtggtcagcacacactgagcgttcttttctggagaggccggttttagcctcgtacctttagcaggaccgacagcgggtggaagggcccgtgtgctggatgggggtgtcgcctcctggatggcacaccctcccgaggacatccagacaggctgtgtcaccctccagcactttatgtgcctgctctgaggtgtcctgaacacacagcaacggcctctccttcatcacaggccggggattccttttgtgtttctgtataacatcgatgacgagctgaagctgttgtcacttcactgccctctttggaatttcttcattgtgctgactgattctattaggggctaacaataaaggcagtctacccactactatcatgcttgggaaacaagcgtcagcttgtacatatgacaagagaggaccctgaatacaccctctcttcatcagcccaagccttactgaggtgggatgaagacctcattctctgttctttaaaacatgtttcgtgaactaatattggtccatgtattttttgtccttttgggactctaagtgggtcaagaagcaaaaacatccatgtgttgtttggggggaattggcaccattttttcctgactatgtttcaattaactaaagaataaatgatgaagaaattctccttgtagcacaactgtatgctgtgtaaattggtgtgagctcaaagcccagtcatgtgttttacctgtgggtgactctgttgtagaatggtcatattactgcatatgttatcatgacaacttgtgagtttgagtttatatttctcaaagaacaagttacccgtatatgcaacattgcgccattaaaagcttatttctctgtacacaaaatgggtaaaatcttgaaaaaacttagtaatttctcattcctaacacacagacagagtctcactctgtcacccaggctggagtgcagtggcgcaatctcggctcactgcaacctccacctcctgggttcaagcaattctgctgcctcagcctcccgagtagctgggactacaggtgcatgccaccacgcccagctaatttttgtatttttagtagagacggggtttcaccatgttggccaggatggtctcggtctcctgacctcgtgatctgcctgcctcggcctcccaaagtgctgggattacaggcgtgagccactgcgcccagccaacactagtcatttttattttttcactgaacattgatcaatactctaaaatgtttgtcatcctttagaataatgggaattaaagttgagcagttttccatctctaccaaatccttcaccacaagcagcattctattacagtatgaagaattgtctcatatgttaaaactgtacttttctctaacctttctctcactcctacaaggcccttttctcaaatcatatttctgagagaaatgtatggttctttctcacaggcctgctgatttgtaactgtgccatcgaatagagcaattagatccatcagacctttttcccctcattaggttcagtggaaccattctggttaaaacagcatgaactgaactcagtttacattcatattctatgggcaataccatttggtttttggaactgtttatctgctgttccctatcaagtattaatgtagggatgtcactcaggctgcgttgcactgggctgagttcaactgcgacgctctcactgacgcgtgcttacatgtgcttctcacttccggagcacaggcaggtggctgcggggtcccagctctgaatggatgcccatgatgcaactggggcagcccttgctttttgcttgctctcccacagaaacctttgtccttgcaactttatcctttgtcccgattgggtcccagatacacaaaatgtacaaatgtaaacttgctcattttattaaaattcttttagttctttgttctttctgtaattttttaaaataaaaattgccttgatggagtgatggttttcactcgcaccatacctagtctaaataaagagttctagaatctgta

SEQ ID NO: 72605 - DNA, 4526 bp, Homo sapiens
  misc_feature (1342)..(1342): n is a, c, g, or t
catccacaattacagcacagggccgcagatcagccagtagacatgatgagcatcaaagcctttacgcttgtctctgctgtggagcgggagctgctgatgggcgacaaggagcgcgtcaacatagagtgcgtggagtgctgcggcagggacctctacgtgggcaccaacgactgcttcgtctaccacttcctgttggaggagaggccagtgcctgctgggccagccacgttcactgccaccaaacagctgcagagacacttgggcttcaagaagcccgtgaacgagctgcgcgcggcctcagcactcaacaggctgctggtgctgtgtgacaactccatcagcctggtcaacatgctgaacctcgagccagtgccttcgggggcccgcatcaagggggcagccacgtttgcactgaacgagaaccctgtgagtggggaccccttctgtgtagaagtttgcatcatctctgtcaaacgcagaaccatccagatgtttctggtgtacgaggaccgggtgcagatcgtcaaggaggtgtcgactgccgagcagcccctcgctgtggctgtggacggccacttcctgtgtctggctctgaccactcagtacatcatccacaattacagcacaggcgtctcccaggacctgtttccctactgcagtgaggagaggccgccgatcgtcaagaggatagggagacaggagttcctgctggcgggccccggagggctgggcatgtttgccacagtcgcagggatatcccagcgcgcccccgtgcactggtcggagaatgtgattggggcggctgtgtcctttccatacgtcatagcgctcgatgacgaattcattcacagtccacagcatgttggatcagcaacagaagcagacgctgccctttaaggagggccatatcctacaggactttgaaggaagagtgatcgttgccacaagtaaaggagtttacatcttggttccattacctttggaaaaacaaatacaggatcttctagcaagccgcagagtagaagaggctttggttttagcaaaaggagcccggaggaacattccaaaggaaaaatttcaggtaatgtacagaaggattctgcagcaggcgggatttatacagtttgcacaacttcagttcctggaagctaaagagctcttcagaagcggccagcttgatgtccgggagctgatctctctctaccccttcctgttgcccacctcctcctccttcacccggtcccaccctcctcttcatgagtacgcagacctgaaccagctgacccagggggaccaggagaagatggccaagtgcaaacgcttcctcatgagctacctgaangaggtccgcagcacagaggtagcaaatggctacaaggaggacatcgacacagccttgctcaaactgtatgcagaggctgaccacgacagcctgctggacctcctggtcactgagaacttctgtcttctgacggacagtgctgcctggctagagaagcacaaaaagtattttgcacttggactgctctatcattataataaccaagatgctgctgcagttcagttgtgggtgaacattgtgaatggcgatgtccaggactccacacgctcagacctgtatgaatacatcgtggattttcttacctactgcttagacgaggaactagtgtgggcctatgctgattgggtcctgcagaaaagtgaagaggtcggagttcaggttttcaccaagagacctttggatgaacagcagaagaacagttttaatccagacgacattatcaattgccttaaaaaataccctaaagcccttgtgaagtatctggaacatcttgtgatagacaagagactgcagaaagaagagtatcacacccacttagctgtgctgtacctggaagaggtgctgctgcagagggcctccgccagtggcaagggtgcagaggccaccgagacgcaggccaagctgcggcggctgctccagaaatctgatttataccgagtccactttcttctcgagaggctgcagggagctggcctgcccatggagagcgccatcctgcacgggaagctgggcgagcatgagaaggcgctgcatatcctggtgcacgagctgcaggactttgcagcggccgaggactactgcctgtggtgctccgagggccgagacccaccccaccgccagcaactctttcacacgctgctggccatctacctgcatgctggccccactgcccacgagctggccgtggctgccgtggacctgctgaaccgccacgccaccgaatttgatgcagcccaggtgctgcagatgctgcctgacacctggtcagtgcagctcctctgcccattcctgatgggggccatgagggacagcatccatgccaggaggaccatgcaggtggctctcggcctggccaggtccgaaaacttaatctacacctacgataagatgaagttgaaaggaagctcaatccaactctcagacaaaaagctttgtcagatatgccaaaatcccttttgtgagcctgtgtttgttagatacccaaatggtggtcttgtgcacacccactgtgccgccagcagacacacaaaccccagctcatccagtcctggcactcggacttgaaaagcttggcccaagggtgcgaggggaactccgagttctttctgagcctgctggacatgaagagcagatgaccaccatgctctgtgtcagccaggacgaagggagacatctgggtgccagggagccttccgtccatacgcaacaaggactcctcgctgctgaccaggctctatgaatgtacatggaaaacccctaaaaatccccaaaacagaaacatacaagagttcacctgtccaggtacatagtaatccaagacagaggtctactttgaaaaaaaaaaaagggagtcttcctcatgcagtccaagacccaggtgggggatcccccaccacccccacactccaacctttagactcatgtttgcactggaaacgtggcttcaccatggctggcgacaaagtcctctcttgcctgggtgagtggcgagggcacagagcctcatgggggtcagccttgccctcctgcagaaacacgttctccatccacgccgctcactcatgggcccatttcccagggttacctcgtgggctctgcctttgccctcagaaacggctgaccctggagaagtacctttgttccttctttcttcctctccggctctcagctcccaaaagattctgccttgtgtacccaagcactcactcttgggtgaactaatgcttctggctgcctagcaagtgaagatctgttgagaaactgagaacgctccaagagagaagctgctctcccctccttgaagaagccgcggacacgggaaacccacggcgggcaagggcccagctgtgtgctcctttcctgtcatggcatctgctgatttgaaactccatgacgaacacgttgaactaaacatttttatttaaatttgtatcatgttcgtagttgctctcttgttgagagagtcatctgtcctgtttgttaggggtattttttcttgttaaaatgtatctcctgttgaatactcgggaaattcaaagggaagtgtggtcagcacacactgagcgttcttttctggagaggccggttttagcctcgtacctttagcaggaccgacagcgggtggaagggcccgtgtgctggatgggggtgtcgcctcctggatggcacaccctcccgaggacatccagacaggctgtgtcaccctccagcactttatgtgcctgctctgaggtgtcctgaacacacagcaacggcctctccttcatcacaggccggggattccttttgtgtttctgtataacatcgatgacgagctgaagctgttgtcacttcactgccctctttggaatttcttcattgtgctgactgattctattaggggctaacaataaaggcagtctacccactactatcatgcttgggaaacaagcgtcagcttgtacatatgacaagagaggaccctgaatacaccctctcttcatcagcccaagccttactgaggtgggatgaagacctcattctctgttctttaaaacatgtttcgtgaactaatattggtccatgtattttttgtccttttgggactctaagtgggtcaagaagcaaaaacatccatgtgttgtttggggggaattggcaccattttttcctgactatgtttcaattaactaaagaataaatgatgaagaaattctccttgtaaaaaggcctacgtgaactgagttcaagaccgaaagtaccaggtcgattactatctacttcaaatttactccaagaaccattggcgcccgcttgtgccaattcctttttaaattcgacaaactttttgaatgcggccgcatttcgggctcattgggccaattccctctataggggggcgtttacaaatcaaatggcgcgtgtttcaaacggttgggatctgggaacacccctgggggtccccaacttccccctggggcgtccc

SEQ ID NO: 72606 - DNA, 5646 bp, Homo sapiens
  misc_feature (1398)..(1398): n is a, c, g, or t
ccagcccaggagccgcgggccggagcggggcggcggggccccaggccgcggggcggcgcgggacggcgggcgccggcgccgcagatcagccagtagacatgatgagcatcaaagcctttacgcttgtctctgctgtggagcgggagctgctgatgggcgacaaggagcgcgtcaacatagagtgcgtggagtgctgcggcagggacctctacgtgggcaccaacgactgcttcgtctaccacttcctgttggaggagaggccagtgcctgctgggccagccacgttcactgccaccaaacagctgcagagacacttgggcttcaagaagcccgtgaacgagctgcgcgcggcctcagcactcaacaggctgctggtgctgtgtgacaactccatcagcctggtcaacatgctgaacctcgagccagtgccttcgggggcccgcatcaagggggcagccacgtttgcactgaacgagaaccctgtgagtggggaccccttctgtgtagaagtttgcatcatctctgtcaaacgcagaaccatccagatgtttctggtgtacgaggaccgggtgcagatcgtcaaggaggtgtcgactgccgagcagcccctcgctgtggctgtggacggccacttcctgtgtctggctctgaccactcagtacatcatccacaattacagcacaggcgtctcccaggacctgtttccctactgcagtgaggagaggccgccgatcgtcaagaggatagggagacaggagttcctgctggcgggccccggagggctgggcatgtttgccacagtcgcagggatatcccagcgcgcccccgtgcactggtcggagaatgtgattggggcggctgtgtcctttccatacgtcatagcgctcgatgacgaattcattcacagtccacagcatgttggatcagcaacagaagcagacgctgccctttaaggagggccatatcctacaggactttgaaggaagagtgatcgttgccacaagtaaaggagtttacatcttggttccattacctttggaaaaacaaatacaggatcttctagcaagccgcagagtagaagaggctttggttttagcaaaaggagcccggaggaacattccaaaggaaaaatttcaggtaatgtacagaaggattctgcagcaggcgggatttatacagtttgcacaacttcagttcctggaagctaaagagctcttcagaagcggccagcttgatgtccgggagctgatctctctctaccccttcctgttgcccacctcctcctccttcacccggtcccaccctcctcttcatgagtacgcagacctgaaccagctgacccagggggaccaggagaagatggccaagtgcaaacgcttcctcatgagctacctgaangaggtccgcagcacagaggtagcaaatggctacaaggaggacatcgacacagccttgctcaaactgtatgcagaggctgaccacgacagcctgctggacctcctggtcactgagaacttctgtcttctgacggacagtgctgcctggctagagaagcacaaaaagtattttgcacttggactgctctatcattataataaccaagatgctgctgcagttcagttgtgggtgaacattgtgaatggcgatgtccaggactccacacgctcagacctgtatgaatacatcgtggattttcttacctactgcttagacgaggaactagtgtgggcctatgctgattgggtcctgcagaaaagtgaagaggtcggagttcaggttttcaccaagagacctttggatgaacagcagaagaacagttttaatccagacgacattatcaattgccttaaaaaataccctaaagcccttgtgaagtatctggaacatcttgtgatagacaagagactgcagaaagaagagtatcacacccacttagctgtgctgtacctggaagaggtgctgctgcagagggcctccgccagtggcaagggtgcagaggccaccgagacgcaggccaagctgcggcggctgctccagaaatctgatttataccgagtccactttcttctcgagaggctgcagggagctggcctgcccatggagagcgccatcctgcacgggaagctgggcgagcatgagaaggcgctgcatatcctggtgcacgagctgcaggactttgcagcggccgaggactactgcctgtggtgctccgagggccgagacccaccccaccgccagcaactctttcacacgctgctggccatctacctgcatgctggccccactgcccacgagctggccgtggctgccgtggacctgctgaaccgccacgccaccgaatttgatgcagcccaggtgctgcagatgctgcctgacacctggtcagtgcagctcctctgcccattcctgatgggggccatgagggacagcatccatgccaggaggaccatgcaggtggctctcggcctggccaggtccgaaaacttaatctacacctacgataagatgaagttgaaaggaagctcaatccaactctcagacaaaaagctttgtcagatatgccaaaatcccttttgtgagcctgtgtttgttagatacccaaatggtggtcttgtgcacacccactgtgccgccagcagacacacaaaccccagctcatccagtcctggcactcggacttgaaaagcttggcccaagggtgcgaggggaactccgagttctttctgagcctgctggacatgaagagcagatgaccaccatgctctgtgtcagccaggacgaagggagacatctgggtgccagggagccttccgtccatacgcaacaaggactcctcgctgctgaccaggctctatgaatgtacatggaatgaccaggctctatgaatgtacatggaaaacccctaaaaatccccaaaacagaaacatacaagagttcacctgtccaggtacatagtaatccaagacagaggtctactttgaccccacactccaacctttagactcatgtttgcactggaaacgtggcttcaccatggctggcgacaaagtcctctcttgcctgggtgagtggcgagggcacagagcctcatgggggtcagccttgccctcctgcagaaacacgttctccatccacgccgctcactcatgggcccatttcccagggttacctcgtgggctctgcctttgccctcagaaacggctgaccctggagaagtacctttgttccttctttcttcctctccggctctcagctcccaaaagattctgccttgtgtacccaagcactcactcttgggtgaactaatgcttctggctgcctagcaagtgaagatctgttgagaaactgagaacgctccaagagagaagctgctctcccctccttgaagaagccgcggacacgggaaacccacggcgggcaagggcccagctgtgtgctcctttcctgtcatggcatctgctgatttgaaactccatgacgaacacgttgaactaaacatttttatttaaatttgtatcatgttcgtagttgctctcttgttgagagagtcatctgtcctgtttgttaggggtattttttcttgttaaaatgtatctcctgttgaatactcgggaaattcaaagggaagtgtggtcagcacacactgagcgttcttttctggagaggccggttttagcctcgtacctttagcaggaccgacagcgggtggaagggcccgtgtgctggatgggggtgtcgcctcctggatggcacaccctcccgaggacatccagacaggctgtgtcaccctccagcactttatgtgcctgctctgaggtgtcctgaacacacagcaacggcctctccttcatcacaggccggggattccttttgtgtttctgtataacatcgatgacgagctgaagctgttgtcacttcactgccctctttggaatttcttcattgtgctgactgattctattaggggctaacaataaaggcagtctacccactactatcatgcttgggaaacaagcgtcagcttgtacatatgacaagagaggaccctgaatacaccctctcttcatcagcccaagccttactgaggtgggatgaagacctcattctctgttctttaaaacatgtttcgtgaactaatattggtccatgtattttttgtccttttgggactctaagtgggtcaagaagcaaaaacatccatgtgttgtttggggggaattggcaccattttttcctgactatgtttcaattaactaaagaataaatgatgaagaaattctccttgtagcacaactgtatgctgtgtaaattggtgtgagctcaaagcccagtcatgtgttttacctgtgggtgactctgttgtagaatggtcatattactgcatatgttatcatgacaacttgtgagtttgagtttatatttctcaaagaacaagttacccgtatatgcaacattgcgccattaaaagcttatttctctgtacacaaaatgggtaaaatcttgaaaaaacttagtaatttctcattcctaacacacagacagagtctcactctgtcacccaggctggagtgcagtggcgcaatctcggctcactgcaacctccacctcctgggttcaagcaattctgctgcctcagcctcccgagtagctgggactacaggtgcatgccaccacgcccagctaatttttgtatttttagtagagacggggtttcaccatgttggccaggatggtctcggtctcctgacctcgtgatctgcctgcctcggcctcccaaagtgctgggattacaggcgtgagccactgcgcccagccaacactagtcatttttattttttcactgaacattgatcaatactctaaaatgtttgtcatcctttagaataatgggaattaaagttgagcagttttccatctctaccaaatccttcaccacaagcagcattctattacagtatgaagaattgtctcatatgttaaaactgtacttttctctaacctttctctcactcctacaaggcccttttctcaaatcatatttctgagagaaatgtatggttctttctcacaggcctgctgatttgtaactgtgccatcgaatagagcaattagatccatcagacctttttcccctcattaggttcagtggaaccattctggttaaaacagcatgaactgaactcagtttacattcatattctatgggcaataccatttggtttttggaactgtttatctgctgttccctatcaagtattaatgtagggatgtcactcaggctgcgttgcactgggctgagttcaactgcgacgctctcactgacgcgtgcttacatgtgcttctcacttccggagcacaggcaggtggctgcggggtcccagctctgaatggatgcccatgatgcaactggggcagcccttgctttttgcttgctctcccacagaaacctttgtccttgcaactttatcctttgtcccgattgggtcccagatacacaaaatgtacaaatgtaaacttgctcattttattaaaattcttttagttctttgttctttctgtaattttttaaaataaaaattgccttgatggagtgatggttttcactcgcaccatacctagtctaaataaagagttctagaatctgta

SEQ ID NO: 72607 - DNA, 351 bp, Homo sapiens
taacatgagaataagatgaaacctatctcataagactgtcatggtaatcaaatgagtaaatacaggcagggcgcagtggctcacgcctgtaatcccagcactttgggaggccaaggctggtgaatcacttgaggtcaggcattcgagaccagcctggccaacacagtgaaacccccatctctactaaatatacaaaaattagccaggtgttgtggtgggcacctgtaatcccagctacttgggaggctggggcaggagaatcccttgagcccaggaggcagaggttgcagtgagctgagattgtgccactgcactccagcctgggtgacagagtgagactccatctcaaaa

SEQ ID NO: 72608 - DNA, 155 bp, Homo sapiens
ccataatgtcaaacactacatattttttaaaagaatgaaaatttggacagaggttgtaaagtgatggcccaaaatggaaaggatgtatatctggccaataatttttaaaaataaaatattattaacctcctagtatatatagaaaatgaaatctg

SEQ ID NO: 72609 - DNA, 484 bp, Homo sapiens
agtagagacagggttttgccatgttggccaggctggtcttgaactcctgacctcaggtgatcacccgccttggcctcccaaagtgctggcattacaggcctgagccaccgcacccagccgtaattgatattttttaaaagaattatatactaaaacttcttcatttctcacaaattagtttaggcctgcctttaataagcagttcaaacccaagattcaaggaatagggattctgaaagagaggtttttgttaggcgcattttaatatctttctttctaatttgaatttcactcaaatgagcactttaaatatgaatcaaaatgcctattttaatattagaagtaacataaacatattgtagatgactattgaaaaagctctagttaaaaattttatgataatgattggatagcattaagatattatgtctattgttaaggtgagtaatataaaaggaagttttagccaagcttacagagaata

SEQ ID NO: 72610 - DNA, 423 bp, Homo sapiens
tttttaagcctctcactcaccataggttaagagtatgatccactctaccggttcactgccagttctctgtatttacattaaaactgggtgtacattttaaaatatagattcctgaatcccaccaccagagatgatcccagaatctgccttttagcaagaaccccaaagtattccagtgcaggtgaccactgaccatgcattgaaaaacacagtgccctgacacatgagtgtaaactgagctgagagcaagggccatgaaattctccaagaatcaaaagtattttgtccttgaacttccaagtgaagatgtaaaactggttaatataaaaaccactgttcagtttattacaaatcatttcccacttcctgttgctacaaaaagcagcctttcctttcaaaagatgttttccagggctcagggga

SEQ ID NO: 72611 - DNA, 336 bp, Homo sapiens
gtcatgaatatgttttaaatgtacgttatttaaaaatttggacaattttaacacctttatcataatgtgtaatgtttttgcatttcctcaaacacattttgctaattgctgctttagagacatcttaagaaacatgacttcaaagtagcgtgctgagttctatactacaaaattacatcttttggatcttcaaaagcacattgacttttacttaaacagtaatttgtctcaatttatttctgtaaataaattggagagttggaataattttgggtggacacattaccctaattattgcaattccccacagaattttgttttataaactcttcatta

SEQ ID NO: 72612 - DNA, 920 bp, Homo sapiens
atagctcaatttcacttacagatacatttaacgccactagatacaaagtaaaaactttgtctattatctgctgaatgtgtcatttcccacaggtgctaagaacgctcaagccatggagagagatgcatttggagttgtttacattcagacaaagctcatctggttgtttgcagctagtcacaaggtggcccattgtcctgccttgcttttctccattatctctgggtcaagttgtttctttgataaatccaaatcatgaaaatagcctgctgaaagaattcactttgaaaatgccacaaaacagacaatggaaaaatgagatgaacaagtgcgaatccatcattcttctcaggttctggaaaaatgctggttttcagctcctggaaaattctcacaagacatctgttttgttttatatcttcatttgtttccattcatctttcctactgtagacactgtctatgatttttttgtgtgggggttttggcaaagtgcatacgattactttgaatttagagaattaaattgtatttatccactgaaagctgtttttaagatctagctgtgttgtcacttggatatctagtttattacttctacttgcaaagtagtacaatgagataccaaaccaccatattttttccatctattttctcaattatggacacttttcaacttattactacagtagggaagttaaaggctatttgaattattggagaatagagatacctaggatcagaattaccaagtcatagaccgaaactttggctaagacctaaacttaatatgggtaaatattgttacattgctccctagaatattgatatggtttggatttgtgtccccacgcaaatctcatgttgaattgtaatcctcaatgttggaggtggggaatggtaaggggtgattagatcctg

SEQ ID NO: 72613 - DNA, 295 bp, Homo sapiens
atagctcaatttcacttacagatacatttaacgccactagatacaaagtaaaaactttgtctattatctgctgaatgtgtcatttcccacaggtgctaagaacgctcaagccatggagagagatgcatttggagttgtttacattcagacaaagctcatctggttgtttgcagctagtcacaaggtaagcaggggcgtgcatgcgcacacacacacacacgtgaattatatatttcaaaataaattggaattacataaattaaaaaataaatattttaaaatatgatttttaaat

SEQ ID NO: 72614 - DNA, 228 bp, Homo sapiens
ctcagatgtttggacaatgtgtcgtcatgtctgcaacttttcagtggttcagccaaagaagaaattgtccgccatgaacaagagcactctcctacctaacggtgccattgtcacgcctaagaaacattcatacaatcttattgtctgatacagactgtatgtaaatccccaattgtcccaaaaatgtccaagagcttattgagtctaaaatacaacccaagatcacct

SEQ ID NO: 72615 - DNA, 297 bp, Homo sapiens
tacaagaaaatcccgatggcactggcagatatctcttagatgacagcaaaagcacaatttatatttaaatctttgatccacttcgatttaacttttgtatacagtgtgaggcatatattgagtttatttttttaaatatagttatctggttattctagcaccatttgttaaaaacgctagcctttttccacagcactgcctttgtaactttgtcaaaaatcagttgtctaaatacatgtggatctaattttggactcactattcttgtctgttgatctatatgcctatctttatgcc

SEQ ID NO: 72616 - DNA, 754 bp, Homo sapiens
  misc_feature (232)..(232): n is a, c, g, or t
  misc_feature (248)..(249): n is a, c, g, or t
  misc_feature (265)..(265): n is a, c, g, or t
gtaagtaagagcaactcctatctctacagggcagggagggcagggacaaggatccctcatggagcaggaaaatgtatgtgcccagggtggggtcggggggaacataaacaatgaacactgagaccaggtgtgcttgaaatgaccgtgtacagaggtcgctgccctgagtgggaagttctcaaggtagcaggccctctatcctctccacacctcaagtctttatctggggatngaatagctgcggaacnnaggaacttgcagagcnaggggttcagaggggtgaagaagcatgtttcagttctgccttttaaatgatcccaaaaaggttagcagttttcaaatgacatttgcagacagcctcatttaattccatgagaagggtgagcaaaggattatcttgttgaaactgattcctggagagactgagcaccgtacctgagttcaaacttgggaatgttctagatggtgactcaggcccaggcaccaaccagcagaatgggcctcagcctgacaacccttctgtaccaggcctgactctttggttgctgaactttggagaggcctgggggggtcagcggcaggcagacgagtgagtggctttggtgacaggtcctcaggggcagccaggcagtgtgactctcgttcaatagtaacgtttgtcagagcgttgtcaccaccatccgctctgccctatctctgacattgctatggagagcctctaattgttccttgtgtctttctgtttgtccccaca

SEQ ID NO: 72617 - DNA, 499 bp, Homo sapiens
aaaaatttaatttatagcttatgaatttaacttatagataatttgtagctaacttaatttacagcttaatgaagttaaataacatacaaggtattttctctataattttattttaagagcaatttaaaattataagtaggtattttttcagtttttattattcttcttccactgctttattcacattttaggaatactttttaatcattaattccatatgaaaagcataggtgggagggaagaaaaataatcacatatacatacagatgtttagtcttaatttaactttagacacaaaagaatttttattctattaaatgcatgaaccataattgagtaaatataatattttcatcttcgtaatacagaacgtgtactttgttttactttggtttaagcagaccatatgcataaaatcttaatgaaataaacatgtaaattattggtgaatatccaaactataaaaggattcttcactctacaaaagtgatccctaatg

SEQ ID NO: 72618 - DNA, 489 bp, Homo sapiens
cagcatccttagttaaaataaaatctccaacgaaagcatggatataatccccatttccagaaaatcccagaaagaaatgcagcccttgttcagtccaactccatcatttgatagattaggaaaataggttctagagagtgacttgtccactgtcaggagatggtgactgtggcgcgtcatctgactccagcctacttaatgcatttcagtctcttcggccttaagggctcctgctgctcacctgaaatcattcccaaggaacccacaagagcaggttccctgggaggattcctgagaacacctacacacaagcctcagagatctgccaagacattctctttctgataaatactattaaatatttttctatcaaatagttgccaaatgacctgctccagtcaaaactcaatctgacttgtgactacaaagtaatctgaggaatcccaaagatatataaaaatctatccatctaagtcatctctcttcaaa

SEQ ID NO: 72619 - DNA, 1882 bp, Homo sapiens
catttattaaggactctctgctccagcctctcactctcactctcctccgctcaaactcagctcacttgagagtctcctcccgccagctgtggaaagaactttgcgtctctccagcaatgcatctccttgcgattctgttttgtgctctctggtctgcagtgttggccgagaactcggatgattatgatctcatgtatgtgaatttggacaacgaaatagacaatggactccatcccactgaggaccccacgccgtgcgactgcggtcaggagcactcggaatgggacaagctcttcatcatgctggagaactcgcagatgagagagcgcatgctgctgcaagccacggacgacgtcctgcggggcgagctgcagaggctgcgggaggagctgggccggctcgcggaaagcctggcgaggccgtgcgcgccgggggctcccgcagaggccaggctgaccagtgctctggacgagctgctgcaggcgacccgcgacgcgggccgcaggctggcgcgtatggagggcgcggaggcgcagcgcccagaggaggcggggcgcgccctggccgcggtgctagaggagctgcggcagacgcgagccgacctgcacgcggtgcagggctgggctgcccggagctggctgccggcaggttgtgaaacagctattttattcccaatgcgttccaagaagatttttggaagcgtgcatccagtgagaccaatgaggcttgagtcttttagtgcctgcatttgggtcaaagccacagatgtattaaacaaaaccatcctgttttcctatggcacaaagaggaatccatatgaaatccagctgtatctcagctaccaatccatagtgtttgtggtgggtggagaggagaacaaactggttgctgaagccatggtttccctgggaaggtggacccacctgtgcggcacctggaattcagaggaagggctcacatccttgtgggtaaatggtgaactggcggctaccactgttgagatggccacaggtcacattgttcctgagggaggaatcctgcagattggccaagaaaagaatggctgctgtgtgggtggtggctttgatgaaacattagccttctctgggagactcacaggcttcaatatctgggatagtgttcttagcaatgaagagataagagagaccggaggagcagagtcttgtcacatccgggggaatattgttgggtggggagtcacagagatccagccacatggaggagctcagtatgtttcataaatgttgtgaaactccacttgaagccaaagaaagaaactcacacttaaaacacatgccagttgggaaggtctgaaaactcagtgcataataggaacacttgagactaatgaaagagagagttgagaccaatctttatttgtactggccaaatactgaataaacagttgaaggaaagacattggaaaaagcttttgaggataatgttactagactttatgccatggtgctttcagtttaatgctgtgtctctgtcagataaactctcaaataattaaaaaggactgtattgttgaacagagggacaattgttttacttttctttggttaattttgttttggccagagatgaattttacattggaagaataacaaaataagatttgttgtccattgttcattgttattggtatgtaccttattacaaaaaaaatgatgaaaacatatttatactacaaggtgacttaacaactataaatgtagtttatgtgttataatcgaatgtcacgtttttgagaagatagtcatataagttatattgcaaaagggatttgtattaatttaagactatttttgtaaagctctactgtaaataaaatattttataaaactaaaaaacgtca

SEQ ID NO: 72620 - DNA, 1856 bp, Homo sapiens
gctggtacggtctgggatttagggatcaactcagctcacttgagagtctcctcccgccagctgtggaaagaactttgcgtctctccagcaatgcatctccttgcgattctgttttgtgctctctggtctgcagtgttggccgagaactcggatgattatgatctcatgtatgtgaatttggacaacgaaatagacaatggactccatcccactgaggaccccacgccgtgcgactgcggtcaggagcactcggaatgggacaagctcttcatcatgctggagaactcgcagatgagagagcgcatgctgctgcaagccacggacgacgtcctgcggggcgagctgcagaggctgcgggaggagctgggccggctcgcggaaagcctggcgaggccgtgcgcgccgggggctcccgcagaggccaggctgaccagtgctctggacgagctgctgcaggcgacccgcgacgcgggccgcaggctggcgcgtatggagggcgcggaggcgcagcgcccagaggaggcggggcgcgccctggccgcggtgctagaggagctgcggcagacgcgagccgacctgcacgcggtgcagggctgggctgcccggagctggctgccggcaggttgtgaaacagctattttattcccaatgcgttccaagaagatttttggaagcgtgcatccagtgagaccaatgaggcttgagtcttttagtgcctgcatttgggtcaaagccacagatgtattaaacaaaaccatcctgttttcctatggcacaaagaggaatccatatgaaatccagctgtatctcagctaccaatccatagtgtttgtggtgggtggagaggagaacaaactggttgctgaagccatggtttccctgggaaggtggacccacctgtgcggcacctggaattcagaggaagggctcacatccttgtgggtaaatggtgaactggcggctaccactgttgagatggccacaggtcacattgttcctgagggaggaatcctgcagattggccaagaaaagaatggctgctgtgtgggtggtggctttgatgaaacattagccttctctgggagactcacaggcttcaatatctgggatagtgttcttagcaatgaagagataagagagaccggaggagcagagtcttgtcacatccgggggaatattgttgggtggggagtcacagagatccagccacatggaggagctcagtatgtttcataaatgttgtgaaactccacttgaagccaaagaaagaaactcacacttaaaacacatgccagttgggaaggtctgaaaactcagtgcataataggaacacttgagactaatgaaagagagagttgagaccaatctttatttgtactggccaaatactgaataaacagttgaaggaaagacattggaaaaagcttttgaggataatgttactagactttatgccatggtgctttcagtttaatgctgtgtctctgtcagataaactctcaaataattaaaaaggactgtattgttgaacagagggacaattgttttacttttctttggttaattttgttttggccagagatgaattttacattggaagaataacaaaataagatttgttgtccattgttcattgttattggtatgtaccttattacaaaaaaaatgatgaaaacatatttatactacaaggtgacttaacaactataaatgtagtttatgtgttataatcgaatgtcacgtttttgagaagatagtcatataagttatattgcaaaagggatttgtattaatttaagactatttttgtaaagctctactgtaaataaaatattttataaaactaaaaaacgtca

SEQ ID NO: 72621 - DNA, 937 bp, Homo sapiens
  misc_feature (917)..(917): n is a, c, g, or t
catttattaaggactctctgctccagcctctcactctcactctcctccgctcaaactcagctcacttgagagtctcctcccgccagctgtggaaagaactttgcgtctctccagcaatgcatctccttgcgattctgttttgtgctctctggtctgcagtgttggccgagaactcggatgattatgatctcatgtatgtgaatttggacaacgaaatagacaatggactccatcccactgaggaccccacgccgtgcgactgcggtcaggagcactcggaatgggacaagctcttcatcatgctggagaactcgcagatgagagagcgcatgctgctgcaagccacggacgacgtcctgcggggcgagctgcagaggctgcgggaggagctgggccggctcgcggaaagcctggcgaggccgtgcgcgccgggggctcccgcagaggccaggctgaccagtgctctggacgagctgctgcaggcgacccgcgacgcgggccgcaggctggcgcgtatggagggcgcggaggcgcagcgcccagaggaggcggggcgcgccctggccgcggtgctagaggagctgcggcagacgcgagccgacctgcacgcggtgcagggctgggctgcccggagctggctgccggcaggttgtgaaacagctattttattcccaatgcgttccaagaagatttttggaagcgtgcatccagtgagaccaatgaggcttgagtcttttagtgcctgcatttgggtcaaagccacagatgtattaaacaaaaccatcctgttttcctatggcacaaagaggaatccatatgaaatccagctgtatctcagctaccaatccatatttttttttttttttttatattataacaaacttttttcttaatccattttttcccttttaattttnacccaccttttcttcacctt

SEQ ID NO: 72622 - DNA, 126 bp, Homo sapiens
taattactgtctagcacttttctgtgtagatttcctctgggcactcttggattatgggaatccagatgggggaaatgacctggctttgctatcttattttccccagagcagcatttaacaattgct

SEQ ID NO: 72623 - DNA, 1570 bp, Homo sapiens
cggggcagctctgaggaacaaggtggaagctcagagcgctggtctccaccctggtgcccctgggctggtgctggcagtgggagccgtggctgtggatgagagacatagacgagagagtgagatggcctggtttgccctctacctcctgagccttctctgggctacagctgggactagtacccagacccagagttcatgctccgttccctcagcacaggagcccttggtcaatggaatacaagtactcatggagaactcggtgacttcatcagcctacccaaaccccagcatcctgattgccatgaatctggccggagcctacaacttgaaggcccagaagctcctgacttaccagctcatgtccagcgacaacaacgatctaaccattgggcagctcggcctcaccatcatggccctcacctcctcctgccgagaccctggggataaagtatccattctacaaagacaaatggagaactgggcaccttccagccccaacgctgaagcatcagccttctatgggcccagtctagcgatcttggcactgtgccagaagaactctgaggcgaccttgccgatagccgtccgctttgccaagaccctgctggccaactcctctcccttcaatgtagacacaggagcaatggcaaccttggctctgacctgtatgtacaacaagatccctgtaggttcagaggaaggttacagatccctgtttggtcaggtactaaaggatattgtggagaaaatcagcatgaagatcaaagataatggcatcattggagacatctacagtactggcctcgccatgcaggctctctctgtaacacctgagccatctaaaaaggaatggaactgcaagaagactacggatatgatactcaatgagattaagcaggggaaattccacaaccccatgtccattgctcaaatcctcccttccctgaaaggcaagacatacctagatgtgccccaggtcacttgtagtcctgatcatgaggtacaaccaactctacccagcaaccctggccctggccccacctctgcatctaacatcactgtcatatacaccataaataaccagctgaggggggttgagctgctcttcaacgagaccatcaatgttagtgtgaaaagtgggtcagtgttacttgttgtcctagaggaagcacagcgcaaaaatcctatgttcaaatttgaaaccacaatgacatcttggggccttgtcgtctcttctatcaacaatatcgcggaaaatgttaatcacaagacatactggcagtttcttagtggtgtaacacctttgaatgaaggggttgctgactacatacccttcaaccacgagcacatcacagccaatttcacacagtactaacgaagaggtgggttcagcttctatcaaacatctccaaaggatgggtgaaattttttccacttcattttaaatctatgcaaaaaagcgaatgcctgtgatgctaccatattcctggtaaaaacatggagaaccactatgtagaataaaaatgcaaagttcactggagtctcaacatctatgactcatgaaaataaa

SEQ ID NO: 72624 - DNA, 993 bp, Homo sapiens
  misc_feature (31)..(31): n is a, c, g, or t
tagaggatccccatgcgcgacgcttccatcnatgtagacacaggagcaatggcaaccttggctctgacctgtatgtacaacaagatccctgtaggttcagaggaaggttacagatccctgtttggtcaggtactaaaggatattgtggagaaaatcagcatgaagatcaaagataatggcatcattggagacatctacagtactggcctcgccatgcaggtaaacacgtgctggatgctcttggttgggttcctgccaataagcctggattgcagaatcaagaggccaggcttctactaacatctctgtgaaagtccagctagtatgacctgagatatattctttgtggtgcctgggcctcagtttctctactggtaaaatgcaggctctctctgtaacacctgagccatctaaaaaggaatggaactgcaagaagactacggatatgatactcaatgagattaagcaggggaaattccacaaccccatgtccattgctcaaatcctcccttccctgaaaggcaagacatacctagatgtgccccaggtcacttgtagtcctgatcatgaggtacaaccaactctacccagcaaccctggccctggccccacctctgcatctaacatcactgtcatatacaccataaataaccagctgaggggggttgagctgctcttcaacgagaccatcaatgttagtgtgaaaagtgggtcagtgttacttgttgtcctagaggaagcacagcgcaaaaatcctatgttcaaatttgaaaccacaatgacatcttggggccttgtcgtctcttctatcaacaatatcgcggaaaatgttaatcacaagacatactggcagtttcttagtggtgtaacacctttgaatgaaggtgagggaagaaaagacataggcgttatcttccatagtctgaaggctacattctttaattattttttcatttaatttattcattcattcacttaattaataattatgag

SEQ ID NO: 72625 - DNA, 975 bp, Homo sapiens
  misc_feature (31)..(31): n is a, c, g, or t
tagaggatccccatgcgcgacgcttccatcnatgtagacacaggagcaatggcaaccttggctctgacctgtatgtacaacaagatccctgtaggttcagaggaaggttacagatccctgtttggtcaggtactaaaggatattgtggagaaaatcagcatgaagatcaaagataatggcatcattggagacatctacagtactggcctcgccatgcaggctctctctgtaacacctgagccatctaaaaaggaatggaactgcaagaagactacggatatgatactcaatgagattaagcaggggaaattccacaaccccatgtccattgctcaaatcctcccttccctgaaaggcaagacatacctagatgtgccccaggtcacttgtagtcctgatcatgaggtacaaccaactctacccagcaaccctggccctggccccacctctgcatctaacatcactgtcatatacaccataaataaccagctgaggggggttgagctgctcttcaacgagaccatcaatgttagtgtgaaaagtgggtcagtgttacttgttgtcctagaggaagcacagcgcaaaaatcctatgttcaaatttgaaaccacaatgacatcttggggccttgtcgtctcttctatcaacaatatcgcggaaaatgttaatcacaagacatactggcagtttcttagtggtgtaacacctttgaatgaaggggttgctgactacatacccttcaaccacgagcacatcacagccaatttcacacagtactaacgaagaggtgggttcagcttctatcaaacatctccaaaggatgggtgaaattttttccacttcattttaaatctatgcaaaaaagcgaatgcctgtgatgctaccatattcctggtaaaaacatggagaaccactatgtagaataaaaatgcaaagttcactggagtctcaacatctatgactcatgaaaataaa

SEQ ID NO: 72626 - DNA, 386 bp, Homo sapiens
tgtgtgtgcgtgtgcatgtgcgtgtgtgtgtttcaggagctgaccctggctgtgaggatggccttcctatccttcccttctcctggctgccctatccttcccttctcctggctgcctcccattgtgacatggatttttctctcatctttctctccctactccccttgcagcatgagaggcccagtacctgtaagactaccaggctccatcactctccagagaggccagttctgcctcttaggaagggcctagatcagcgcaaatctcaccatcatgatgtccccaactgctccgcccgtgtatgtgttgggtatttccaactgtccccagcaaagcctgcctcctccccacctcctgagccctgtggggtatcaggagcctcacca

SEQ ID NO: 72627 - DNA, 338 bp, Homo sapiens
ttagcttattttccttagatcagaaattatttttaaaaaagtaaaaaataacaatcttctcccatttgaaaatgccctttaaataggaaaagttattaccattagtaagagcttgaggcaatttgttcagccacaaaaccaagagagtggatctttaatacccctttcatgtatatatgttggagggacatttgtacaaatacaatggctctacatgcacaaataaacacatcaactaactgaactgatttgcgaaggcttagctgctggcagccctttatattttgttgcttttactttctaattctactgaatttctattacggctacataagttt

SEQ ID NO: 72628 - DNA, 358 bp, Homo sapiens
ggaagatgtacaatgcacatgtgcagccaaactgctacccacaggcggaacatcgccacaccccggacggtgccacgagtcccacttctgtctccctcccatccccagaagaaaccaccggtctagtattttccacctttacgtaattcctggctactcccactccatcaagcatgtgtgattgatccgtatcgtgcgcacaggcagcttgcttctgtttttgctaaaaggccattgtctgaatagatcacaattagctgagcatggtggtcgagcattccacatctaatccctagagcctgtgaacgtgacttactggaaacagtttttgcagatgtccacaaggaaaatgttaatt

SEQ ID NO: 72629 - DNA, 867 bp, Homo sapiens
cggaggttgcagtgagccaagtagctgggatcacaggcatgcgccaccatgcccagccagttttgtattttcagtagagtcgaggtttctccatgttggtcagactggtctcgaactcccgacctcaggtgatccgcccccctctgccttccaaagtgctgggattacaggcatgagccaccgctcccagctctttttgcatattctttatcgtactaaagaacaactcaataaaataaatactttattcagtatttctaatacccaaggtaaagacattctaacaataaacctgtgcaactagagtagcatagcctcgggctgttgcttttatctccagccagtactactgcctaaagaatatgaaaggaaagatttctgtattcatttaagaattttgatttgttaacaagcagtttttactagctatgcatctggaatgactaatgactaatgagaattacaggcccacaatagcccccacaatttaatcattcatctgtctactgttcacatatttattgagcacccatctgtgtgaggcactctgctaggtattctggaaaaaaattgagtttcataaatatccattgtgtcatagatacaaatttaagacatcatgaggtctacttgttaaccttactgtgtatgatctctactttcaagatcttcagaggagatactttattgctactagcagaataatttaatagaactcccttcccgcaaggcgcgtctcccgccctcccgccgggcgcgccttttcgcggggcccgcgcccttctaagtgttttctgactactgtaccaaacttggttgtgtctgtggtgcccggctgccgtggcactgcgcttgtcttaaacatag

SEQ ID NO: 72630 - DNA, 869 bp, Homo sapiens
cggaggttgcagtgagccaagtagctgggatcacaggcatgcgccaccatgcccagccagttttgtattttcagtagagtcgaggtttctccatgttggtcagactggtctcgaactcccgacctcaggtgatccgcccccctctgccttccaaagtgctgggattacaggcatgagccaccgctcccagctctttttgcatattctttatcgtactaaagaacaactcaataaaataaatactttattcagtatttctaatacccaaggtaaagacattctaacaataaacctgtgcaactagagtagcatagcctcgggctgttgcttttatctccagccagtactactgcctaaagaatatgaaaggaaagatttctgtattcatttaagaattttgatttgttaacaagcagtttttactagctatgcatctggaatgactaatgactaatgagaattacaggcccacaatagcccccacaatttaatcattcatctgtctactgttcacatatttattgagcacccatctgtgtgaggcactctgctaggtattctggaaaaaaattgagtttcataaatatccattgtgtcatagatacaaatttaagacatcatgaggtctacttgttaaccttactgtgtatgatctctactttcaagatcttcagaggagatactttattgctactagcagaataatttaatagaactcacattcctcaaaagaaagagatactcttttatttctttgctgaagaattcatttaacagcactttcttctaagtgttttctgactactgtaccaaacttggttatatctttagtgctccccatacatgggaatcagttgtcttaaacatag

SEQ ID NO: 72631 - DNA, 527 bp, Homo sapiens
aagtaacccaccaaagtgaaaaagaggaacaagttctaacccaatgcaggtttaaaacataaccaaaagaacaaaagagagagcttgacacaccaatcttgaggttatcacgctataatagagaatggactcattaatatgggattacagaggaaggaatggttaagaaaaagacatggcctctgactgctccaaaaaaggataagcagggcttcacagaagaggtgacaggaccagcttctctgcaacctgtcagaagcaccagcaccagccaggtggcaccctcccttagactctgacagccagactctccttcaacctcctgaagtggtgcaggagacaagtggtaccctcagagttctgcgtcccagcctggcagggctcctcctctgaggtctggtaactctcagccaagattgttacagttactatctctgtggtacctgtgtccccttttttgtttttccatcctgccaatgcctgtttagccaattatctatattaaattctctctgttaaaacaaatt

SEQ ID NO: 72632 - DNA, 614 bp, Homo sapiens
aagtaacccaccaaagtgaaaaagaggaacaagttctaacccaatgcaggtttaaaacataaccaaaagaacaaaagagagagcttgacacaccaatcttgaggttatcacgctataatagagaatggactcattaatatgggattacagaggaaggaatggttaagaaaaagacatggcctctgactgctccaaaaaaggataagcagggcttcacagaagaggtgacagcaggtttctggatggcagatcattcaaccttctttttcttgagttttctactctgctgtcatcttccactcatttctgcttcattttgtgattcgttaacagaaaaggaagtggaatggaataaaatcccccaatacagtacaattatacattaatggctgtaatgtgaagagcatcacacacgaagagagccatcttccagaaataagtttatacactctctcctctaattgcatcaggactttttctgtttctttttcttcagttttgatagtatattgctatttcctcttacatacttatttttgtctccacccccctacctggcttcctctcgtatgtttttcttgtctctccgtctacctctccgccctgcttctcag

SEQ ID NO: 72633 - DNA, 460 bp, Homo sapiens
ctctaccaatagggggcactaaggaagaccgaaaggcagtaggaggcaacagggaattgctcctgcctattctttctgttgcccccgcaggaatttattgccatgtggtttactccagcatcactggttgtttgcagctttctagtttcttccatcattcccaggaccagcttctctgcaacctgtcagaagcaccagcaccagccaggtggcaccctcccttagactctgacagccagactctccttcaacctcctgaagtggtgcaggagacaagtggtaccctcagagttctgcgtcccagcctggcagggctcctcctctgaggtctggtaactctcagccaagattgttacagttactatctctgtggtacctgtgtccccttttttgtttttccatcctgccaatgcctgtttagccaattatctatattaaattctctctgttaaaacaaatt

SEQ ID NO: 72634 - DNA, 2344 bp, Homo sapiens
aagtaacccaccaaagtgaaaaagaggaacaagttctaacccaatgcaggtttaaaacataaccaaaagaacaaaagagagagcttgacacaccaatcttgaggttatcacgctataatagagaatggactcattaatatgggattacagaggaaggaatggttaagaaaaagacatggcctctgactgctccaaaaaaggataagcagggcttcacagaagaggtgacagaaaaggaagtggaatggaataaaatcccccaatacagtacaattatacattaatggctgtaatgtgaagagcatcacacacgaagagagccatcttccagaaataagtttatacactctctcctctaattgcatcaggactttaccagataatgttcttccagatctgaaaaggaaaatgcctaaaagagcttccaaactcatttttgaataatactaggctacaaagaattacactgtgaattcattaagggtaacaccaaatcactaaacagcactgtttgtacagaaatgtcgaaaagctgtggaaataatttagcggccatttctgtaggaatttcgcttcttttactcttagtggtttgtggaattgggtgtgtttggcactggaaacaccgtgttgccacacgatttaccttaccgaggtttttacaaaggagaagcagcaggagaaaagtctgtactaaaacattcttgggcccccgcatcattggcttaaggcatgaaatctcagttgaaacccaagaccacaaatctgctgtcaggggaaataacacacacgacaactatgaaaatgtggaagcaggtcctcccaaagctaaaggaaaaaccgataaggaactatatgaaaacacagggcagtctaatttcgaggagcatatctatggaaatgagacatcttctgactattataacttccagaagcctcgtccttctgaagttcctcaagatgaagatatatacattcttccagattcatattagcttttcaaaatattgacttttgttattggatgataaatattcactgtaatttttcaacagcaaagacaaggaatcaaactaaatgttgatcaactgtagactggataaagaaaatgtggtacacatacaccatagaatattatgcagccgtaaaaaaagaacaaaactaacatgggaacagaaaatcaaataccacatattctcacttaaaagtgggagctaaataataagaacacatggagagaaggagaggaacaacagacactggggcctacttgagggaggacagtggaaggagggagaggttcagggaaaaaaaaaatatcaggtactatgcttagtacacacatgatgaaataatctgtacaccaaacccccaagtcacaagtgttcctacataacaaacctgaacatgtacccctgaacataaaattataattaaaatattaaaaataattcactgtgatttttattgtactgatgccattcttaatcaagttctgataagtggatggtctctgcctatctccacctttctgaatcctatgtgtatcgctgtggattaattctagatatcttctccaccctccttgcaccagactaaatctgtattatgtgatattgattcttccttctaaatattacccgttatctctttcctttatttctaccattatctttatctggctcagaattattgtcataggctcctaactgttcctcctgcttctagtttctacccactcaatcaattaccgatggtgttgccagatttatcttcagaaaatattcctaacagccacattatttctttcacttaaaatgttttaatgccccctctttgcaaaagacataatacccataatttgaactccaaaatttatggttttccacaattggttccaattcacttttccagtgacttctcttactatctctcatttctttgccttcagcagaatcatcttaaaacctgccaaacttatccttccttcacagctttgcttttctgcctcttctctcaagcctgcttcagatcataagttcttccacacatctcctgaatcactccaaacccgcatttacctttttattttctgatataagctttgatgcctcttcaattcttaggacatttaaacatatgaatgttgccacagcattttattacctagcttcatatgaaaatgtcttaaattcccacctaaatgaaaagaaactgcccaaatgcctagaacatcacataaggcactaaatgcctcatgttttactgacgggaattgaattgtacattttgctgagtagttttgagaaaaaaatctaataaattcatctgttattcatccata

SEQ ID NO: 72635 - DNA, 2844 bp, Homo sapiens
aagtaacccaccaaagtgaaaaagaggaacaagttctaacccaatgcaggtttaaaacataaccaaaagaacaaaagagagagcttgacacaccaatcttgaggtgttgtgccattctctgggaacatacagatgaaatgacctgaaccctgcccaccatttaaccaagtaagaatacaattctctctcatttaggttatcacgctataatagagaatggactcattaatatgggattacagaggaaggaatggttaagaaaaagacatggcctctgactgctccaaaaaaggataagcagggcttcacagaagaggtgacaggtaataaagatgattgcacgtgtctgtatatgtccctttttttctattgtgctcagaacattatctttcactcaaaaattgttatcctaattgtcaaaaactatgtggagatctaagtgataaaaccactcagggttgggcagggacaggatttttctaactctttttcctttcatcacaacgggtagtatattttatattaaaagcagaagctcactatatgctggtgtttaatgcattggtgaaaatcagtaatttttctatgttagataataagtatgcaattaacatatttttaatttatagcaggtttctggatggcagatcattcaaccttctttttcttgagttttctactctgctgtcatcttccactcatttctgcttcattttgtgattcgttaacagaaaaggaagtggaatggaataaaatcccccaatacagtacaattatacattaatggctgtaatgtgaagagcatcacacacgaagagagccatcttccagaaataagtttatacactctctcctctaattgcatcaggactttaccagataatgttcttccagatctgaaaaggaaaatgcctaaaagagcttccaaactcatttttgaataatactaggctacaaagaattacactgtgaattcattaagggtaacaccaaatcactaaacagcactgtttgtacagaaatgtcgaaaagctgtggaaataatttagcggccatttctgtaggaatttcgcttcttttactcttagtggtttgtggaattgggtgtgtttggcactggaaacaccgtgttgccacacgatttaccttaccgaggtttttacaaaggagaagcagcaggagaaaagtctgtactaaaacattcttgggcccccgcatcattggcttaaggcatgaaatctcagttgaaacccaagaccacaaatctgctgtcaggggaaataacacacacgacaactatgaaaatgtggaagcaggtcctcccaaagctaaaggaaaaaccgataaggaactatatgaaaacacagggcagtctaatttcgaggagcatatctatggaaatgagacatcttctgactattataacttccagaagcctcgtccttctgaagttcctcaagatgaagatatatacattcttccagattcatattagcttttcaaaatattgacttttgttattggatgataaatattcactgtaatttttcaacagcaaagacaaggaatcaaactaaatgttgatcaactgtagactggataaagaaaatgtggtacacatacaccatagaatattatgcagccgtaaaaaaagaacaaaactaacatgggaacagaaaatcaaataccacatattctcacttaaaagtgggagctaaataataagaacacatggagagaaggagaggaacaacagacactggggcctacttgagggaggacagtggaaggagggagaggttcagggaaaaaaaaaatatcaggtactatgcttagtacacacatgatgaaataatctgtacaccaaacccccaagtcacaagtgttcctacataacaaacctgaacatgtacccctgaacataaaattataattaaaatattaaaaataattcactgtgatttttattgtactgatgccattcttaatcaagttctgataagtggatggtctctgcctatctccacctttctgaatcctatgtgtatcgctgtggattaattctagatatcttctccaccctccttgcaccagactaaatctgtattatgtgatattgattcttccttctaaatattacccgttatctctttcctttatttctaccattatctttatctggctcagaattattgtcataggctcctaactgttcctcctgcttctagtttctacccactcaatcaattaccgatggtgttgccagatttatcttcagaaaatattcctaacagccacattatttctttcacttaaaatgttttaatgccccctctttgcaaaagacataatacccataatttgaactccaaaatttatggttttccacaattggttccaattcacttttccagtgacttctcttactatctctcatttctttgccttcagcagaatcatcttaaaacctgccaaacttatccttccttcacagctttgcttttctgcctcttctctcaagcctgcttcagatcataagttcttccacacatctcctgaatcactccaaacccgcatttacctttttattttctgatataagctttgatgcctcttcaattcttaggacatttaaacatatgaatgttgccacagcattttattacctagcttcatatgaaaatgtcttaaattcccacctaaatgaaaagaaactgcccaaatgcctagaacatcacataaggcactaaatgcctcatgttttactgacgggaattgaattgtacattttgctgagtagttttgagaaaaaaatctaataaattcatctgttattcatccata

SEQ ID NO: 72636 - DNA, 2436 bp, Homo sapiens
aagtaacccaccaaagtgaaaaagaggaacaagttctaacccaatgcaggtttaaaacataaccaaaagaacaaaagagagagcttgacacaccaatcttgaggtgttgtgccattctctgggaacatacagatgaaatgacctgaaccctgcccaccatttaaccaagtaagaatacaattctctctcatttaggttatcacgctataatagagaatggactcattaatatgggattacagaggaaggaatggttaagaaaaagacatggcctctgactgctccaaaaaaggataagcagggcttcacagaagaggtgacagaaaaggaagtggaatggaataaaatcccccaatacagtacaattatacattaatggctgtaatgtgaagagcatcacacacgaagagagccatcttccagaaataagtttatacactctctcctctaattgcatcaggactttaccagataatgttcttccagatctgaaaaggaaaatgcctaaaagagcttccaaactcatttttgaataatactaggctacaaagaattacactgtgaattcattaagggtaacaccaaatcactaaacagcactgtttgtacagaaatgtcgaaaagctgtggaaataatttagcggccatttctgtaggaatttcgcttcttttactcttagtggtttgtggaattgggtgtgtttggcactggaaacaccgtgttgccacacgatttaccttaccgaggtttttacaaaggagaagcagcaggagaaaagtctgtactaaaacattcttgggcccccgcatcattggcttaaggcatgaaatctcagttgaaacccaagaccacaaatctgctgtcaggggaaataacacacacgacaactatgaaaatgtggaagcaggtcctcccaaagctaaaggaaaaaccgataaggaactatatgaaaacacagggcagtctaatttcgaggagcatatctatggaaatgagacatcttctgactattataacttccagaagcctcgtccttctgaagttcctcaagatgaagatatatacattcttccagattcatattagcttttcaaaatattgacttttgttattggatgataaatattcactgtaatttttcaacagcaaagacaaggaatcaaactaaatgttgatcaactgtagactggataaagaaaatgtggtacacatacaccatagaatattatgcagccgtaaaaaaagaacaaaactaacatgggaacagaaaatcaaataccacatattctcacttaaaagtgggagctaaataataagaacacatggagagaaggagaggaacaacagacactggggcctacttgagggaggacagtggaaggagggagaggttcagggaaaaaaaaaatatcaggtactatgcttagtacacacatgatgaaataatctgtacaccaaacccccaagtcacaagtgttcctacataacaaacctgaacatgtacccctgaacataaaattataattaaaatattaaaaataattcactgtgatttttattgtactgatgccattcttaatcaagttctgataagtggatggtctctgcctatctccacctttctgaatcctatgtgtatcgctgtggattaattctagatatcttctccaccctccttgcaccagactaaatctgtattatgtgatattgattcttccttctaaatattacccgttatctctttcctttatttctaccattatctttatctggctcagaattattgtcataggctcctaactgttcctcctgcttctagtttctacccactcaatcaattaccgatggtgttgccagatttatcttcagaaaatattcctaacagccacattatttctttcacttaaaatgttttaatgccccctctttgcaaaagacataatacccataatttgaactccaaaatttatggttttccacaattggttccaattcacttttccagtgacttctcttactatctctcatttctttgccttcagcagaatcatcttaaaacctgccaaacttatccttccttcacagctttgcttttctgcctcttctctcaagcctgcttcagatcataagttcttccacacatctcctgaatcactccaaacccgcatttacctttttattttctgatataagctttgatgcctcttcaattcttaggacatttaaacatatgaatgttgccacagcattttattacctagcttcatatgaaaatgtcttaaattcccacctaaatgaaaagaaactgcccaaatgcctagaacatcacataaggcactaaatgcctcatgttttactgacgggaattgaattgtacattttgctgagtagttttgagaaaaaaatctaataaattcatctgttattcatccata

SEQ ID NO: 72637 - DNA, 2393 bp, Homo sapiens
aagtaacccaccaaagtgaaaaagaggaacaagttctaacccaatgcaggtttaaaacataaccaaaagaacaaaagagagagcttgacacaccaatcttgaggttatcacgctataatagagaatggactcattaatatgggattacagaggaaggaatggttaagaaaaagacatggcctctgactgctccaaaaaaggataagcagggcttcacagaagaggtgacagcaggtttctggatggcagatcattcaaccttctttttcttgagttttctactctgctgtcatcttccactcatttctgcttcattttgtgattcgttaacagaaaaggaagtggaatggaataaaatcccccaatacagtacaattatacattaatggctgtaatgtgaagagcatcacacacgaagagagccatcttccagaaataagtttatacactctctcctctaattgcatcaggactttaccagataatgttcttccagatctgaaaaggaaaatgcactgtgaattcattaagggtaacaccaaatcactaaacagcactgtttgtacagaaatgtcgaaaagctgtggaaataatttagcggccatttctgtaggaatttcgcttcttttactcttagtggtttgtggaattgggtgtgtttggcactggaaacaccgtgttgccacacgatttaccttaccgaggtttttacaaaggagaagcagcaggagaaaagtctgtactaaaacattcttgggcccccgcatcattggcttaaggcatgaaatctcagttgaaacccaagaccacaaatctgctgtcaggggaaataacacacacgacaactatgaaaatgtggaagcaggtcctcccaaagctaaaggaaaaaccgataaggaactatatgaaaacacagggcagtctaatttcgaggagcatatctatggaaatgagacatcttctgactattataacttccagaagcctcgtccttctgaagttcctcaagatgaagatatatacattcttccagattcatattagcttttcaaaatattgacttttgttattggatgataaatattcactgtaatttttcaacagcaaagacaaggaatcaaactaaatgttgatcaactgtagactggataaagaaaatgtggtacacatacaccatagaatattatgcagccgtaaaaaaagaacaaaactaacatgggaacagaaaatcaaataccacatattctcacttaaaagtgggagctaaataataagaacacatggagagaaggagaggaacaacagacactggggcctacttgagggaggacagtggaaggagggagaggttcagggaaaaaaaaaatatcaggtactatgcttagtacacacatgatgaaataatctgtacaccaaacccccaagtcacaagtgttcctacataacaaacctgaacatgtacccctgaacataaaattataattaaaatattaaaaataattcactgtgatttttattgtactgatgccattcttaatcaagttctgataagtggatggtctctgcctatctccacctttctgaatcctatgtgtatcgctgtggattaattctagatatcttctccaccctccttgcaccagactaaatctgtattatgtgatattgattcttccttctaaatattacccgttatctctttcctttatttctaccattatctttatctggctcagaattattgtcataggctcctaactgttcctcctgcttctagtttctacccactcaatcaattaccgatggtgttgccagatttatcttcagaaaatattcctaacagccacattatttctttcacttaaaatgttttaatgccccctctttgcaaaagacataatacccataatttgaactccaaaatttatggttttccacaattggttccaattcacttttccagtgacttctcttactatctctcatttctttgccttcagcagaatcatcttaaaacctgccaaacttatccttccttcacagctttgcttttctgcctcttctctcaagcctgcttcagatcataagttcttccacacatctcctgaatcactccaaacccgcatttacctttttattttctgatataagctttgatgcctcttcaattcttaggacatttaaacatatgaatgttgccacagcattttattacctagcttcatatgaaaatgtcttaaattcccacctaaatgaaaagaaactgcccaaatgcctagaacatcacataaggcactaaatgcctcatgttttactgacgggaattgaattgtacattttgctgagtagttttgagaaaaaaatctaataaattcatctgttattcatccata

SEQ ID NO: 72638 - DNA, 2290 bp, Homo sapiens
aagtaacccaccaaagtgaaaaagaggaacaagttctaacccaatgcaggtttaaaacataaccaaaagaacaaaagagagagcttgacacaccaatcttgaggttatcacgctataatagagaatggactcattaatatgggattacagaggaaggaatggttaagaaaaagacatggcctctgactgctccaaaaaaggataagcagggcttcacagaagaggtgacagaaaaggaagtggaatggaataaaatcccccaatacagtacaattatacattaatggctgtaatgtgaagagcatcacacacgaagagagccatcttccagaaataagtttatacactctctcctctaattgcatcaggactttaccagataatgttcttccagatctgaaaaggaaaatgcctaaaagagcttccaaactcatttttgaataatactaggctacaaagaattacactgtgaattcattaagggtaacaccaaatcactaaacagcactgtttgtacagaaatgtcgaaaagctgtggaaataatttagcggccatttctgtaggaatttcgcttcttttactcttagtggtttgtggaattgggtgtgtttggcactggaaacaccgtgttgccacacgatttaccttaccgaggtttttacaaaggagaagcagcaggagaaaagtctgtactaaccaagaccacaaatctgctgtcaggggaaataacacacacgacaactatgaaaatgtggaagcaggtcctcccaaagctaaaggaaaaaccgataaggaactatatgaaaacacagggcagtctaatttcgaggagcatatctatggaaatgagacatcttctgactattataacttccagaagcctcgtccttctgaagttcctcaagatgaagatatatacattcttccagattcatattagcttttcaaaatattgacttttgttattggatgataaatattcactgtaatttttcaacagcaaagacaaggaatcaaactaaatgttgatcaactgtagactggataaagaaaatgtggtacacatacaccatagaatattatgcagccgtaaaaaaagaacaaaactaacatgggaacagaaaatcaaataccacatattctcacttaaaagtgggagctaaataataagaacacatggagagaaggagaggaacaacagacactggggcctacttgagggaggacagtggaaggagggagaggttcagggaaaaaaaaaatatcaggtactatgcttagtacacacatgatgaaataatctgtacaccaaacccccaagtcacaagtgttcctacataacaaacctgaacatgtacccctgaacataaaattataattaaaatattaaaaataattcactgtgatttttattgtactgatgccattcttaatcaagttctgataagtggatggtctctgcctatctccacctttctgaatcctatgtgtatcgctgtggattaattctagatatcttctccaccctccttgcaccagactaaatctgtattatgtgatattgattcttccttctaaatattacccgttatctctttcctttatttctaccattatctttatctggctcagaattattgtcataggctcctaactgttcctcctgcttctagtttctacccactcaatcaattaccgatggtgttgccagatttatcttcagaaaatattcctaacagccacattatttctttcacttaaaatgttttaatgccccctctttgcaaaagacataatacccataatttgaactccaaaatttatggttttccacaattggttccaattcacttttccagtgacttctcttactatctctcatttctttgccttcagcagaatcatcttaaaacctgccaaacttatccttccttcacagctttgcttttctgcctcttctctcaagcctgcttcagatcataagttcttccacacatctcctgaatcactccaaacccgcatttacctttttattttctgatataagctttgatgcctcttcaattcttaggacatttaaacatatgaatgttgccacagcattttattacctagcttcatatgaaaatgtcttaaattcccacctaaatgaaaagaaactgcccaaatgcctagaacatcacataaggcactaaatgcctcatgttttactgacgggaattgaattgtacattttgctgagtagttttgagaaaaaaatctaataaattcatctgttattcatccata

SEQ ID NO: 72639 - DNA, 693 bp, Homo sapiens
aagtaacccaccaaagtgaaaaagaggaacaagttctaacccaatgcaggtttaaaacataaccaaaagaacaaaagagagagcttgacacaccaatcttgaggtgttgtgccattctctgggaacatacagatgaaatgacctgaaccctgcccaccatttaaccaagtaagaatacaattctctctcatttaggttatcacgctataatagagaatggactcattaatatgggattacagaggaaggaatggttaagaaaaagacatggcctctgactgctccaaaaaaggataagcagggcttcacagaagaggtgacaggaatttattgccatgtggtttactccagcatcactggttgtttgcagctttctagtttcttccatcattcccaggaccagcttctctgcaacctgtcagaagcaccagcaccagccaggtggcaccctcccttagactctgacagccagactctccttcaacctcctgaagtggtgcaggagacaagtggtaccctcagagttctgcgtcccagcctggcagggctcctcctctgaggtctggtaactctcagccaagattgttacagttactatctctgtggtacctgtgtccccttttttgtttttccatcctgccaatgcctgtttagccaattatctatattaaattctctctgttaaaacaaatt

SEQ ID NO: 72640 - DNA, 2281 bp, Homo sapiens
aagtaacccaccaaagtgaaaaagaggaacaagttctaacccaatgcaggtttaaaacataaccaaaagaacaaaagagagagcttgacacaccaatcttgaggtgttgtgccattctctgggaacatacagatgaaatgacctgaaccctgcccaccatttaaccaaaaaaggaagtggaatggaataaaatcccccaatacagtacaattatacattaatggctgtaatgtgaagagcatcacacacgaagagagccatcttccagaaataagtttatacactctctcctctaattgcatcaggactttaccagataatgttcttccagatctgaaaaggaaaatgcctaaaagagcttccaaactcatttttgaataatactaggctacaaagaattacactgtgaattcattaagggtaacaccaaatcactaaacagcactgtttgtacagaaatgtcgaaaagctgtggaaataatttagcggccatttctgtaggaatttcgcttcttttactcttagtggtttgtggaattgggtgtgtttggcactggaaacaccgtgttgccacacgatttaccttaccgaggtttttacaaaggagaagcagcaggagaaaagtctgtactaaaacattcttgggcccccgcatcattggcttaaggcatgaaatctcagttgaaacccaagaccacaaatctgctgtcaggggaaataacacacacgacaactatgaaaatgtggaagcaggtcctcccaaagctaaaggaaaaaccgataaggaactatatgaaaacacagggcagtctaatttcgaggagcatatctatggaaatgagacatcttctgactattataacttccagaagcctcgtccttctgaagttcctcaagatgaagatatatacattcttccagattcatattagcttttcaaaatattgacttttgttattggatgataaatattcactgtaatttttcaacagcaaagacaaggaatcaaactaaatgttgatcaactgtagactggataaagaaaatgtggtacacatacaccatagaatattatgcagccgtaaaaaaagaacaaaactaacatgggaacagaaaatcaaataccacatattctcacttaaaagtgggagctaaataataagaacacatggagagaaggagaggaacaacagacactggggcctacttgagggaggacagtggaaggagggagaggttcagggaaaaaaaaaatatcaggtactatgcttagtacacacatgatgaaataatctgtacaccaaacccccaagtcacaagtgttcctacataacaaacctgaacatgtacccctgaacataaaattataattaaaatattaaaaataattcactgtgatttttattgtactgatgccattcttaatcaagttctgataagtggatggtctctgcctatctccacctttctgaatcctatgtgtatcgctgtggattaattctagatatcttctccaccctccttgcaccagactaaatctgtattatgtgatattgattcttccttctaaatattacccgttatctctttcctttatttctaccattatctttatctggctcagaattattgtcataggctcctaactgttcctcctgcttctagtttctacccactcaatcaattaccgatggtgttgccagatttatcttcagaaaatattcctaacagccacattatttctttcacttaaaatgttttaatgccccctctttgcaaaagacataatacccataatttgaactccaaaatttatggttttccacaattggttccaattcacttttccagtgacttctcttactatctctcatttctttgccttcagcagaatcatcttaaaacctgccaaacttatccttccttcacagctttgcttttctgcctcttctctcaagcctgcttcagatcataagttcttccacacatctcctgaatcactccaaacccgcatttacctttttattttctgatataagctttgatgcctcttcaattcttaggacatttaaacatatgaatgttgccacagcattttattacctagcttcatatgaaaatgtcttaaattcccacctaaatgaaaagaaactgcccaaatgcctagaacatcacataaggcactaaatgcctcatgttttactgacgggaattgaattgtacattttgctgagtagttttgagaaaaaaatctaataaattcatctgttattcatccata

SEQ ID NO: 72641 - DNA, 1381 bp, Homo sapiens
aagtaacccaccaaagtgaaaaagaggaacaagttctaacccaatgcaggtttaaaacataaccaaaagaacaaaagagagagcttgacacaccaatcttgaggtgttgtgccattctctgggaacatacagatgaaatgacctgaaccctgcccaccatttaaccaaaaaaggaagtggaatggaataaaatcccccaatacagtacaattatacattaatggctgtaatgtgaagagcatcacacacgaagagagccatcttccagaaataagtttatacactctctcctctaattgcatcaggactttaccagataatgttcttccagatctgaaaaggaaaatgcctaaaagagcttccaaactcatttttgaataatactaggctacaaagaattacactgtgaattcattaagggtaacaccaaatcactaaacagcactgtttgtacagaaatgtcgaaaagctgtggaaataatttagcggccatttctgtaggaatttcgcttcttttactcttagtggtttgtggaattgggtgtgtttggcactggaaacaccgtgttgccacacgatttaccttaccgaggtttttacaaaggagaagcagcaggagaaaagtctgtactaaaacattcttgggcccccgcatcattggcttaaggcatgaaatctcagttgaaacccaagaccacaaatctgctgtcaggggaaataacacacacgacaactatgaaaatgtggaagcaggtcctcccaaagctaaaggaaaaaccgataaggaactatatgaaaacacagggcagtctaatttcgaggagcatatctatggaaatgagacatcttctgactattataacttccagaagcctcgtccttctgaagttcctcaagatgaagatatatacattcttccagattcatattagcttttcaaaatattgacttttgttattggatgataaatattcactgtaatttttcaacagcaaagacaaggaatcaaactaaatgttgatcaactgtagactggataaagaaaatgtggtacacatacaccatagaatattatgcagccgtaaaaaaagaacaaaactaacatgggaacagaaaatcaaataccacatattctcacttaaaagtgggagctaaataataagaacacatggagagaaggagaggaacaacagacactggggcctacttgagggaggacagtggaaggagggagaggttcagggaaaaaaaaaatatcaggtactatgcttagtacacacatgatgaaataatctgtacaccaaacccccaagtcacaagtgttcctacataacaaacctgaacatgtacccctgaacataaaattataattaaaatatta

SEQ ID NO: 72642 - DNA, 393 bp, Homo sapiens
tccgcgtcttctgcagactaatcaaaccactcatggaaccaaagaatgaggaaaaggcagatggtatcccagaaaggtgtcttctccaacagccagatacttttcatcagaacagaggctggtgtgccgctggctctgggctcctccacacccacagggcagcaccactgtctccagtgcacactgcacagaagcagctctgggtgctttggtcaataacccatcttcgtggctcgtggatatttcttgttagtcttaggcttccatcgtgacctttctgagtgcccctcaatctcattaactcccctttcaaggctctgtccccagaaaacaagcttcaggttgtgaccctgtttcctcacattcatttctgatacacgtatctggagaatt

SEQ ID NO: 72643 - DNA, 404 bp, Homo sapiens
gggcggtgctgctaaggattgaggtcgagtgtcaagcttgagctcttcagtcaatgctagaaatggacgtttagttattgaatcccgctaacgaggggagccaacaagagagggatgtcggcatcgggtgtgcggttccaagaactgattggctgtggagattagaagttaggtgaaaattctcttaaactcgggcaaacgaattgatgatttttcccctggtcggtgttagagacacagtaaatgcttaaccatctcgctagacagctcaactgaagtggcattaacttcccgggaaagtgtgtagaaaggcatttttaaatactgtaaactcgaacgtaaatatcttttaatgtggaactgttactacatttaacactgaacatcttttcaacttttacata

SEQ ID NO: 72644 - DNA, 209 bp, Homo sapiens
gggcggtgctgctaaggattgaggtcgagtgtcaagcttgagctcttcagtcaatgctagaaatggacgtttagttattgaatcccgctaacgaggggagccaacaagagagggatgtcggcatcgggtgtgcggttccaagaactgattggctgtggagattagaagttaggaacctttgcaacggaaagcggcctcgggcaggcgcc

SEQ ID NO: 72645 - DNA, 321 bp, Homo sapiens
gggtgagaaggcaccggtgccactagtccctgacctgtccctcagacaagttacaaatgaagactgagggggtggagtagctatggaaaccaggagggaaggatttttttttttaatgcaaatgaattagaacaaaatgactggcatccctttttctttttccatctgtgacaaaaattctgtgtcctggtttctaccttcacttggagtaaattatgggggaaagaacatcatgaagacctgctattgtcagagtgtcatttcctctttctatctttctgtggattaattttaaatccatttgatagaattaatcatata

SEQ ID NO: 72646 - DNA, 296 bp, Homo sapiens
taagagacagggtctcactctctttcccaggctggagtgcagtggcaacgatcatagctcactgcatcctcgaactcctggccccaagggatcctcccactttggcctcccaaagcactgagattgcaggcgtgagacacctcacctggcttgtctgagaacatcttttaaaaaaatcccttctcttgggttttctgttacccatatgtctactcaatttggttgtctcagctttgttgttgtaatgcaaaagcagccatagacaatacatgcatgaatgagtgtagtgcattcca

SEQ ID NO: 72647 - DNA, 821 bp, Homo sapiens
aaaattaaaattcagtagttaaactcttcataatgcagaaatggatggcttgattgtatagaaaaatgagtctttcagttacaccattcttgaaaataatagtgtatgtttgaaatttgtcattaattagttgcttttgaaggcaatctatttgaaatatgtaatttcctgatgttatctgcattgtgttaagaaaaaaataataggctataaaatcaatttttgtaaaaaaaatgtacagttttaagttgtgtacagaaaaaggaagagcgtacacagtcttagagtggaatatacctctagtacagtgtatgtgttaattccaactcaagcaaagaaatgagtatttaccatctttcctataacatgtaaatgtattattcctgttctacagacactgtatatttatgaccttatttggacattattagacactggtttcttagtaaagcacagtaacttggatcagattctttgtaaccgaaacacttaaacatgtattagtaataccaatatatttagattttatatttttataatttagcttctatgcattacagaagttgaattaagaaatttaagtcatcaccatatttttgttttctttaccacttgggaaaataatcctctttgaggcagtaacactatgtatgtactgttaataggccagaaagaaatattggcagttgtcttaggtaagcaataaaaacatctccaatttactgaaagttcagaaatataactcttacatgctggcagggtaccattagtcatctatacccaccatattccctcatctttcagtccattctggctattat

SEQ ID NO: 72648 - DNA, 597 bp, Homo sapiens
tgacagaatctcactctgttgcccaggctggagtacagtggcgcggtcttggctcactgcaacctccgcctcctgggttcaagtgattctcctgcctcagcctcctgagtagctgggactacgggcatgtgccaccacacctggctaatttttgtatttttagtagagacggggtttcactatgttgaccaggctggacttgaattcctgacctcgtgatctgcccaccttggcctcctaaagtgctgggattacaggcgtgagccactgggcgcagccaactcttccatttcttaaaccccttcttcatcccctctctgtcttcactccattctccttctgttataaatcccaaagtatgttcagctatttattccatcctattttttgccttttctgtttggcctcctaaattctaccatgcagcctaccgatcaccacccaccttctctgtgtctcaagattccaccccctccatgtattttttttcttttctcatactgccttatctttctccttgtgtatcccaggaggtcaggatggtgggggaacggcatgctggggacctcatggtgcccttagggcctcggctgcagg

SEQ ID NO: 72649 - DNA, 761 bp, Homo sapiens
ggaccggccgctgggtcccagcgagggctgagccgggcggtgggaggaggtcaggatggtgggggaacggcatgctggggacctcatggtgcccttagggcctcggctgcaggcatatcctgaagaactcattcgacagaggcctgggcatgacgggcatcctgaatacctgatccgatggagtgtcctgaagtgtggggaagtgggcaaagtgggtgtggaagaaggcaaagcagagcacatcctcatgtggctgtcggctcctgaggtctacgccaactgccctgggctgttaggtgagcgggcactatctaagggacttcagcacgaaccagctggggtttcaggaagctttcctcgagatccaggaggcctggatgaagtggcaatgggagagatggaggctgatgttcaggcgctggtacgcagggcggccaggcagctggcagaaagtgggaccccaagcctcacggccgctgtgcttcacaccatccacgtgctcagtgcctacgccagcatcgggcccctcactggtgtcttcagggagacaggagccctggacctgctcatgcacatgttatgcaatcctgagcctcagatccgccggagtgcaggcaaaatgctgcaggctctggcagcccacgatgctgggagtcgggctcacgtccttctatcactgagccagcaagatggcatcgagcaggcacatggattttgaccagtcgctaacattgctgggagctgtttgcagaaaccacatc

SEQ ID NO: 72650 - DNA, 905 bp, Homo sapiens
actcctgagtagttgtgattacaggtgtgccaccacgccaggctaatttttgtatttttagtagagatggggtttcaccatgttggccaggctggtctcaaactcctgacctcaggtgatctggctgcctgagtctcccaaagtgctggcattacaggtgtgagccactgcactcggcagaaggttacttttgtagatggggtctcactatgttgccaggctggtctcaaactcctgggctcgagcagtcctcccacctggacctcccaaagtgctgggattaccagcatgagccactgtgtctggcctaaatatatatatttaaataattagaatcatacatttccaagacccccaatatgaacagaagctctgcagaaaacagtttgaaaaccaggcatccagcagggagaacctgggcttcccatcacccgctttttcattcccaccctagctccctcatgctccacaacttggggacaagttagttgttttctctgagccttctttttcccttctgcggggataatcttacttgacttccctgaccacaagagacttgcctgggaacatgcatggaaagctctgtgatgagccctgagatgtttgaagtgagaactctccaaacagccactgtgggcataatctggaaaattccctcaggtgtaacgctcctctgcccagcaagtgaacaaagggctgactggtgacagtttctggacactgtcgcaggctatttaagcctgcaagcaagcatcaacacagagtagggtctagggctgggcacagtggctcatgcctgtaatcccagcaatttgggaggccaaggcaggaggattgcttaaggctgggagttcaagaccagcctgggcaacatagtgagaccccatctctaaaaaaaaaaa

SEQ ID NO: 72651 - DNA, 300 bp, Homo sapiens
ccttggcctcccaaagtgctgggattacaggcgtgagccactgcgcctggccaacactatcctgtattaagcaccaggtttgtggtcagtccttggatctggttgctaattttttttgtctcttgttcaaaatcctggtttataaaatttgttgcatgtgtgcttaataaactagcactaagtgttgaagtggaaatctctttttttttttttttttttttgagacggagtctcgcccttgtcacccagcctggagtgcaatggcgtgatctcggctcactgcaacctccgtctcccggg

SEQ ID NO: 72652 - DNA, 391 bp, Homo sapiens
  misc_feature (277)..(277): n is a, c, g, or t
tgatgtgtttccaaaacttgtgggaagcccaagtacatagttcatatacagctcactatgaactatcacctgtgacctcacagtcttctgaccccttggcctttctctctcctcatcctcttcatctttccctgatttcccctgaaccttccagaagggccttctggctcagaaccagacccctgcctgggttactccgtctgcccttctgcctgattaggagcaaggggtctcgcacaggctgggacaatgcccaaggtctgtgctgaggcacaanaacaagggccatgtgagggagggggcaggggtttctggggatgctggtcattaatggataacagcctggaacttatatccatggaccttttaaaaacatctttttactgagggg

SEQ ID NO: 72653 - DNA, 447 bp, Homo sapiens
aggtctcattcagttttaatattgtaatttattccaattaacaacatggatcttaaacaggccagcctgataagctctctggttcctcattctggttagtattggtacagttttcagaaatatcaaaaaatttcaagtatcaacataggcagatcacattcagtttttaaacaaaagcaattatgttaggttgaaaaatatagtctgtttttacaatattagaattgaagatctggacatttgtttaaaggatatcagcacattacaggtaattttcattctattttactctttagagtttcaacaagtgtgagataaattacattaacactaaattttgcatttgttggagggaaatagatgctggattattttaaggatattgagagttcacaaaaatagcaatataaatggacctaaataaaatatgcatatactgcagagtga

SEQ ID NO: 72654 - DNA, 167 bp, Homo sapiens
ctggaataatttcttatatacagcagagttagcgttgtggtgttcttcctgagaattctcagacagtatgtcttaacagcagtcattttctttatttagagtgctgtttagtttactaatagtgattctttcaaaatcactgtgcactcaacattactcgtgaaatg

SEQ ID NO: 72655 - DNA, 389 bp, Homo sapiens
gaataaaacttaataatgaaagataataattttgctccagacaggtttcttcactgtaagcatcagatactcacagagtatgtagaaaatatgtgtccggccgggcgcggtggctcacgcctgtaatcccagcactttgggaggccgaggcgggtggatcatgaggtcaggagatcgagaccatcctggctaacaaggtgagaccccgtctctactaaaaatacaaaaaaaaattagccgggcgcggtggcgggcgcctgtagtcccagctactcgggaggctgaggcaggagaatggcgggaacccgggaagcggagcttgcagtgagccgagattgcgccactgcagtccgcagtccggcctgggcgacagagcgagactccgtctc

SEQ ID NO: 72656 - DNA, 406 bp, Homo sapiens
tgccctaaagtgacaccaaggttttgaagagtagagaactgaggaaatgtggtctatttgtctttgatagtaaactgcaatttgttatccaagcccagcttttgcgaagaaagtgatagatgattactccaataacagcctcaaaaagttttagtaggcctggtgtggtggctcacacctgtaatcccagcactttgggaggctgaggtgggaggattgcttgaggtcaggagtttgagaccagcctggccaacatagtgaaaccccgtctctactaaaaatacaaaaattagctaggtatggtggtgtgcccctgtaatcccagctacttgggaggctgaggctaggataattgcttgaacccgggaggcggaggttgcagtgagccaagatggcaccactgcac

SEQ ID NO: 72657 - DNA, 332 bp, Homo sapiens
tttatcttggtaagaggctcactcagtaagaggcacatgggaaaactgaaacccttaaaagtgattcaggcaggtccattgactcaagatctctctaggcacatgcctattgcccattgaggtgtgaattacctccatgggttaaattgttgatgtagtttctgttaaatatagaatatgactctgaatgactattctccttgctcaggggatggaaaatgattaaaacaaaatgcctgctctgaatgcaattaaaccagggaaaataagaccagaacaaaaatgatcataacgcaaaatatgacagaagtagtttcagaagaatgatgcat

SEQ ID NO: 72658 - DNA, 354 bp, Homo sapiens
cagctcactgcaacctccacctcacaggttcaagtgattccttgcctcagcttcccaagtagctgggactaccggtgcacaccaccatgtccagctaatttttgtattttttattagagacagggtttcactatatgttggccaggctggtctcaaactcctgacctcaagtgatccgcccacctcggcgtcccaaaatgctgggattacaggtgtgagccaccatgcccggcctaaattatagctattttagaatgttgaaagtagtattatgtgatttcagtttgccataaatttttcatatggttactaattatttcttttttgtgatatatcttctgaaatctattgagt

SEQ ID NO: 72659 - DNA, 379 bp, Homo sapiens
acggagtctcgctccgtcaccaggctggtgtgcagtggcgcgatctcggctcactgcaacctccgcttcccaggttcgagcaattctcctgcctcagcctcccgagtagctgggattacaggcccatgccaccacgcccagctaatttttctatttttagtagagacgaggtttcaccatgttggtcaggctggtctcgatctcatgacctcatggatccacccgcctcagcctcccaaagtgctgggattacaggcatgagccactgtgcccggcccgtaacccaattcttaaacagctttattaacatataattcacatgccacaaaattcagtcatttaaagtatacagtttaatgtatttaatatattcacagag

SEQ ID NO: 72660 - DNA, 280 bp, Homo sapiens
ctggtctgaaataactagaccagtggttctcaactggggccatttggccacatctggtgctgctgatatccagtgggtggaggccagggaggcccataaacacctaagacagtgcacatgccagccctctacccagcatgccagtggtgccaaggttcagaaaccctgaattccatgctatctcatgacacatcagttctaaacacattgactggttttaccccattggcagtttctgtttacacccaggtctgtgggcatatggaaaatcacggctgtt

SEQ ID NO: 72661 - DNA, 444 bp, Homo sapiens
tgagcctgatgtttggagcactaactggtggcctaagtaagagtcatgacattagacccatatagagaaggaagtgtaattctagcacacaagtttgcttagtacaatatttgcctgaacaatatttacatagtcataataatgtaacttttaaaagtggaggcaacaatagagtaactaaaaattaacagttaaaacaaaggttgcctctgaaggatggaataggggtaaggatgcataggatacaagattttacgatcatcagctctttctatacctgtgcagtccaaaacggtagccaccagccatgtgtgtggctccagagtacttgcaacgtagctagtcctaattgagatttgctgtcttctgaattgtgaagactttgtatttaaaaaaaaagaatgtaaaatagctcattaatcatttttaacgttgtttacatgt

SEQ ID NO: 72662 - DNA, 209 bp, Homo sapiens
gaaagaaaatcttaacagacctaaaaccaaaaaagaatcagaaattaaaagaaaaaaaacaactcccaataaagtacaggaacagattgtttctttactggtaaatcctaccaaacatttaaagaaaatttaacatcaactcttctaagacttttccagaaaattgaagaggaaggaatgcaacccaactcattctttgagtatcacta

SEQ ID NO: 72663 - DNA, 3177 bp, Homo sapiens
  misc_feature (1)..(1): n is a, c, g, or t
  misc_feature (2439)..(2439): n is a, c, g, or t
natttgggaagaaaaagaaaatgttggatcatttacaaatcgaatgaccccagaaaagcacttaaattctttgcggaatttggctaaatcattggatgctgagcaggacaccacaaacccaaaacccttctggaacatgggagagaactcgaaacagctgcccggacctcagaagctctcagatcctaggctctggcaggaaagtttttggaagaattatagccagcttttctggggcctcccctctctgcacagcgagtccctggtggctaacgcctgggtaactgacaggtcttatactttacagtctcctcctttcttgttcaatgaaatgtccaatgtctgcccaattcaaagggagactacaatgtccccactgcttttccaggcccagcccctgtcccatctggggcccgagtgccaaccctttatttcatccacaccccaattccggcccacacctatggctcaggccgaggctcaggcccatcttcaatcttctttcccagtcctatctcctgcttttccatccctgattcagaacactggagtagcttgccctgcatcgcagaataaagtgcaagctctctccctacctgaaactcagcaccctgaatggcctttgttgaggagacaactagaaggtaggttggctttaccctctagggtccaaaaatctcaggacgtctttagtgtctccactcctaaccttccccaggaaagtttgacatccattctgcctgagaactttccagtcagtcctgaactccggagacaactggagcaacacataaaaaagtggatcatccaacactggggcaacctgggaaggatccaagagtctctggatctgatgcagcttcaggacgaatcaccagggacaagtcaggccaagggcaaacccagtccctggcagtcctccatgtccacaggtgaaagcagcaaggaggcacagaaggtgaagttccagctagagagggacccgtgcccacatctggggcaaattctgggtgagaccccacaaaatctatccagggatatgaaaagcttcccacggaaggttctgggggtgacttctgaggagttggaaaggaacttgaggaagcccttgaggagtgactcgggaagtgatttattaagatgcacagagaggactcatatagaaaacatcctgaaagcccacatgggcaggaacttgggccagaccaacgagggcttgatccccgtgcgtgtgcgtcgatcctggcttgctgtcaaccaggctcttcccgtgtccaacacccatgtgaaaaccagcaatctagcagccccgaaaagtgggaaagcctgtgtgaacacagcccaggtgctttccttcctcgagccgtgtactcagcaggggttgggagcccatattgtgaggttttgggccaaacacaggtggggtctacccctcagggtcctcaagcccattcagtgctttaaactggaaaaggtttcatccttgtcccttacacagcttgctggtccctcctcagccacctgtgaatctggggctggctcagaagttgaggtggacatgttccttagaaagccaccaatggcaagtctgagaaagcaggtgctgaccaaagcatctgatcacatgccagagagtcttctggcctcctcacctgcatggaagcagttccagagggcaccgcgaggaatcccatcttggaatgatcatgaacccttgaagcctcctccagctggacaggagggcaggtggccatctaagcccctcacgtacagcctcacaggcagcacccagcagagcaggagcttaggagcccaatcttcaaaggctggagagacaagggaggcagtgccacaatgcagagtccccttggaaacctgtatgctggcaaacctccaagccacaagtgaggatgtgcatggtttcgaggctccagggaccagcaaaagctctctacaccctagagtgtctgtctcccaagatccaagaaagctgtgtcttatggaggaggttgttagtgaatttgagcctggaatggccacaaagtcagagacccagcctcaagtttgtgccgctgttgtgctccttccagatgggcaagcatctgttgtgccccacgcttcagagaatttggtttctcaagtgccccagggccatctccagagcatgcctactgggaacatgcgggcttcccaggagctacatgacctcatggcagccagaaggagcaaactggtgcacgaggagcccagaaaaccaaactgtcaaggctcatgcaagagccaaaggccaatgtttccccctattcacaagagtgagaagtttaggaagcccaacttagaaaaacatgaagaaaggcttgaaggattgaggactcctcaacttaccccagtcaggaaaacagaagacacccatcaggatgaaggcgtccagctactgcnatcaaagaaacagcctccttcagtaagcccctttggagaaaacatcaagcaaatttttcagtggattttttcaaagaaaaaaagcaagccagcaccagtcactgctgagagccaaaaaacagtaaaaaacagatcatgtgtgtacagcagcagtgctgaagctcagggtctcatgacggcagttggacaaatgctggacgagaaaatgtcactttgccatgcgcgccatgcctcgaaggtaaatcagcacaaacagaagtttcaagccccagtctgtgggtttccctgcaaccacaggcacctcttctactcagaacacggcagaatactgagctatgcagccagcagtcaacaagccactctcaagagccagggttgtcccaacagagacagacaaatcagaaatcaacagcccttgaaaagtgtgcggtgcaacaatgagcaatggggcctgcgacatccccaaatcttgcaccccaagaaagctgtatccccagtcagtccccctcagcactggccgaagacatccggtgcctctagccaccatcaccactgtccaaggcactgtcttctttgggaaggtatctgatttggtcagtcacaaattcttttttagccttccctggagaaaaacaagtccccaagaaaaaattcactctatgtagagaaaaaatattttctctcatgttagtacatgcagaacatttaatattccacaatatatatggttttttattc

SEQ ID NO: 72664 - DNA, 369 bp, Homo sapiens
atggattgccacagtaaggtaggaggagtacttctcctgaattatagtattgagatttgtatggcatattgaaaagcatcactcgttaaatattacgttgtagggacttttttgcattgtaaacatttgcgagtaaagggcaagttgaaagcttttttttaagatgctgtattatggagccacttcagaattttatatagagcaaaacaggccataaatgaataagtgaaatgaaataatattcagtgacctgtttccgtaagtcacaattaatttttgaaggtgattaaaatgcttactaagagccaggctggactcagtgctttacatatgatgcgtttgttttccccaccctcctttcagtttgga

SEQ ID NO: 72665 - DNA, 276 bp, Homo sapiens
tgagagttaggaagaatattctagactattagggataattctaagtatcttttagtgttcccatgtccagtgaaaaacgttaatgtaagacaaagcaaccccatatacacagtccatcaaaggttcttataccttagagttgcaagattcatccatcccaccaggtgaaaaaacccaaccagccaaggtgtttgtaaagaaaaataaaacatgaaatgcatagtcaaggaagggcattataagcaccaatggcctcatgaccaattgcagtactga

SEQ ID NO: 72666 - DNA, 424 bp, Homo sapiens
aataaaagtaaagtcaagcaaaccccccaaaattaaaatacatgtttgatatttaagctaaaatacttataggctgatttaaaggaatgatccctactttctttaaaatggagttatatatctatgtttatattctgtaacagatatgccattttagaaaatcagaagagatgtatggaactgataaccttagtccggagtggctaggttatcctttaaaaccaggatatatcttttttcttccttcctaaatattttgttattcagaaaaaaattcacagaaaaagaaaattatatttaactaagaggggatgttgtatgcccaagttctttagcatcgaagagggccgatggctgggaacgctggagagaggacagagcaaggtaaggaggctcttggtggaatgatgcttgtcctcagacc

SEQ ID NO: 72667 - DNA, 446 bp, Homo sapiens
tacatgtggacagacagagcagaatagtagacattggagacttcaaaaggtgggaggataggtgagagatgaaaaattacctattgggtaccatgtacactattcgggtgatgggtactctaaaagcccaggcttcaccactgcacagtatatccacgaaacaaaactgcacttgtaccccctgaatctataaaattaatacaaataaaaaagattgaaggcacctgtgctcttaaatcctttccagcctgggcaacagagccgagctccgtctgaaaaaaaaaaaaaaaagattagctgggcatggaggtgggcacctgtaatcccagctacttgggaggctgaggcaggagaatcgcttgaacctgggaggcagaggttgcagtgagctgagatggcgccatggcactctagcctgggtgacaagcaaaactccatctcaaaaa

SEQ ID NO: 72668 - DNA, 656 bp, Homo sapiens
aacagaacagaaagctctccctcttgtgtgaggcagttgctgtggaaaccccacgggcaggaggcccccggccagcacatcctgtctgcttgtgtctgctccacgagttctgggaccggggccatgtctccacacctcactgctctcctgggcctagtgctctgcctggcccagaccatccacacgcaggagggggcccttcccagaccctccatctcggctgagccaggcactgtgatctccccggggagccatgtgactttcatgtgccggggcccggttggggttcaaacattccgcctggagagggaggatagagccaagtacaaagatagttataatgtgtttcgacttggtccatctgagtcagaggccagattccacattgactcagtaagtgaaggaaatgccgggctttatcgctgcctctattataagccccctggatggtctgagcacagtgacttcctggagctgctggtgaaagggactgtgccaggcactgaagcctccggatttgatgcaccatgaatgaggagaaatggcctcccgtcttgtgaacttcaatggggagaaataattagaatgagcaatagaaatgcacagatgcctatacatacatatacaaataaaaagatacgattcgcaatggagaa

SEQ ID NO: 72669 - DNA, 209 bp, Homo sapiens
  misc_feature (28)..(28): n is a, c, g, or t
gtaggtctcgatgctctgcctggcccanaatccaacgcagggactgtgccaggcactgaagcctccggatttgatgcaccatgaatgaggagaaatggcctcccgtcttgtgaacttcaatggggagaaataattagaatgagcaatagaaatgcacagatgcctatacatacatatacaaataaaaagatacgattcgcaatggagaa

SEQ ID NO: 72670 - DNA, 707 bp, Homo sapiens
aacagaacagaaagctctccctcttgtgtgaggcagttgctgtggaaaccccacgggcaggaggcccccggccagcacatcctgtctgcttgtgtctgctccacgagttctgggaccggggccatgtctccacacctcactgctctcctgggcctagtgctctgcctggcccagaccatccacacgcaggagggggcccttcccagaccctccatctcggctgagccaggcactgtgatctccccggggagccatgtgactttcatgtgccggggcccggttggggttcaaacattccgcctggagagggaggatagagccaagtacaaagatagttataatgtgtttcgacttggtccatctgagtcagaggccagattccacattgactcagtaagtgaaggaaatgccgggctttatcgctgcctctattataagccccctggatggtctgagcacagtgacttcctggagctgctggtgaaagaaagctctggaggcccggactccccggacacagagcccggctcctcagctgggactgtgccaggcactgaagcctccggatttgatgcaccatgaatgaggagaaatggcctcccgtcttgtgaacttcaatggggagaaataattagaatgagcaatagaaatgcacagatgcctatacatacatatacaaataaaaagatacgattcgcaatggagaa

SEQ ID NO: 72671 - DNA, 247 bp, Homo sapiens
gccggatctggatctggctgggaaatcatgatgtggataacagtgtttttttgttgttgttttttgttttgaaacggagccttgctccatcacctaggctggagtgcagtagcgcaatcttggctgtctgcaacccttgcctctcgggttcaggagaattcctatagccagggagatggaggctgcagtgagctatgataatgccattgcactccagcctgggtgacagagtgagatcctgtctcca

SEQ ID NO: 72672 - DNA, 432 bp, Homo sapiens
gaaatgcagttttcccagtaccatttattaaagagactatcctttcccccattatgtcctcttgttacccttctcaaaaatcaattgaccgtatgtttggatttatttctgggctgtctattctgttgcactggtttatgtgcctgtttttctgccagagcatgctgttttaattactattgttttgtaacataattttgaatccagaattgtgatgcctacaactttgtttttcaaacagtaatttaaaaatattttggggacagctgcagtggcttacacctgtaatcccagcacttttggaggccaaagcaggagaatcgcttgagtccaggagttcaaaatcagcctgggctcttagggagacctgccttcacacacacaaaaattttattttaattagctgggcatggtgacacacacctgtagtcc

SEQ ID NO: 72673 - DNA, 552 bp, Homo sapiens
cctcccgagtagctgggactacaggcacccaccaccacgcccggctaatttttggtatttttaatagagtcagggtttcaccgtgttagccaggatggtctcgatctcctgacctcgtgatccgcccgcctcggcctcccaaagtgctgggattaccggcgtgagccaccgcgcccagcctatgagctatctttctaatgaggaagacaggcaaccactagggaaccaaataaatgcttgctgcaagttcaggtcaccttatgggctatgagggcaacaaagcagggtcagggagagagagtgctggggccacagcttcactggctggactcagggcatgcctcaccgaacacatcttatctagggcaggacccagaatgaagcgtgggaacaagtctgcatgtggtctgggctgaggcagtagcaagtgcagtgctgaggacgttccagcttggtgccctggagtgacagcaagctctatgtggctgcagcgacccaggcaagagggagagcagttggaagtgaggtcagtgcgccaatggggctttggag

SEQ ID NO: 72674 - DNA, 378 bp, Homo sapiens
tactagaggaccccatcgcgaatcactcaaattccaaaaacaatcattttttcattaatcaatggaggacccagcaattgaagtcttgtgtgtatttaatgtccaccgattttaaccttgttattactcaatttcactattttaacaccagacaataaccttctgagagctgcctcagaaaacacatcactctaaaataacttgattcaaattaaggttgtcttcttaggacagtggtttagtctcatgctgatattaaacagtacaggatttggagattcttgttctcacttataaacctcttaagattaagggttcagctttataactcttttaagtctttagcactcaacactgaacttgtactgggtcttcttg

SEQ ID NO: 72675 - DNA, 494 bp, Homo sapiens
ctgagacagagtccctgtcacccaggctggagagcagtggagcgatcttgactcactgcaacctgtgcctcccaggttcaagtgattctcgtgcctcagccttctgagtagctgagactacaggcgtgcactaccacacctggctaatttttgtatttttagttgagatggggttttgccatgttggccagggtggtctcgaactcctgacctcaggagatccacctgcctcggcttcccaaaatgctgggattacaggcatgagccaccacacctggccgtttcaccccatttgaaccttagttttctcctctgggaagccaaattaataaatgtttttatcacagggccgtcgttgaagcatgtatgactatgtgtgtgaaaatgttctgcaaaccaaaaagggctcaggtgctataattttttttctgcaaaggttgggctttgaaaggactttaattaaagattttaactgtaagatattcataacctaa

SEQ ID NO: 72676 - DNA, 715 bp, Homo sapiens
gagcagggggtgtggttggggacagtgtccagaggcttctttgaagctgacgcagggcctcacattggcatctctggaaatagtgaacacccagctccagagtggattagatgttagccacccctttataggggaggcctgagcaaatgtccctgagtgaatatcacttgcatctcccagagtaaaggcatctgacggcctcacttcagaggcttcctgcagtctgtccatgtttgattgtcattctcctcctctagcctgagtaccctggagatgtcacttttccttctcagaaaacactaagtaaggtgttccctgaggaggacccgagcccaccattggttctcttacccagggaagtgtctggccctctcctttgttctctgtctttaatctacttcctgtcttatgacaaagaaatctctgggagtttttaaactcaagaattattttaaaagtcacaagataacaaatgtcaagcccccaaaccacactgcctggaggactgcacatctgggagtgcctgggccgggccccagtgtccatgttggtgaaatagggagcggcgctcctctgaaggattgttcttgggactggcatgggccaggtcagtagcagtgctcagtacagtgctcacagaaggcagggagggacggattgctcccctcctttttcttcccctcagagtatgtatgttagttgagaaaaaaggaaa

SEQ ID NO: 72677 - DNA, 301 bp, Homo sapiens
caccctgaagtattagtcatcttcatattttatatactactcatgaatcgggggacgatattcactgtcattatcagcagaggaacttcctgtattgaaatctaagccacaagtggatccttctgtggctgtcaacatggataccattacactacaagtgcttcaccattaaatatcctgccaaagggctgtagcttcagaatattgaattttatcacatccaatagctcacaggttacaatagcaatcccacctttttagttattctttgtgcatctgttttatttctgtaccatagtcc

SEQ ID NO: 72678 - DNA, 370 bp, Homo sapiens
attagaaaattaatctgaccctcatgaaacaagctaccccaaaatactaagccacaaaaactggctttgcaagactgtcttccgcagctgtgatttttctttaaagtgcagcatctccttccgttaagttagaaggctttggtaaaagtgaccagtgacagaggtgttcaagggctctctttttaaaatctaggtaattgatactctcccccacgcttcaccccatggtgaagccatcacgttgctatctagctgtttgtcccgtctcccactcactagccccagaacagccttctcctgctgtgtccctcactcccctactttatgctctgtcatagcagctgttcaggacatcgcccgagcgcagcgg

SEQ ID NO: 72679 - DNA, 196 bp, Homo sapiens
caaacaagcaacttgaggacggattaggctagactctggcaagatgtagaaccttccagaactctggaggaatttgaaacaggcagagctgtgaggaaagcttttgggagcccactagagatctgcttttctgggtagagatagagaaggacccaggaatcacctgtgacctttgaagggctttgttgttcctggg

SEQ ID NO: 72680 - DNA, 377 bp, Homo sapiens
tgaaaaatttagttcataaagttttactagtagaacaaggacctgaatgaaggtggtggcagtaagaaacttggaaaacaaatgatacataacaaagactaaaactgctctccaacagtatattgtccactataaatcagatactatagaaataagaaatataaaaaaaacacttagccactagcatgcttctcaatcacatggaaattctagatctatctaatttaatctacagtttcaggaaatggattaatagatcttgatatgagacagctgctgacccctgtgaaaattaaaaacattttaaaagccctcttccttttttgttatctctaaaataaccagttttctaggaaaaaggaaaagagtaccatatt

SEQ ID NO: 72681 - DNA, 419 bp, Homo sapiens
agcttcatcttccttgggaggtacatttacaccagtttgaaagtctctgtgtctcattagtaccaatctcctgaacaactgtgagatttctcacataatttatgggtccctaatataatatttaattataagtagatatttaataaagaccaggaaacatatgagaaagcggcaagatttagacaccggcttctctgtcccaagaatcttctgtgtactgcattttccctaattaaaaatgagggtatttcaaccttccaaaatattgttgagtcccacagattattgaacaccttgagccttctggagaaaactacaaaaggcatgtgccttctcaaattccagcattttatcttacagatttagtttcagttattttgaagagcttagtttccctgtcacagggcatgctattagaa

SEQ ID NO: 72682 - DNA, 361 bp, Homo sapiens
tttaatcatgtcacagagtttattgtgtcatgtttgggggcctaggaatcatccacagaagcagaaaattgtgatgattagttttaggtgatctgcaaaacatcagatcagaaaatacacattttccacgcatctatcctcctacttactcacctatccacccatctaagtttaggtatcttgttctgtactagatacaagaggtctttaggatacagatcctgctcttcagatattcaaactttataaaagacaagacatgtaggtaaataataatgaaggcagaaagtggtactataaacgaaataaaaactaagtttgatgggggttgaggagtcattccaatctgaagggatacaga

SEQ ID NO: 72683 - DNA, 445 bp, Homo sapiens
ataataaaagggcttttattaagccctttggaaagaaaaaattgaggtaagttctagttaaaatttcatgagggaacaataatctccaagacttattactcttatagtgaaggcaactttaaagatgttttctcactttcttttaatcttttgctaacaaggcccactttttagtatcaaatattcatagcacttatagtgagtacatatattatagtactaataacttacagctaggaaaatatgaggataacttgtaagataagaaatcagagttaaaattttgtatgctatctcttaccattccccttctcaaacagaaaagaaaagaaaggttaaagaagaaggaagggaaaaggagcttgaggtgaaaaaagaaaagcataaaacacatgagttgacacttcaaacttaggctaacttttggtgagggatgtgtatatgt

SEQ ID NO: 72684 - DNA, 1008 bp, Homo sapiens
ctggctcctggtgcctctctatggagagcacctctgtgcctctctgagagcactcacagccaaaagtacacagctgcccccaggctgagagtgcttgatacacccttgaatcccctcttatatgatgccccagcccaggagagataaaagcatcagcaccatgagattcacctgcctctggtcgttagggaacaatggaggcctgcgatttggagttaaactctcagtgatctctgtgttgacaacaccaaagctagaggaatccagtaggatgtgggcatggttttcccggaaggctgactgagcagttctgcaaatgtttgcaagtacagggcagaatttcatccagcctcagaaccttgagccaagactcagcatcagcaaagccaaaagtttcatttcttcgactgtgggagtgctagtcccaacctttagatggccattcagttttaagttcaataagcattttgattgagaaatactttgctgaggagtgaaaagtccttggctttgaaagacgaatgatgagcagttcagtggcccatgtcacagtccaggcacctgccaaaggtgactccctgggaggagcatcttagtcacagagccagtgcctgctgtaggtgtgcagaagggtgcatgtgtgtgtgtgtgtgtgtgtgtgtatgtgtacgtgtacatgtgtgttgggggaagggagcaaggttgtgggagcatttcttatctgctcttctctgcaagatttcctgtgatttaagtcacattaaagtacccataagcccgtaatgcaaaagaaccccaaaaccagcccagcagccaaccatggcagcaagtagatgctctggtctttagatagtcagaaatgacacttctgggctctcaggcagtcagtgggttgagctccccattaaagtccccctgccaagtctggaatagtcctagtcccgtgtgtgtgtgtgtgtgtgtgtgtgtgtgtgtgtgtgtgtgtgtgtgtacccgcgtgcatatgcg

SEQ ID NO: 72685 - DNA, 2397 bp, Homo sapiens
ctaaaccaaattcaattaatgtaggtgcaaaaaatccaaaataaaactagcagtttgaattcagcattgtagcaaaagatatatcattttcaaggaagatttgtaccaaaacatgcaagattgagtgaagagtaactcactgtagctcactaaattaacagattaaagaagtatagtcatcttcacaagctgaaagagtatgtgataaattcaacatcctctggtattcttaacaatctcgaaatagaaggaaacttccttagcttagcttcttggcttcattaaatatacctaacagaaatccacaggaaacaaacttggtgaaaagtttttgctaagataaaaacggtactaaaaagtacacattttgggaaatgagacaaggctctcgttatttgtaaatatggggtctttttttttttggacaaaaaaccccctgtgatgatctactggcatgctattacagctaataaagctgaataaggaggctgtgcacaacaccaacacaccggtatgaaaagtgtgtacaccagcaataaccaattagaaaatgtatgaggaaatagactctcatccacaatagctgcgagaagtaaatattatctagaaataagattaacaagagaaatgtaaggcctatataaataaaaggataaatctatgctagagggtataaaagaaacacaaaaatagaggtatgccatgtataagacccaacataataaatagttctaccaaattaatttataaattcaaagcaatttcatataaccacagtaaagctttttaaatggatgtaataacctgattataacattaatctgaaagtcatcaggcataaagcaattttgattacatctcaaaacaatccatggagttagggtaaatgtgctgttcacacaggaataatcacaggtatagaaccgagaacctaggaacagagcaatgtatatatatatgtatttaaaaaatggcatcacaagtcagtagagaagggtttgaactattcagtaaatgatgttgaggttatttactactttttcttatttcatatcatggatgaaaaaaatcaagatgaattaaacatggaaattaaaaataactagaagaaaatactggaaaaaaattgtaataaatgtgtaagaaaggcattcccaaccaagacacaaaacccagtagccatgaaaaaaaagatagatttgactacatttttaaaaagtaaaacctttcactttttacaaaactttgataaaattagatttcataaataaaggagtgggaaaatacatgtaatagaacagaagatttaagataatataaagagcacctacaaacaacaaaaattggacaaaggctataaaaatattttataaataagaaatacagactataaacataaactttcaacctcgtaagcaatcaggaaaattaaagttaaaatgagatactatttttcaatacattgaaatggcagattattaaagattggtgatagtgctggagataatgtgaggaaaggagtattctcagtcattgtagaaattgatacagcttttggatggacagtttgacagtgtgtatcaacatgtgaaatgtctccagcctttgatctaatgactaattttaggcatccagcctgaagaaatattcacacaagtgcccaaagagtcagatacaagactgtgtgaagtgttttttgagataataaaaaactagaaacagcataaatgtacagaaatgcagaaattgttgaattagtacataccaatttctgacatataacactctgcagcagataaagacaatagctctctagtgtggacatgaaaatatttctaagacattgacaggacgaagaagttgcacagtaaccacgcactcctgtttacatttgtatagttaaaacttgtttacctatacgtagcatatatgcgtgtgtgcaccctagaaaagagtctgtgataacacatatcaagctattgacagcggttttgtctgctgaaggaggaaaaaaggggggcttctcacattttactccatttaattctaggttgtttggtttaaaaaaaaagtttttatgtacaacagacaatttttaaaattccttttcatcatagaaaatgaaaatgtgtactctgttatcctttacgctctgtccatttttttcttcaaaaatgtgtctgacctattatcaatgtgaatgaaaatgagctttgctacataacctcttttcagagctttgtattcctgaagtgttggagtcgcctacatggcatagtcaaatgtttttaacttaaccacaacccacagtaaaaatgaagctttctgcaaagttaaaagtagtagtcctggccccaccttccttgtgtgcacgtataattaatggaaaattgcatc

SEQ ID NO: 72686 - DNA, 1960 bp, Homo sapiens
ttgggtggtgttctagaggatcccagatgattgtccccccctccccaatgctgaccctaggattttccttccctgccctcacctgcaaatgagttaaagaagaggcgtgggaatccaggcagtggtttttcctttcggagcctcggttttctcatctgcagaatgggagcggtgggggtgggaaggtaaggatggtcgtggaagaaggcaggatggaactcggcctcatccccgaggccccagttcctatatcgggccccccattcatccactcacactcccagccaccatgttacactggactctaagccacttcttactccagtagtaaatttattcaataaacaatcattgacccatgcctactccatgccaggcccagtgctggacacagagacatgaagctctgtctgtgggagacagggattctgacacagacaccggacaaaccattgtcttggggagcccagaagagaaagtgggcagggtggggtcattggggaagatgctctagaggaattaatgctggaatggggtgttgaaggatgagtaggagttagttaggcattgagtttgccctgggcaaaagcccagaagtgggagtatgtggtatatcttcagagaactgggtaatttcagtgtggctgctgtgttgggcatggatggagaatcagcaagagaaatgctgtattaggactaataatccatctacgctgcttaagcaaaaaggtatttgttggtttatgttacttaatagtccaggggcacctggcttcaggtaggtttgatccaggcatcaggccattgcatctattttttcagtgtaagttgaattctagtaatttttatcaagtaagggctcctttcctggtggcacagatgacttcagcagttagaagtttctatccctccagctttctgcagcagaaagaccctcattgtcagtttcccagcaaaagtcccagggcagactctcattggcccaaatgggccatgtgattttctctaaaccaatcactgtgactctagagtggccagactcagagctgcacttagtaggggttcctcaaaggaaggtcaagtgtcatgagcaggagaaaaggcatgggagctggacagattatagtggttgaagtctgtgcagtacagaagggcggagcttattcacacagcacctttggggccaaaatgaataagctggactttctccccatggcactggggaaccatggaagttcagggaacttcagggaagaggcttggtcaattcctgagagcatcctctgtgctggggacacagtggtaatcaagacagccccaacactgccctcatagagctcacagtccaatggaggaggcagatgtgtcctcaggcagcgactgggcagggctggtataggggagtccagaggtgatgcctgcctcagccagggagggcttcctggaggagaaggagccagctagacatggataggagtgcgttttaggcacagcaaatggcacatacaagggccagggagcaagagagaggacaggtcctcaacaaatggcatgtgactttgtaagtgtagaattgctgtgaggtatggggctaggggcgtcagtagggccttgaaggttatggacaggggcctgggctttcttccaagggcactgggggagccatggcaaggttgtaggtagggtagagatgggcgggtttgtgctatgtgcagggtggaagggagggaagttgacaggtcagaagatcaggaaagaggtcggggctggacagatggggagagcgcagatagatttaagagagtcctgtgaggcaaagtgggcaggacctggtaacaggtgtctggactgtggctttggctggctcagaaggtccccactggcgtgtgtggtctatgtagcctctgggtgtggagctgggatcttcaactggggacagtacagtaaagaacatcacagc

SEQ ID NO: 72687 - DNA, 5129 bp, Homo sapiens
cgcctccctccgccgccgcttgggccggctccgcgccccctccgcggcccccgcccgcccgcctgcccgccgcccccatggcgcccggggtccccgctgcacggggccactaggaccctcggcgtcccttcccctcccccgccctgccccctctcccgccgcgcggacccgggcgttctcggcgcccagcttttgagctcgcgtccccaggccggcggggggggaggggaagagaggggaccctgggacccccgccccccccacccggccgcccctgccccccgggacccggagaagatgtcttcgcggacggtgctggccccgggcaacgatcggaactcggacacgcatggcaccttgggcagtggccgctcctcggacaaaggcccgtcctggtccagccgctcactgggtgcccgttgccggaactccatcgcctcctgtcccgaggagcagccccacgtgggcaactaccgcctgctgaggaccattgggaagggcaactttgccaaagtcaagctggctcggcacatcctcactggtcgggaggttgccatcaagattatcgacaaaacccagctgaatcccagcagcctgcagaagctgttccgagaagtccgcatcatgaagggcctaaaccaccccaacatcgtgaagctctttgaggtgattgagactgagaagacgctgtacctggtgatggagtacgcaagtgctggagaagtgtttgactacctcgtgtcgcatggccgcatgaaggagaaggaagctcgagccaagttccgacagattgtttcggctgtgcactattgtcaccagaaaaatattgtacacagggacctgaaggctgagaacctcttgctggatgccgaggccaacatcaagattgctgactttggcttcagcaacgagttcacgctgggatcgaagctggacacgttctgcgggagccccccatatgccgccccggagctgtttcagggcaagaagtacgacgggccggaggtggacatctggagcctgggagtcatcctgtacaccctcgtcagcggctccctgcccttcgacgggcacaacctcaaggagctgcgggagcgagtactcagagggaagtaccgggtccctttctacatgtcaacagactgtgagagcatcctgcggagatttttggtgctgaacccagctaaacgctgtactctcgagcaaatcatgaaagacaaatggatcaacatcggctatgagggtgaggagttgaagccatacacagagcccgaggaggacttcggggacaccaagagaattgaggtgatggtgggtatgggctacacacgggaagaaatcaaagagtccttgaccagccagaagtacaacgaagtgaccgccacctacctcctgctgggcaggaagactgaggagggtggggaccggggcgccccagggctggccctggcacgggtgcgggcgcccagcgacaccaccaacggaacaagttccagcaaaggcaccagccacagcaaagggcagcggagttcctcttccacctaccaccgccagcgcaggcatagcgatttctgtggcccatcccctgcacccctgcaccccaaacgcagcccgacgagcacgggggaggcggagctgaaggaggagcggctgccaggccggaaggcgagctgcagcaccgcggggagtgggagtcgagggctgcccccctccagccccatggtcagcagcgcccacaaccccaacaaggcagagatcccagagcggcggaaggacagcacgagcacccccaacaacctccctcctagcatgatgacccgcagaaacacctacgtttgcacagaacgcccgggggctgagcgcccgtcactgttgccaaatgggaaagaaaacagctcaggcaccccacgggtgccccctgcctccccctccagtcacagcctggcacccccatcaggggagcggagccgcctggcacgcggttccaccatccgcagcaccttccatggtggccaggtccgggaccggcgggcagggggtgggggtggtgggggtgtgcggaatgggccccctgcctctcccacactggcccatgaggctgcacccctgcccgccgggcggccccgccccaccaccaacctcttcaccaagctgacctccaaactgacccgaagggtcgcagacgaacctgagagaatcgggggacctgaggtcacaagttgccatctaccttgggatcaaacggaaaccgccccccggctgctccgattcccctggagtgtgaagctgaccagctcgcgccctcctgaggccctgatggcagctctgcgccaggccacagcagccgcccgctgccgctgccgccagccacagccgttcctgctggcctgcctgcacgggggtgcgggcgggcccgagcccctgtcccacttcgaagtggaggtctgccagctgccccggccaggcttgcggggagttctcttccgccgtgtggcgggcaccgccctggccttccgcaccctcgtcacccgcatctccaacgacctcgagctctgagccaccacggtcccagggcccttactcttcctctcccttgtcgccttcacttctacaggaggggaaggggccagggaggggattctccctttatcatcacctcagtttccctgaattatatttgggggcaaagattgtcccctctgctgttctctggggccgctcagcacagaagaaggatgagggggctcagcggggggagctggcaccttcctggagcctccagccagtcctgtcctccctcgccctaccaagagggcacctgaggagactttggggacagggcaggggcagggagggaaactgaggaaatcttccattcctcccaacagctcaaaattaggccttgggcaggggcagggagagctgctgagcctaaagactggagaatctgggggactgggagtgggggtcagagaggcagattccttcccctcccgtcccctcacgctcaaacccccacttcctgccccaggctggcgcggggcactttgtacaaatccttgtaaataccccacaccctcccctctgcaaaggtctcttgaggagctgccgctgtcacctacggtttttaagttattacaccccgaccctcctcctgtcagccccctcacctgcagcctgttgcccaataaatttaggagagtccccccctccccaatgctgaccctaggattttccttccctgccctcacctgcaaatgagttaaagaagaggcgtgggaatccaggcagtggtttttcctttcggagcctcggttttctcatctgcagaatgggagcggtgggggtgggaaggtaaggatggtcgtggaagaaggcaggatggaactcggcctcatccccgaggccccagttcctatatcgggccccccattcatccactcacactcccagccaccatgttacactggactctaagccacttcttactccagtagtaaatttattcaataaacaatcattgacccatgcctactccatgccaggcccagtgctggacacagagacatgaagctctgtctgtgggagacagggattctgacacagacaccggacaaaccattgtcttggggagcccagaagagaaagtgggcagggtggggtcattggggaagatgctctagaggaattaatgctggaatggggtgttgaaggatgagtaggagttagttaggcattgagtttgccctgggcaaaagcccagaagtgggagtatgtggtatatcttcagagaactgggtaatttcagtgtggctgctgtgttgggcatggatggagaatcagcaagagaaatgctgtattaggactaataatccatctacgctgcttaagcaaaaaggtatttgttggtttatgttacttaatagtccaggggcacctggcttcaggtaggtttgatccaggcatcaggccattgcatctattttttcagtgtaagttgaattctagtaatttttatcaagtaagggctcctttcctggtggcacagatgacttcagcagttagaagtttctatccctccagctttctgcagcagaaagaccctcattgtcagtttcccagcaaaagtcccagggcagactctcattggcccaaatgggccatgtgattttctctaaaccaatcactgtgactctagagtggccagactcagagctgcacttagtaggggttcctcaaaggaaggtcaagtgtcatgagcaggagaaaaggcatgggagctggacagattatagtggttgaagtctgtgcagtacagaagggcggagcttattcacacagcacctttggggccaaaatgaataagctggactttctccccatggcactggggaaccatggaagttcagggaacttcagggaagaggcttggtcaattcctgagagcatcctctgtgctggggacacagtggtaatcaagacagccccaacactgccctcatagagctcacagtccaatggaggaggcagatgtgtcctcaggcagcgactgggcagggctggtataggggagtccagaggtgatgcctgcctcagccagggagggcttcctggaggagaaggagccagctagacatggataggagtgcgttttaggcacagcaaatggcacatacaagggccagggagcaagagagaggacaggtcctcaacaaatggcatgtgactttgtaagtgtagaattgctgtgaggtatggggctaggggcgtcagtagggccttgaaggttatggacaggggcctgggctttcttccaagggcactgggggagccatggcaaggttgtaggtagggtagagatgggcgggtttgtgctatgtgcagggtggaagggagggaagttgacaggtcagaagatcaggaaagaggtcggggctggacagatggggagagcgcagatagatttaagagagtcctgtgaggcaaagtgggcaggacctggtaacaggtgtctggactgtggctttggctggctcagaaggtccccactggcgtgtgtggtctatgtagcctctgggtgtggagctgggatcttcaactggggacagtacagtaaagaacatcacagc

SEQ ID NO: 72688 - DNA, 4477 bp, Homo sapiens
gtggactatcgatataacaggtccgtctgcataacgtgaaggtgaacggacagactctcggagaattccagctgcaaatcccagctccaccactcactcgctgtgtgaactttaggtgggttaccagacctctctgtgcctcagtttccttgtatgtaaactgagggtgatctcgacacctgcctcaaagcgtggttgtgggtttaagcgtaaagtgctcacagcggcccctagagcacagtcagtgatcagtaaacatttcatggccgggcgcggtagctcacgcctgtaatctcagcactttgggaggcccaggtgggtggattgcctgtgcccaggagtttcaaaccagcctggacaacatagcaaaaccctgtctctactgaaaatacaaaaactgaggtgggaggatcagcagagcctggggaggccgaggctgcagtgagctgtgaccgtgccactgcactccagcctgggtgacagagtgacaccctgtctcaaaaaaaaagagaaatggatggaagttaaagtttctgggagtctgaaacttctctccatccccccctcccagaggtgatggtgggtatgggctacacacgggaagaaatcaaagagtccttgaccagccagaagtacaacgaagtgaccgccacctacctcctgctgggcaggaagactgaggagggtggggaccggggcgccccagggctggccctggcacgggtgcgggcgcccagcgacaccaccaacggaacaagttccagcaaaggcaccagccacagcaaagggcagcggagttcctcttccacctaccaccgccagcgcaggcatagcgatttctgtggcccatcccctgcacccctgcaccccaaacgcagcccgacgagcacgggggaggcggagctgaaggaggagcggctgccaggccggaaggcgagctgcagcaccgcggggagtgggagtcgagggctgcccccctccagccccatggtcagcagcgcccacaaccccaacaaggcagagatcccagagcggcggaaggacagcacgagcacccccaacaacctccctcctagcatgatgacccgcagaaacacctacgtttgcacagaacgcccgggggctgagcgcccgtcactgttgccaaatgggaaagaaaacagctcaggcaccccacgggtgccccctgcctccccctccagtcacagcctggcacccccatcaggggagcggagccgcctggcacgcggttccaccatccgcagcaccttccatggtggccaggtccgggaccggcgggcagggggtgggggtggtgggggtgtgcggaatgggccccctgcctctcccacactggcccatgaggctgcacccctgcccgccgggcggccccgccccaccaccaacctcttcaccaagctgacctccaaactgacccgaagggttaccctcgatccctctaaacggcagaactctaaccgctgtgtttcgggcgcctctctgccccagggatccaagatcaggtcgcagacgaacctgagagaatcgggggacctgaggtcacaagttgccatctaccttgggatcaaacggaaaccgccccccggctgctccgattcccctggagtgtgaagctgaccagctcgcgccctcctgaggccctgatggcagctctgcgccaggccacagcagccgcccgctgccgctgccgccagccacagccgttcctgctggcctgcctgcacgggggtgcgggcgggcccgagcccctgtcccacttcgaagtggaggtctgccagctgccccggccaggcttgcggggagttctcttccgccgtgtggcgggcaccgccctggccttccgcaccctcgtcacccgcatctccaacgacctcgagctctgagccaccacggtcccagggcccttactcttcctctcccttgtcgccttcacttctacaggaggggaaggggccagggaggggattctccctttatcatcacctcagtttccctgaattatatttgggggcaaagattgtcccctctgctgttctctggggccgctcagcacagaagaaggatgagggggctcagcggggggagctggcaccttcctggagcctccagccagtcctgtcctccctcgccctaccaagagggcacctgaggagactttggggacagggcaggggcagggagggaaactgaggaaatcttccattcctcccaacagctcaaaattaggccttgggcaggggcagggagagctgctgagcctaaagactggagaatctgggggactgggagtgggggtcagagaggcagattccttcccctcccgtcccctcacgctcaaacccccacttcctgccccaggctggcgcggggcactttgtacaaatccttgtaaataccccacaccctcccctctgcaaaggtctcttgaggagctgccgctgtcacctacggtttttaagttattacaccccgaccctcctcctgtcagccccctcacctgcagcctgttgcccaataaatttaggagagtccccccctccccaatgctgaccctaggattttccttccctgccctcacctgcaaatgagttaaagaagaggcgtgggaatccaggcagtggtttttcctttcggagcctcggttttctcatctgcagaatgggagcggtgggggtgggaaggtaaggatggtcgtggaagaaggcaggatggaactcggcctcatccccgaggccccagttcctatatcgggccccccattcatccactcacactcccagccaccatgttacactggactctaagccacttcttactccagtagtaaatttattcaataaacaatcattgacccatgcctactccatgccaggcccagtgctggacacagagacatgaagctctgtctgtgggagacagggattctgacacagacaccggacaaaccattgtcttggggagcccagaagagaaagtgggcagggtggggtcattggggaagatgctctagaggaattaatgctggaatggggtgttgaaggatgagtaggagttagttaggcattgagtttgccctgggcaaaagcccagaagtgggagtatgtggtatatcttcagagaactgggtaatttcagtgtggctgctgtgttgggcatggatggagaatcagcaagagaaatgctgtattaggactaataatccatctacgctgcttaagcaaaaaggtatttgttggtttatgttacttaatagtccaggggcacctggcttcaggtaggtttgatccaggcatcaggccattgcatctattttttcagtgtaagttgaattctagtaatttttatcaagtaagggctcctttcctggtggcacagatgacttcagcagttagaagtttctatccctccagctttctgcagcagaaagaccctcattgtcagtttcccagcaaaagtcccagggcagactctcattggcccaaatgggccatgtgattttctctaaaccaatcactgtgactctagagtggccagactcagagctgcacttagtaggggttcctcaaaggaaggtcaagtgtcatgagcaggagaaaaggcatgggagctggacagattatagtggttgaagtctgtgcagtacagaagggcggagcttattcacacagcacctttggggccaaaatgaataagctggactttctccccatggcactggggaaccatggaagttcagggaacttcagggaagaggcttggtcaattcctgagagcatcctctgtgctggggacacagtggtaatcaagacagccccaacactgccctcatagagctcacagtccaatggaggaggcagatgtgtcctcaggcagcgactgggcagggctggtataggggagtccagaggtgatgcctgcctcagccagggagggcttcctggaggagaaggagccagctagacatggataggagtgcgttttaggcacagcaaatggcacatacaagggccagggagcaagagagaggacaggtcctcaacaaatggcatgtgactttgtaagtgtagaattgctgtgaggtatggggctaggggcgtcagtagggccttgaaggttatggacaggggcctgggctttcttccaagggcactgggggagccatggcaaggttgtaggtagggtagagatgggcgggtttgtgctatgtgcagggtggaagggagggaagttgacaggtcagaagatcaggaaagaggtcggggctggacagatggggagagcgcagatagatttaagagagtcctgtgaggcaaagtgggcaggacctggtaacaggtgtctggactgtggctttggctggctcagaaggtccccactggcgtgtgtggtctatgtagcctctgggtgtggagctgggatcttcaactggggacagtacagtaaagaacatcacagc

SEQ ID NO: 72689 - DNA, 2997 bp, Homo sapiens
  misc_feature (1)..(1): n is a, c, g, or t
  misc_feature (4)..(5): n is a, c, g, or t
  misc_feature (8)..(8): n is a, c, g, or t
ngtnngcntttccagcagcgctgacctccaaactgacccgaaggtcgcagacgaacctgagagaatcgggggacctgaggtcacaagttgccatctaccttgggatcaaacggaaaccgccccccggctgctccgattcccctggagtgtgaagctgaccagctcgcgccctcctgaggccctgatggcagctctgcgccaggccacagcagccgcccgctgccgctgccgccagccacagccgttcctgctggcctgcctgcacgggggtgcgggcgggcccgagcccctgtcccacttcgaagtggaggtctgccagctgccccggccaggcttgcggggagttctcttccgccgtgtggcgggcaccgccctggccttccgcaccctcgtcacccgcatctccaacgacctcgagctctgagccaccacggtcccagggcccttactcttcctctcccttgtcgccttcacttctacaggaggggaaggggccagggaggggattctccctttatcatcacctcagtttccctgaattatatttgggggcaaagattgtcccctctgctgttctctggggccgctcagcacagaagaaggatgagggggctcagcggggggagctggcaccttcctggagcctccagccagtcctgtcctccctcgccctaccaagagggcacctgaggagactttggggacagggcaggggcagggagggaaactgaggaaatcttccattcctcccaacagctcaaaattaggccttgggcaggggcagggagagctgctgagcctaaagactggagaatctgggggactgggagtgggggtcagagaggcagattccttcccctcccgtcccctcacgctcaaacccccacttcctgccccaggctggcgcggggcactttgtacaaatccttgtaaataccccacaccctcccctctgcaaaggtctcttgaggagctgccgctgtcacctacggtttttaagttattacaccccgaccctcctcctgtcagccccctcacctgcagcctgttgcccaataaatttaggagagtccccccctccccaatgctgaccctaggattttccttccctgccctcacctgcaaatgagttaaagaagaggcgtgggaatccaggcagtggtttttcctttcggagcctcggttttctcatctgcagaatgggagcggtgggggtgggaaggtaaggatggtcgtggaagaaggcaggatggaactcggcctcatccccgaggccccagttcctatatcgggccccccattcatccactcacactcccagccaccatgttacactggactctaagccacttcttactccagtagtaaatttattcaataaacaatcattgacccatgcctactccatgccaggcccagtgctggacacagagacatgaagctctgtctgtgggagacagggattctgacacagacaccggacaaaccattgtcttggggagcccagaagagaaagtgggcagggtggggtcattggggaagatgctctagaggaattaatgctggaatggggtgttgaaggatgagtaggagttagttaggcattgagtttgccctgggcaaaagcccagaagtgggagtatgtggtatatcttcagagaactgggtaatttcagtgtggctgctgtgttgggcatggatggagaatcagcaagagaaatgctgtattaggactaataatccatctacgctgcttaagcaaaaaggtatttgttggtttatgttacttaatagtccaggggcacctggcttcaggtaggtttgatccaggcatcaggccattgcatctattttttcagtgtaagttgaattctagtaatttttatcaagtaagggctcctttcctggtggcacagatgacttcagcagttagaagtttctatccctccagctttctgcagcagaaagaccctcattgtcagtttcccagcaaaagtcccagggcagactctcattggcccaaatgggccatgtgattttctctaaaccaatcactgtgactctagagtggccagactcagagctgcacttagtaggggttcctcaaaggaaggtcaagtgtcatgagcaggagaaaaggcatgggagctggacagattatagtggttgaagtctgtgcagtacagaagggcggagcttattcacacagcacctttggggccaaaatgaataagctggactttctccccatggcactggggaaccatggaagttcagggaacttcagggaagaggcttggtcaattcctgagagcatcctctgtgctggggacacagtggtaatcaagacagccccaacactgccctcatagagctcacagtccaatggaggaggcagatgtgtcctcaggcagcgactgggcagggctggtataggggagtccagaggtgatgcctgcctcagccagggagggcttcctggaggagaaggagccagctagacatggataggagtgcgttttaggcacagcaaatggcacatacaagggccagggagcaagagagaggacaggtcctcaacaaatggcatgtgactttgtaagtgtagaattgctgtgaggtatggggctaggggcgtcagtagggccttgaaggttatggacaggggcctgggctttcttccaagggcactgggggagccatggcaaggttgtaggtagggtagagatgggcgggtttgtgctatgtgcagggtggaagggagggaagttgacaggtcagaagatcaggaaagaggtcggggctggacagatggggagagcgcagatagatttaagagagtcctgtgaggcaaagtgggcaggacctggtaacaggtgtctggactgtggctttggctggctcagaaggtccccactggcgtgtgtggtctatgtagcctctgggtgtggagctgggatcttcaactggggacagtacagtaaagaacatcacagc

SEQ ID NO: 72690 - DNA, 199 bp, Homo sapiens
gtaatcttgaggtaattttgacagatattgtcagaatggcccacacagagattgcaacccacgtgaggaattctcaggttccaacgatcccccagagtcagttctgggtttccgtggtgatgccagctctaaacggtaccccctcccccaggtggcccatcccctgcacccctgcaccccaaacgcagcccgacgagca

SEQ ID NO: 72691 - DNA, 5209 bp, Homo sapiens
cgcctccctccgccgccgcttgggccggctccgcgccccctccgcggcccccgcccgcccgcctgcccgccgcccccatggcgcccggggtccccgctgcacggggccactaggaccctcggcgtcccttcccctcccccgccctgccccctctcccgccgcgcggacccgggcgttctcggcgcccagcttttgagctcgcgtccccaggccggcggggggggaggggaagagaggggaccctgggacccccgccccccccacccggccgcccctgccccccgggacccggagaagatgtcttcgcggacggtgctggccccgggcaacgatcggaactcggacacgcatggcaccttgggcagtggccgctcctcggacaaaggcccgtcctggtccagccgctcactgggtgcccgttgccggaactccatcgcctcctgtcccgaggagcagccccacgtgggcaactaccgcctgctgaggaccattgggaagggcaactttgccaaagtcaagctggctcggcacatcctcactggtcgggaggttgccatcaagattatcgacaaaacccagctgaatcccagcagcctgcagaagctgttccgagaagtccgcatcatgaagggcctaaaccaccccaacatcgtgaagctctttgaggtgattgagactgagaagacgctgtacctggtgatggagtacgcaagtgctggagaagtgtttgactacctcgtgtcgcatggccgcatgaaggagaaggaagctcgagccaagttccgacagattgtttcggctgtgcactattgtcaccagaaaaatattgtacacagggacctgaaggctgagaacctcttgctggatgccgaggccaacatcaagattgctgactttggcttcagcaacgagttcacgctgggatcgaagctggacacgttctgcgggagccccccatatgccgccccggagctgtttcagggcaagaagtacgacgggccggaggtggacatctggagcctgggagtcatcctgtacaccctcgtcagcggctccctgcccttcgacgggcacaacctcaaggagctgcgggagcgagtactcagagggaagtaccgggtccctttctacatgtcaacagactgtgagagcatcctgcggagatttttggtgctgaacccagctaaacgctgtactctcgagcaaatcatgaaagacaaatggatcaacatcggctatgagggtgaggagttgaagccatacacagagcccgaggaggacttcggggacaccaagagaattgaggtgatggtgggtatgggctacacacgggaagaaatcaaagagtccttgaccagccagaagtacaacgaagtgaccgccacctacctcctgctgggcaggaagactgaggagggtggggaccggggcgccccagggctggccctggcacgggtgcgggcgcccagcgacaccaccaacggaacaagttccagcaaaggcaccagccacagcaaagggcagcggagttcctcttccacctaccaccgccagcgcaggcatagcgatttctgtggcccatcccctgcacccctgcaccccaaacgcagcccgacgagcacgggggaggcggagctgaaggaggagcggctgccaggccggaaggcgagctgcagcaccgcggggagtgggagtcgagggctgcccccctccagccccatggtcagcagcgcccacaaccccaacaaggcagagatcccagagcggcggaaggacagcacgagcacccccaacaacctccctcctagcatgatgacccgcagaaacacctacgtttgcacagaacgcccgggggctgagcgcccgtcactgttgccaaatgggaaagaaaacagctcaggcaccccacgggtgccccctgcctccccctccagtcacagcctggcacccccatcaggggagcggagccgcctggcacgcggttccaccatccgcagcaccttccatggtggccaggtccgggaccggcgggcagggggtgggggtggtgggggtgtgcggaatgggccccctgcctctcccacactggcccatgaggctgcacccctgcccgccgggcggccccgccccaccaccaacctcttcaccaagctgacctccaaactgacccgaagggttaccctcgatccctctaaacggcagaactctaaccgctgtgtttcgggcgcctctctgccccagggatccaagatcaggtcgcagacgaacctgagagaatcgggggacctgaggtcacaagttgccatctaccttgggatcaaacggaaaccgccccccggctgctccgattcccctggagtgtgaagctgaccagctcgcgccctcctgaggccctgatggcagctctgcgccaggccacagcagccgcccgctgccgctgccgccagccacagccgttcctgctggcctgcctgcacgggggtgcgggcgggcccgagcccctgtcccacttcgaagtggaggtctgccagctgccccggccaggcttgcggggagttctcttccgccgtgtggcgggcaccgccctggccttccgcaccctcgtcacccgcatctccaacgacctcgagctctgagccaccacggtcccagggcccttactcttcctctcccttgtcgccttcacttctacaggaggggaaggggccagggaggggattctccctttatcatcacctcagtttccctgaattatatttgggggcaaagattgtcccctctgctgttctctggggccgctcagcacagaagaaggatgagggggctcagcggggggagctggcaccttcctggagcctccagccagtcctgtcctccctcgccctaccaagagggcacctgaggagactttggggacagggcaggggcagggagggaaactgaggaaatcttccattcctcccaacagctcaaaattaggccttgggcaggggcagggagagctgctgagcctaaagactggagaatctgggggactgggagtgggggtcagagaggcagattccttcccctcccgtcccctcacgctcaaacccccacttcctgccccaggctggcgcggggcactttgtacaaatccttgtaaataccccacaccctcccctctgcaaaggtctcttgaggagctgccgctgtcacctacggtttttaagttattacaccccgaccctcctcctgtcagccccctcacctgcagcctgttgcccaataaatttaggagagtccccccctccccaatgctgaccctaggattttccttccctgccctcacctgcaaatgagttaaagaagaggcgtgggaatccaggcagtggtttttcctttcggagcctcggttttctcatctgcagaatgggagcggtgggggtgggaaggtaaggatggtcgtggaagaaggcaggatggaactcggcctcatccccgaggccccagttcctatatcgggccccccattcatccactcacactcccagccaccatgttacactggactctaagccacttcttactccagtagtaaatttattcaataaacaatcattgacccatgcctactccatgccaggcccagtgctggacacagagacatgaagctctgtctgtgggagacagggattctgacacagacaccggacaaaccattgtcttggggagcccagaagagaaagtgggcagggtggggtcattggggaagatgctctagaggaattaatgctggaatggggtgttgaaggatgagtaggagttagttaggcattgagtttgccctgggcaaaagcccagaagtgggagtatgtggtatatcttcagagaactgggtaatttcagtgtggctgctgtgttgggcatggatggagaatcagcaagagaaatgctgtattaggactaataatccatctacgctgcttaagcaaaaaggtatttgttggtttatgttacttaatagtccaggggcacctggcttcaggtaggtttgatccaggcatcaggccattgcatctattttttcagtgtaagttgaattctagtaatttttatcaagtaagggctcctttcctggtggcacagatgacttcagcagttagaagtttctatccctccagctttctgcagcagaaagaccctcattgtcagtttcccagcaaaagtcccagggcagactctcattggcccaaatgggccatgtgattttctctaaaccaatcactgtgactctagagtggccagactcagagctgcacttagtaggggttcctcaaaggaaggtcaagtgtcatgagcaggagaaaaggcatgggagctggacagattatagtggttgaagtctgtgcagtacagaagggcggagcttattcacacagcacctttggggccaaaatgaataagctggactttctccccatggcactggggaaccatggaagttcagggaacttcagggaagaggcttggtcaattcctgagagcatcctctgtgctggggacacagtggtaatcaagacagccccaacactgccctcatagagctcacagtccaatggaggaggcagatgtgtcctcaggcagcgactgggcagggctggtataggggagtccagaggtgatgcctgcctcagccagggagggcttcctggaggagaaggagccagctagacatggataggagtgcgttttaggcacagcaaatggcacatacaagggccagggagcaagagagaggacaggtcctcaacaaatggcatgtgactttgtaagtgtagaattgctgtgaggtatggggctaggggcgtcagtagggccttgaaggttatggacaggggcctgggctttcttccaagggcactgggggagccatggcaaggttgtaggtagggtagagatgggcgggtttgtgctatgtgcagggtggaagggagggaagttgacaggtcagaagatcaggaaagaggtcggggctggacagatggggagagcgcagatagatttaagagagtcctgtgaggcaaagtgggcaggacctggtaacaggtgtctggactgtggctttggctggctcagaaggtccccactggcgtgtgtggtctatgtagcctctgggtgtggagctgggatcttcaactggggacagtacagtaaagaacatcacagc

SEQ ID NO: 72692 - DNA, 4858 bp, Homo sapiens
cgcctccctccgccgccgcttgggccggctccgcgccccctccgcggcccccgcccgcccgcctgcccgccgcccccatggcgcccggggtccccgctgcacggggccactaggaccctcggcgtcccttcccctcccccgccctgccccctctcccgccgcgcggacccgggcgttctcggcgcccagcttttgagctcgcgtccccaggccggcggggggggaggggaagagaggggaccctgggacccccgccccccccacccggccgcccctgccccccgggacccggagaagatgtcttcgcggacggtgctggccccgggcaacgatcggaactcggacacgcatggcaccttgggcagtggccgctcctcggacaaaggcccgtcctggtccagccgctcactgggtgcccgttgccggaactccatcgcctcctgtcccgaggagcagccccacgtgggcaactaccgcctgctgaggaccattgggaagggcaactttgccaaagtcaagctggctcggcacatcctcactggtcgggaggttgccatcaagattatcgacaaaacccagctgaatcccagcagcctgcagaagctgttccgagaagtccgcatcatgaagggcctaaaccaccccaacatcgtgaagctctttgaggtgattgagactgagaagacgctgtacctggtgatggagtacgcaagtgctggagaagtgtttgactacctcgtgtcgcatggccgcatgaaggagaaggaagctcgagccaagttccgacagattgtttcggctgtgcactattgtcaccagaaaaatattgtacacagggacctgaaggctgagaacctcttgctggatgccgaggccaacatcaagattgctgactttggcttcagcaacgagttcacgctgggatcgaagctggacacgttctgcgggagccccccatatgccgccccggagctgtttcagggcaagaagtacgacgggccggaggtggacatctggagcctgggagtcatcctgtacaccctcgtcagcggctccctgcccttcgacgggcacaacctcaaggagctgcgggagcgagtactcagagggaagtaccgggtccctttctacatgtcaacagactgtgagagcatcctgcggagatttttggtgctgaacccagctaaacgctgtactctcgagcaaatcatgaaagacaaatggatcaacatcggctatgagggtgaggagttgaagccatacacagagcccgaggaggacttcggggacaccaagagaattgaggtgatggtgggtatgggctacacacgggaagaaatcaaagagtccttgaccagccagaagtacaacgaagtgaccgccacctacctcctgctgggcaggaagactgaggagggtggggaccggggcgccccagggctggccctggcacgggtgcgggcgcccagcgacaccaccaacggaacaagttccagcaaaggcaccagccacagcaaagggcagcggagttcctcttccacctaccaccgccagcgcaggcatagcgatttctgtggcccatcccctgcacccctgcaccccaaacgcagcccgacgagcacgggggaggcggagctgaaggaggagcggctgccaggccggaaggcgagctgcagcaccgcggggagtgggagtcgagggctgcccccctccagccccatggtcagcagcgcccacaaccccaacaaggcagagatcccagagcggcggaaggacagcacgagcacccccaacaacctccctcctagcatgatgacccgcagggttaccctcgatccctctaaacggcagaactctaaccgctgtgtttcgggcgcctctctgccccagggatccaagatcaggtcgcagacgaacctgagagaatcgggggacctgaggtcacaagttgccatctaccttgggatcaaacggaaaccgccccccggctgctccgattcccctggagtgtgaagctgaccagctcgcgccctcctgaggccctgatggcagctctgcgccaggccacagcagccgcccgctgccgctgccgccagccacagccgttcctgctggcctgcctgcacgggggtgcgggcgggcccgagcccctgtcccacttcgaagtggaggtctgccagctgccccggccaggcttgcggggagttctcttccgccgtgtggcgggcaccgccctggccttccgcaccctcgtcacccgcatctccaacgacctcgagctctgagccaccacggtcccagggcccttactcttcctctcccttgtcgccttcacttctacaggaggggaaggggccagggaggggattctccctttatcatcacctcagtttccctgaattatatttgggggcaaagattgtcccctctgctgttctctggggccgctcagcacagaagaaggatgagggggctcagcggggggagctggcaccttcctggagcctccagccagtcctgtcctccctcgccctaccaagagggcacctgaggagactttggggacagggcaggggcagggagggaaactgaggaaatcttccattcctcccaacagctcaaaattaggccttgggcaggggcagggagagctgctgagcctaaagactggagaatctgggggactgggagtgggggtcagagaggcagattccttcccctcccgtcccctcacgctcaaacccccacttcctgccccaggctggcgcggggcactttgtacaaatccttgtaaataccccacaccctcccctctgcaaaggtctcttgaggagctgccgctgtcacctacggtttttaagttattacaccccgaccctcctcctgtcagccccctcacctgcagcctgttgcccaataaatttaggagagtccccccctccccaatgctgaccctaggattttccttccctgccctcacctgcaaatgagttaaagaagaggcgtgggaatccaggcagtggtttttcctttcggagcctcggttttctcatctgcagaatgggagcggtgggggtgggaaggtaaggatggtcgtggaagaaggcaggatggaactcggcctcatccccgaggccccagttcctatatcgggccccccattcatccactcacactcccagccaccatgttacactggactctaagccacttcttactccagtagtaaatttattcaataaacaatcattgacccatgcctactccatgccaggcccagtgctggacacagagacatgaagctctgtctgtgggagacagggattctgacacagacaccggacaaaccattgtcttggggagcccagaagagaaagtgggcagggtggggtcattggggaagatgctctagaggaattaatgctggaatggggtgttgaaggatgagtaggagttagttaggcattgagtttgccctgggcaaaagcccagaagtgggagtatgtggtatatcttcagagaactgggtaatttcagtgtggctgctgtgttgggcatggatggagaatcagcaagagaaatgctgtattaggactaataatccatctacgctgcttaagcaaaaaggtatttgttggtttatgttacttaatagtccaggggcacctggcttcaggtaggtttgatccaggcatcaggccattgcatctattttttcagtgtaagttgaattctagtaatttttatcaagtaagggctcctttcctggtggcacagatgacttcagcagttagaagtttctatccctccagctttctgcagcagaaagaccctcattgtcagtttcccagcaaaagtcccagggcagactctcattggcccaaatgggccatgtgattttctctaaaccaatcactgtgactctagagtggccagactcagagctgcacttagtaggggttcctcaaaggaaggtcaagtgtcatgagcaggagaaaaggcatgggagctggacagattatagtggttgaagtctgtgcagtacagaagggcggagcttattcacacagcacctttggggccaaaatgaataagctggactttctccccatggcactggggaaccatggaagttcagggaacttcagggaagaggcttggtcaattcctgagagcatcctctgtgctggggacacagtggtaatcaagacagccccaacactgccctcatagagctcacagtccaatggaggaggcagatgtgtcctcaggcagcgactgggcagggctggtataggggagtccagaggtgatgcctgcctcagccagggagggcttcctggaggagaaggagccagctagacatggataggagtgcgttttaggcacagcaaatggcacatacaagggccagggagcaagagagaggacaggtcctcaacaaatggcatgtgactttgtaagtgtagaattgctgtgaggtatggggctaggggcgtcagtagggccttgaaggttatggacaggggcctgggctttcttccaagggcactgggggagccatggcaaggttgtaggtagggtagagatgggcgggtttgtgctatgtgcagggtggaagggagggaagttgacaggtcagaagatcaggaaagaggtcggggctggacagatggggagagcgcagatagatttaagagagtcctgtgaggcaaagtgggcaggacctggtaacaggtgtctggactgtggctttggctggctcagaaggtccccactggcgtgtgtggtctatgtagcctctgggtgtggagctgggatcttcaactggggacagtacagtaaagaacatcacagc

SEQ ID NO: 72693 - DNA, 3310 bp, Homo sapiens
cgcctccctccgccgccgcttgggccggctccgcgccccctccgcggcccccgcccgcccgcctgcccgccgcccccatggcgcccggggtccccgctgcacggggccactaggaccctcggcgtcccttcccctcccccgccctgccccctctcccgccgcgcggacccgggcgttctcggcgcccagcttttgagctcgcgtccccaggccggcggggggggaggggaagagaggggaccctgggacccccgccccccccacccggccgcccctgccccccgggacccggagaagatgtcttcgcggacggtgctggccccgggcaacgatcggaactcggacacgcatggcaccttgggcagtggccgctcctcggacaaaggcccgtcctggtccagccgctcactgggtgcccgttgccggaactccatcgcctcctgtcccgaggagcagccccacgtgggcaactaccgcctgctgaggaccattgggaagggcaactttgccaaagtcaagctggctcggcacatcctcactggtcgggaggttgccatcaagattatcgacaaaacccagctgaatcccagcagcctgcagaagctgttccgagaagtccgcatcatgaagggcctaaaccaccccaacatcgtgaagctctttgaggtgattgagactgagaagacgctgtacctggtgatggagtacgcaagtgctggagaagtgtttgactacctcgtgtcgcatggccgcatgaaggagaaggaagctcgagccaagttccgacagattgtttcggctgtgcactattgtcaccagaaaaatattgtacacagggacctgaaggctgagaacctcttgctggatgccgaggccaacatcaagattgctgactttggcttcagcaacgagttcacgctgggatcgaagctggacacgttctgcgggagccccccatatgccgccccggagctgtttcagggcaagaagtacgacgggccggaggtggacatctggagcctgggagtcatcctgtacaccctcgtcagcggctccctgcccttcgacgggcacaacctcaaggagctgcgggagcgagtactcagagggaagtaccgggtccctttctacatgtcaacagactgtgagagcatcctgcggagatttttggtgctgaacccagctaaacgctgtactctcgagcaaatcatgaaagacaaatggatcaacatcggctatgagggtgaggagttgaagccatacacagagcccgaggaggacttcggggacaccaagagaattgaggtgatggtgggtatgggctacacacgggaagaaatcaaagagtccttgaccacctgttgcccaataaatttaggagagtccccccctccccaatgctgaccctaggattttccttccctgccctcacctgcaaatgagttaaagaagaggcgtgggaatccaggcagtggtttttcctttcggagcctcggttttctcatctgcagaatgggagcggtgggggtgggaaggtaaggatggtcgtggaagaaggcaggatggaactcggcctcatccccgaggccccagttcctatatcgggccccccattcatccactcacactcccagccaccatgttacactggactctaagccacttcttactccagtagtaaatttattcaataaacaatcattgacccatgcctactccatgccaggcccagtgctggacacagagacatgaagctctgtctgtgggagacagggattctgacacagacaccggacaaaccattgtcttggggagcccagaagagaaagtgggcagggtggggtcattggggaagatgctctagaggaattaatgctggaatggggtgttgaaggatgagtaggagttagttaggcattgagtttgccctgggcaaaagcccagaagtgggagtatgtggtatatcttcagagaactgggtaatttcagtgtggctgctgtgttgggcatggatggagaatcagcaagagaaatgctgtattaggactaataatccatctacgctgcttaagcaaaaaggtatttgttggtttatgttacttaatagtccaggggcacctggcttcaggtaggtttgatccaggcatcaggccattgcatctattttttcagtgtaagttgaattctagtaatttttatcaagtaagggctcctttcctggtggcacagatgacttcagcagttagaagtttctatccctccagctttctgcagcagaaagaccctcattgtcagtttcccagcaaaagtcccagggcagactctcattggcccaaatgggccatgtgattttctctaaaccaatcactgtgactctagagtggccagactcagagctgcacttagtaggggttcctcaaaggaaggtcaagtgtcatgagcaggagaaaaggcatgggagctggacagattatagtggttgaagtctgtgcagtacagaagggcggagcttattcacacagcacctttggggccaaaatgaataagctggactttctccccatggcactggggaaccatggaagttcagggaacttcagggaagaggcttggtcaattcctgagagcatcctctgtgctggggacacagtggtaatcaagacagccccaacactgccctcatagagctcacagtccaatggaggaggcagatgtgtcctcaggcagcgactgggcagggctggtataggggagtccagaggtgatgcctgcctcagccagggagggcttcctggaggagaaggagccagctagacatggataggagtgcgttttaggcacagcaaatggcacatacaagggccagggagcaagagagaggacaggtcctcaacaaatggcatgtgactttgtaagtgtagaattgctgtgaggtatggggctaggggcgtcagtagggccttgaaggttatggacaggggcctgggctttcttccaagggcactgggggagccatggcaaggttgtaggtagggtagagatgggcgggtttgtgctatgtgcagggtggaagggagggaagttgacaggtcagaagatcaggaaagaggtcggggctggacagatggggagagcgcagatagatttaagagagtcctgtgaggcaaagtgggcaggacctggtaacaggtgtctggactgtggctttggctggctcagaaggtccccactggcgtgtgtggtctatgtagcctctgggtgtggagctgggatcttcaactggggacagtacagtaaagaacatcacagc

SEQ ID NO: 72694 - DNA, 313 bp, Homo sapiens
agaatttggctgtgttttaatatcacgtatttgcagtgaccttgtagaatccgtactgattctatatttttagggaaaaaacaacaataaagaacattgtccatttatttgagtatattaatggaaaattatgaaataatttgattaacctaagggttctaatatttgaaaagttggttttcaataatggttttaaatttcttggtaattttttacactatgtgagattgtttctattttcatttttgaaagtttgttatctcaatttatatgtgttgaaataggtttattttcacatatgtgtatattttaa

SEQ ID NO: 72695 - DNA, 719 bp, Homo sapiens
cagaatgatatggtttgactatgtccccatccatatctcatcttgaattcccatcggttatgggagggacccagtgggaggtaattgaatcatgggtgcaggtcttttccatgctgttctcgagttagggaataagtcttacgagatctgatggttacaaaaaggggagcttccctgcacaagcattcctctctttgcctgccaccatacataagatgtgacttgctcctccttgccctctgccatgattgtgaggcttccccagccatgtagaattgtaagtccagttaaacctctttcttttgtaaattgcccagtcttgggtatgtctttatcatcagcatgaaaacagattaatacagtgtgacctcctagctacactaactacaaatcctaagaatgctaaccagtaatactggtgctacaaactatgctaactaactaatgaacataatactaacaataccaactgtatactgactacactaacagtgataaccaacaatactaataatgctaaccagcaacattaactaaataaaaaatgaaaaaatgagaaaaacaacaaaggaagtggaagaaaaatgggaagaagatataagaatttaaaaagtgggacaaaagagtaaaggaggatgagaaaataaaaagaaaaaataataagaaaaaggaaataaaaaaatgacaaaaagaaaaatgaggacaaagacggcaagcgg

SEQ ID NO: 72696 - DNA, 571 bp, Homo sapiens
ggaggaatgaacgactccagacacaccgccttaagatctgtgacactcaccgcgaaggtctgcagcttcattcctgatccagcgagaccatgaacccaccagaaggaaaaaactccggacacatccgaacgtctagaagaaacaaactccagacacaccgcctgtaagaactgtaacggtcaccgcgagggtccgcggtttcattcttgaagtcagtgagaccaagaacccaccatttctggacacactaccatgccagagatccaggtaggtctctggatctttgagacccccacctcacacctccttattatgaaacattatggtttttacaattacaaaagtagtataggcttgtgaaaacctcctacaaaactctttatttggtatagagttccaagagtctcctcgtaatcctctccaattttaataaattttttttatgtatactgtgtataacttcatgtgagattttatatatgtatgtatgtgatcttttatgtctttactgagaagtttatgatggacttctttccatgttcatatatatataatacatattttatatcta

SEQ ID NO: 72697 - DNA, 1555 bp, Homo sapiens
ggaggaatgaacgactccagacacaccgccttaagatctgtgacactcaccgcgaaggtctgcagcttcattcctgatccagcgagaccatgaacccaccagaaggaaaaaactccggacacatccgaacgtctagaagaaacaaactccagacacaccgcctgtaagaactgtaacggtcaccgcgagggtccgcggtttcattcttgaagtcagtgagaccaagaacccaccatttctggacacactaccatgccagagatccaggggctgcagcatgctgaaagaaaacagaagcctgtggagtgagccaagatcaaccaggaaataaaccctttcccttgcgatgtctctccagcgccctctactgacaaacctgctttagtgccagtttgtagagaattgtctttgctgatctctttattatgatgaaaattctctggatggaagggtcatcagctgccgtctcctttgctactctgctacatatccttacaatttggtttagaattttagtaccactaacattttttggtgcatattttggaaataaagaaaagattagttgtccagttcagacaaaccagatcccctgtcagattcctccatagaacttctttacaaaaccacttcttggcatcataattggtggcattttccccttcggctgtatttttattcaactctttttcattctgaacagtatttggaaaagccttagttgcataagtggaattccttttcacatttgagaaacagaggagagacagttggatttttttcctgtttctggttaattgctaaaatctacagtgtgctgaaggtggagtaaagtatttccccaaaggattccaagcacatctcccttgcccttgaatatctgtatatctatatgaacatcaattgagatatatatgtgtgtgcccctaattacataattttaagcatatatataaaaatgtaaaatctcattgtctggcctcagtttgtatgacacaaaatactgattgtatggaagaaaacagattgggaaacagatttattctatatcatattttcctgaaaagctaccttaaaaagatttaaattaaagcaattagagcaagggaggcacatttctttaaaaaattaaagttgagtaccatactggtttttcagatgaaattttcttttcctttttctccttcatattgctcagagcatctaattccatcagaactattgtcaaataaattttatgtaaaatgtgtatttttctaatgggagttgattatacaaactgtattacacctttgtatctgagtgatcatttaaaaatgcatattggtttagcacatagagtttatgaaatgccagataatgctcttattcctcagtgaaatctgcacatttctagttgttggtggtctatttctgtttgctgttccttggaggggggctgagaatgttcaagtttgacttagctgtgtttaagtaataaatctttggagtcaaaaaaaaaaatcggccttcttggcctcagcgggggactctgcggcgtttccttaatgagggt

SEQ ID NO: 72698 - DNA, 1606 bp, Homo sapiens
aatcggcacgaggtgccactagccggcctcggctgttccctgtccgaggctcttgtcatttccgcttatttcctccacgggtgccgatttcatgtgtgtgttcccgagtgcctgagcccgctcccgaaatgagtactcgtggtttccgcgtgggaaccaacctcgagcgccagtggcccgccctctccgggctgaggtggctgctgaggctggggctgctcctgaggcttcagggccgcccgctgcacggctttctaccttcccaggttagccgcggtcaacttctgccaggcggagcgagaaatcgcattttgtcaggggctgcagcatgctgaaagaaaacagaagcctgtggagtgagccaagatcaaccaggaaataaaccctttcccttgcgatgtctctccagcgccctctactgacaaacctgctttagtgccagtttgtagagaattgtctttgctgatctctttattatgatgaaaattctctggatggaagggtcatcagctgccgtctcctttgctactctgctacatatccttacaatttggtttagaattttagtaccactaacattttttggtgcatattttggaaataaagaaaagattagttgtccagttcagacaaaccagatcccctgtcagattcctccatagaacttctttacaaaaccacttcttggcatcataattggtggcattttccccttcggctgtatttttattcaactctttttcattctgaacagtatttggaaaagccttagttgcataagtggaattccttttcacatttgagaaacagaggagagacagttggatttttttcctgtttctggttaattgctaaaatctacagtgtgctgaaggtggagtaaagtatttccccaaaggattccaagcacatctcccttgcccttgaatatctgtatatctatatgaacatcaattgagatatatatgtgtgtgcccctaattacataattttaagcatatatataaaaatgtaaaatctcattgtctggcctcagtttgtatgacacaaaatactgattgtatggaagaaaacagattgggaaacagatttattctatatcatattttcctgaaaagctaccttaaaaagatttaaattaaagcaattagagcaagggaggcacatttctttaaaaaattaaagttgagtaccatactggtttttcagatgaaattttcttttcctttttctccttcatattgctcagagcatctaattccatcagaactattgtcaaataaattttatgtaaaatgtgtatttttctaatgggagttgattatacaaactgtattacacctttgtatctgagtgatcatttaaaaatgcatattggtttagcacatagagtttatgaaatgccagataatgctcttattcctcagtgaaatctgcacatttctagttgttggtggtctatttctgtttgctgttccttggaggggggctgagaatgttcaagtttgacttagctgtgtttaagtaataaatctttggagtcaaaaaaaaaaatcggccttcttggcctcagcgggggactctgcggcgtttccttaatgagggt

SEQ ID NO: 72699 - DNA, 1781 bp, Homo sapiens
ggaggaatgaacgactccagacacaccgccttaagatctgtgacactcaccgcgaaggtctgcagcttcattcctgatccagcgagaccatgaacccaccagaaggaaaaaactccggacacatccgaacgtctagaagaaacaaactccagacacaccgcctgtaagaactgtaacggtcaccgcgagggtccgcggtttcattcttgaagtcagtgagaccaagaacccaccatttctggacacactaccatgccagagatccaggggctgcagcatgctgaaagaaaacagaagcctgtggagtgagccaagatcaaccaggaaataaaccctttcccttgcgatgtctctccagcgccctctactgacaaacctgctttagtgccagtttgtagagaattgtctttgctgatctctttattatgatgaaaattctctggatggaagggtcatcagctgccgtctcctttgctactctgctacatatccttacaatttggtttagaattttagtaccactaacattttttggtgcatattttggaaataaagaaaagattagttgtccagttcagacaaaccagatcccctgtcagattcctccatagaacttctttacaaaaccacttcttggcatcataattggtggcattttccccttcggctgtatttttattcaactctttttcattctgaacagtatttggtctcattagctgtactacatgtttggcttccttttcttagtctttataattcttgtgattacttgctcagaagttacagttttgctgtattattttcatttatgtgctgaggattatcattggtggtggcgatttttaaccagaagctttatagctgtttatctttttacgtatgcagttcattacttctctgccaaacttcaaatcacagaaattgcgagctctattttgtactttgggtacatgatgatcattgtgttgattttcttccttttcatagagacagttggatttttttcctgtttctggttaattgctaaaatctacagtgtgctgaaggtggagtaaagtatttccccaaaggattccaagcacatctcccttgcccttgaatatctgtatatctatatgaacatcaattgagatatatatgtgtgtgcccctaattacataattttaagcatatatataaaaatgtaaaatctcattgtctggcctcagtttgtatgacacaaaatactgattgtatggaagaaaacagattgggaaacagatttattctatatcatattttcctgaaaagctaccttaaaaagatttaaattaaagcaattagagcaagggaggcacatttctttaaaaaattaaagttgagtaccatactggtttttcagatgaaattttcttttcctttttctccttcatattgctcagagcatctaattccatcagaactattgtcaaataaattttatgtaaaatgtgtatttttctaatgggagttgattatacaaactgtattacacctttgtatctgagtgatcatttaaaaatgcatattggtttagcacatagagtttatgaaatgccagataatgctcttattcctcagtgaaatctgcacatttctagttgttggtggtctatttctgtttgctgttccttggaggggggctgagaatgttcaagtttgacttagctgtgtttaagtaataaatctttggagtcaaaaaaaaaaatcggccttcttggcctcagcgggggactctgcggcgtttccttaatgagggt

SEQ ID NO: 72700 - DNA, 1360 bp, Homo sapiens
ggaggaatgaacgactccagacacaccgccttaagatctgtgacactcaccgcgaaggtctgcagcttcattcctgatccagcgagaccatgaacccaccagaaggaaaaaactccggacacatccgaacgtctagaagaaacaaactccagacacaccgcctgtaagaactgtaacggtcaccgcgagggtccgcggtttcattcttgaagtcagtgagaccaagaacccaccatttctggacacactaccatgccagagatccaggggctgcagcatgctgaaagaaaacagaagcctgtggagtgagccaagatcaaccaggaaataaaccctttcccttgcgatgtctctccagcgccctctactgacaaacctgctttagtgccagtttgtagaggattatcattggtggtggcgatttttaaccagaagctttatagctgtttatctttttacgtatgcagttcattacttctctgccaaacttcaaatcacagaaattgcgagctctattttgtactttgggtacatgatgatcattgtgttgattttcttccttttcatagagacagttggatttttttcctgtttctggttaattgctaaaatctacagtgtgctgaaggtggagtaaagtatttccccaaaggattccaagcacatctcccttgcccttgaatatctgtatatctatatgaacatcaattgagatatatatgtgtgtgcccctaattacataattttaagcatatatataaaaatgtaaaatctcattgtctggcctcagtttgtatgacacaaaatactgattgtatggaagaaaacagattgggaaacagatttattctatatcatattttcctgaaaagctaccttaaaaagatttaaattaaagcaattagagcaagggaggcacatttctttaaaaaattaaagttgagtaccatactggtttttcagatgaaattttcttttcctttttctccttcatattgctcagagcatctaattccatcagaactattgtcaaataaattttatgtaaaatgtgtatttttctaatgggagttgattatacaaactgtattacacctttgtatctgagtgatcatttaaaaatgcatattggtttagcacatagagtttatgaaatgccagataatgctcttattcctcagtgaaatctgcacatttctagttgttggtggtctatttctgtttgctgttccttggaggggggctgagaatgttcaagtttgacttagctgtgtttaagtaataaatctttggagtcaaaaaaaaaaatcggccttcttggcctcagcgggggactctgcggcgtttccttaatgagggt

SEQ ID NO: 72701 - DNA, 846 bp, Homo sapiens
  misc_feature (20)..(20): n is a, c, g, or t
  misc_feature (23)..(23): n is a, c, g, or t
  misc_feature (31)..(32): n is a, c, g, or t
ttgtctttttatttttgggnggntttgaaannttgtcgtctcgcatcgctgggtcagacagttggatttttttcctgtttctggttaattgctaaaatctacagtgtgctgaaggtggagtaaagtatttccccaaaggattccaagcacatctcccttgcccttgaatatctgtatatctatatgaacatcaattgagatatatatgtgtgtgcccctaattacataattttaagcatatatataaaaatgtaaaatctcattgtctggcctcagtttgtatgacacaaaatactgattgtatggaagaaaacagattgggaaacagatttattctatatcatattttcctgaaaagctaccttaaaaagatttaaattaaagcaattagagcaagggaggcacatttctttaaaaaattaaagttgagtaccatactggtttttcagatgaaattttcttttcctttttctccttcatattgctcagagcatctaattccatcagaactattgtcaaataaattttatgtaaaatgtgtatttttctaatgggagttgattatacaaactgtattacacctttgtatctgagtgatcatttaaaaatgcatattggtttagcacatagagtttatgaaatgccagataatgctcttattcctcagtgaaatctgcacatttctagttgttggtggtctatttctgtttgctgttccttggaggggggctgagaatgttcaagtttgacttagctgtgtttaagtaataaatctttggagtcaaaaaaaaaaatcggccttcttggcctcagcgggggactctgcggcgtttccttaatgagggt

SEQ ID NO: 72702 - DNA, 971 bp, Homo sapiens
ggaggaatgaacgactccagacacaccgccttaagatctgtgacactcaccgcgaaggtctgcagcttcattcctgatccagcgagaccatgaacccaccagaaggaaaaaactccggacacatccgaacgtctagaagaaacaaactccagacacaccgcctgtaagaactgtaacggtcaccgcgagggtccgcggtttcattcttgaagtcagtgagaccaagaacccaccatttctggacacactaccatgccagagatccaggggctgcagcatgctgaaagaaaacagaagcctgtggagtgagccaagatcaaccaggaaataaaccctttcccttgcgatgtctctccagcgccctctactgacaaacctgctttagtgccagtttgtagagaattgtctttgctgatctctttattatgatgaaaattctctggatggaagggtcatcagctgccgtctcctttgctactctgctacatatccttacaatttggtttagaattttagtaccactaacattttttggtgcatattttggaaataaagaaaagattagttgtccagttcagacaaaccagatcccctgtcagattcctccatagaacttctttacaaaaccacttcttggcatcataattggtggcattttccccttcggctgtatttttattcaactctttttcattctgaacagtatttggaaaagccttagttgcataagtggaattccttttcacatttgagaaacagaggagagacagttggatttttttcctgtttctggttaattgctaaaatctacagtgtgctgaaggtggagtaaagtatttccccaaaggattccaagcacatctcccttgcccttgaatatctgtatatctatatgaacatcaattgagatatatatgtgtgtgcccctaattacataattttaagcatatatataaaaatgtaaaatctca

SEQ ID NO: 72703 - DNA, 1465 bp, Homo sapiens
ggaggaatgaacgactccagacacaccgccttaagatctgtgacactcaccgcgaaggtctgcagcttcattcctgatccagcgagaccatgaacccaccagaaggaaaaaactccggacacatccgaacgtctagaagaaacaaactccagacacaccgcctgtaagaactgtaacggtcaccgcgagggtccgcggtttcattcttgaagtcagtgagaccaagaacccaccatttctggacacactaccatgccagagatccaggggctgcagcatgctgaaagaaaacagaagcctgtggagtgagccaagatcaaccaggaaataaaccctttcccttgcgatgtctctccagcgccctctactgacaaacctgctttagtgccagtttgtagagaattgtctttgctgatctctttattatgatgaaaattctctggatggaagggtcatcagctgccgtctcctttgctactctgctacatatccttacaatttggtttagaattttagtaccactaacattttttggtgcatattttggaaataaagaaaaggtaaactcttaaaatactgcttttggccactgagcgatgactgaaataatacctcagtgtatatattacacatgaaatacaaaaagtcccactggagaaaactacagagaataatcattttggaataaaagatactttaaaaaattaagtaaaggacagtaacactttcaaagacattaatgcatttcctacattatcaattgtttatactgccttttacctctgatgaaccaaattaaaaggacatattgtagaaaggctgacatcagccaactcaggaaactaatagggttatacagtgggataaggaagtcaagatgtagtccaaggaatggggctattcggtttacagatttgaagttagcctattccacatatcggagaaaggtataggataccaaaaagtctcaatgaggccacacagccaaaaaactcttcaaggatatagcatgagattgcagaggaaatgttggaaaagacaaaatgggaggtggagttccacagagagcagcaaaaagaaaattttctgaaaactatttgacacattcttagacaattctaagagagaacttttggacattttagattattttgcattagaatagtcactggtaaatctttccagtctctcccttggaaattataaaaaaggataaatatcctcattgattgtttagctgtgtgtcacttagtatggtgccactggtcgcatgtggctgttgagcacctgaaatgtggctgtcggaattgagatgggctctatgtggaaaatacacaccagattttgaacacttagaacaacgacaaagataacgtaaaatatttgctcaataattttatattaacacaagtataaatcataatatttggacatgttagaataaataaaatatgatgttaaaatt

SEQ ID NO: 72704 - DNA, 930 bp, Homo sapiens
ggaggaatgaacgactccagacacaccgccttaagatctgtgacactcaccgcgaaggtctgcagcttcattcctgatccagcgagaccatgaacccaccagaaggaaaaaactccggacacatccgaacgtctagaagaaacaaactccagacacaccgcctgtaagaactgtaacggtcaccgcgagggtccgcggtttcattcttgaagtcagtgagaccaagaacccaccatttctggacacactaccatgccagagatccaggggctgcagcatgctgaaagaaaacagaagcctgtggagtgagccaagatcaaccaggaaataaaccctttcccttgcgatgtctctccagcgccctctactgacaaacctgctttagtgccagtttgtagagaattgtctttgctgatctctttattatgatgaaaattctctggatggaagggtcatcagctgccgtctcctttgctactctgctacatatccttacaatttggtttagaattttagtaccactaacattttttggtgcatattttggaaataaagaaaagattagttgtccagttcagacaaaccagatcccctgtcagattcctccatagaacttctttacaaaaccacttcttggcatcataattggtggcattttccccttcggctgtatttttattcaactctttttcattctgaacagtatttggtctcattagctgtactacatgtttggcttccttttcttagtctttataattcttgtgattacttgctcagaagttacagttttgctgtattattttcatttatgtgctgaggtaaagccataagaaactaatgcatttgctatacttgcattattggaattggaagtctgtgtttagaaaagaattgaaataaatgataactgcatgtttctacaacttg

SEQ ID NO: 72705 - DNA, 658 bp, Homo sapiens
aatcggcacgaggtgccactagccggcctcggctgttccctgtccgaggctcttgtcatttccgcttatttcctccacgggtgccgatttcatgtgtgtgttcccgagtgcctgagcccgctcccgaaatgagtactcgtggtttccgcgtgggaaccaacctcgagcgccagtggcccgccctctccgggctgaggtggctgctgaggctggggctgctcctgaggcttcagggccgcccgctgcacggctttctaccttcccaggttagccgcggtcaacttctgccaggcggagcgagaaatcgcattttgtcaggggctgcagcatgctgaaagaaaacagaagcctgtggagtgagccaagatcaaccaggaaataaaccctttcccttgcgatgtctctccagcgccctctactgacaaacctgctttagtgccagtttgtagagagacagttggatttttttcctgtttctggttaattgctaaaatctacagtgtgctgaaggtggagtaaagtatttccccaaaggattccaagcacatctcccttgcccttgaatatctgtatatctatatgaacatcaattgagatatatatgtgtgtgcccctaattacataattttaagcatatatataaaaatgtaaaatctca

SEQ ID NO: 72706 - DNA, 1112 bp, Homo sapiens
aaattagccaggtgtggtgatgtgcacctgtagttccagctactcaggagggtgaggcaggaggatcacttgagcccagaagttcaagattgcaatgagctatgatcatgctactgcactccagcctaggcaacagagtgagaccctgtctctaaaaaaataaaaataaagcaagcatataataggttaatccagatggagttaggagggtttataagggcagacacatcctagtaaagaggaaataggcaaactaatgctgttttagtgtaataaggaatgcttataatgatgaactttagtcataaagaaaaggtgaaattatattcagtaacccatgttaggaaagcagaaaactatttaatatgcttggaaagattccaaccagagttaactgaataaaaaccttggacatttgaagagaaaagcatttagttctatctaatttcaatatgcacgtgaattagttcatgttactctaacaatgtattcttactgtccttttttatgaaataggaaagtaaaactgaaagaactatttcttgtgtttttaaaactagccttttctaatatttgatatctaattaaagttagataatatgtaatatgcttttgaacaataatctaaccagaaaatattgtataataaattaccaagaaatcattacattaattataaaaggaacatgtcaatacaacaaatgtttatttaacacctactgttactccaaatactgtgttagaatttgactattcgaagatgaataatagtctttgccctctggaaggccacaatgtagaagtaattctctgtatcagatatttccttgagtgttaagtgtattagtaatcatgttgtaaatcccagtgtaagtcaagaagcaatatcaccaccaccacctccctatgattttgtgataatttggcattttcaatgcttgttaactttcatgttttcatttttatgaaatcatgcagagcttgttataatttttagtggggtttggattaaaatgcttttttgatgtagcagaagatacattttttcccattttacattgttttccttaaatattaagaataatgagtaaaataaactgattttaaaatca

SEQ ID NO: 72707 - DNA, 931 bp, Homo sapiens
  misc_feature (826)..(826): n is a, c, g, or t
  misc_feature (835)..(835): n is a, c, g, or t
aaattagccaggtgtggtgatgtgcacctgtagttccagctactcaggagggtgaggcaggaggatcacttgagcccagaagttcaagattgcaatgagctatgatcatgctactgcactccagcctaggcaacagagtgagaccctgtctctaaaaaaataaaaataaagcaagcatataataggttaatccagatggagttaggagggtttataagggcagacacatcctagtaaagaggaaataggcaaactaatgctgttttagtgtaataaggaatgcttataatgatgaactttagtcataaagaaaaggtgaaattatattcagtaacccatgttaggaaagcagaaaactatttaatatgcttggaaagattccaaccagagttaactgaataaaaaccttggacatttgaagagaaaagcatttagttctatctaatttcaatatgcacgtgaattagttcatgttactctaacaatgtattcttactgtccttttttatgaaataggaaagtaaaactgaaagaactatttcttgtgtttttaaaactagccttttctaatatttgatatctaattaaagttagataatatgtaatatgcttttgaacaataatctaaccagaaaatattgtataataaattaccaagaaatcattacattaattataaaaggaacatgtcaatacaacaaatgtttatttaacacctactgttactccaaatactgtgttagaatttgactattcgaagatgaataatagtctttgccctctggaaggccacaatgtagaagtaattctctgtatcagatattcntgaggtagngtttagcacctcgtgtaacccccgtgtcgaaggatttcccaccctccttttgggaatggctcagccgggcacagttttttaaaagcaggcaacagg

SEQ ID NO: 72708 - DNA, 129 bp, Homo sapiens
tcttcacactggtccccatcccagtggaacaagcaatgccaatgtaccaagtgcaattccagattgtaagtttgaaatgtcattgccagccattacagaagaggcaaaagtccacagtgggtgtatgcc

SEQ ID NO: 72709 - DNA, 454 bp, Homo sapiens
atggcttgaacctgggaggtggaggttgcagtgagctgagatcgcaccactgcactaaaaaaaagaaaaagaaagaaaaagaaaataaaagaacaaaggttttctgagctttaagtatgaagctccatgggctcagaagaatgaaagcactttgaaataactcagaaacagaaagtcaaacactgcatgttctttctcccttataagtaggggggtaagcaatgggtacatgtggacagacagagcagaatagtagacattggagacttcaaaaggtgggaggataggtgagagatgaaaaattacctattgggtaccatgtacactattcgggtgatgggtactctaaaagcccaggcttcaccactgcacagtatatccacgaaacaaaactgcacttgtaccccctgaatctataaaattaatacaaataaaaaagattgaaggcacctgt

SEQ ID NO: 72710 - DNA, 395 bp, Homo sapiens
cctttagttaaaaggtgaaagttctcaagaaaaaaaaaagtatgctgagattgctaagatctacagtaagaatcaatcttctatccatgaaattgtgaaaaaggacaaagaaatttgtgctagttttgctgctgtacctaaaactacaaaagttacagccacagtgtgggctaagtgccgagctgaaatggaaaaggcattaaaggcaagcgtatacagggttcggtcccatccgcagtcttaggcatcccctggggattttgacatggatcccccgtggagaaggggggctactgtacagtacacttcccttcagcaagccgcatattcaagttctctatttcagattccccttcgtgactgtcatgcaggaagcaaagaaaacccattgtgtc

SEQ ID NO: 72711 - DNA, 387 bp, Homo sapiens
cctttagttaaaaggtgaaagttctcaagaaaaaaaaaagtatgctgagattgctaagatctacacctaatgaggaggtgactatcatgaaggtctggtggtgaagatcttgcaagaaggtgccttgtttgagatctttcaaggaaacacagtactcaataaatgtggttcggtgtacagttgagccttgagcaacatggatttgaactgcatggggccacttaaatgtgcattttcttatgactccgctgctcttgagacagcaagatcaagccccctcctcctcagccaactcaacgtgaagacaatgaagatcaagatctttaagatgatccacttccacttaatgaataataaatatattttgtcgttatgattttcctaaca

SEQ ID NO: 72712 - DNA, 527 bp, Homo sapiens
cctttagttaaaaggtgaaagttctcaagaaaaaaaaaagtatgctgagattgctaagatctacagtaagaatcaatcttctatccatgaaattgtgaaaaaggacaaagaaatttgtgctagttttgctgctgtacctaaaactacaaaagttacagccacagtgtgggctaagtgccgagctgaaatggaaaaggcattaaagcctaatgaggaggtgactatcatgaaggtctggtggtgaagatcttgcaagaaggtgccttgtttgagatctttcaaggaaacacagtactcaataaatgtggttcggtgtacagttgagccttgagcaacatggatttgaactgcatggggccacttaaatgtgcattttcttatgactccgctgctcttgagacagcaagatcaagccccctcctcctcagccaactcaacgtgaagacaatgaagatcaagatctttaagatgatccacttccacttaatgaataataaatatattttgtcgttatgattttcctaaca

SEQ ID NO: 72713 - DNA, 485 bp, Homo sapiens
gaatcgacatgagaagtaatacttggaagtgttctgagaaatgatgaaaaaagggcctggtttctatctgattgaaaggaggtgagacttgggagagcagtcagactccctctctccttctcacctcttctcctcatcccctcccctaagtgctctggctaggaattctagtacaatgttacgtagaagtgggcttttcttgccctggcgtggtggctcacacctgtaatcccagcactttgggatccgaggtgtatggatcatgagatcaggagtttgagaccagcctagtcaatatggtgaaatcccatctctaccaaaaatacaaaaattagctggatgtggtaacatgcacctgtaatcccagctactcaggaggctgaggcaggagaatcgcttgaaccctgtggtggaggttgcagtgagccgagatcacgccattgcacttcagcctgggtgacatagtgagactctgtccccccacc

SEQ ID NO: 72714 - DNA, 450 bp, Homo sapiens
ctcccgaaattctggaattagaggtgtgagctacctcgcccagccctcttttaagtttttgtttatctgggaatgtcttaatttctccttaaggctagttttgctggatgtagaattcttggtttatagtctttgtctcatcatttcgaatatgtcctcccaccactttctggcctctggtttctactgagaagccaactagtttctgataaggatcctttgtacacactgagtcatttttctgtcactgctttcaagattttgtggcttttgacagtttcgattatgatgtgtctatgtgtggatctctgagtttatcctacatggagtttgttgagcttcttggaggtgcagaataattcatattttggggaagttttcaacaagtttgggaaggttttggccatgtttctttctgcctcatttctctctgctctccttctgacacta

SEQ ID NO: 72715 - DNA, 385 bp, Homo sapiens
tgtgttaattttgcttgttacaagtgacagaaatgcaattcaaatttatgtgtgccaaaaaggaatttattgactcatgtacctaagaaaatcaagagatgtattagtttcttgcatgactagctgcagagctttaaacagtatcatctgcagaacatctgtcttctctggctcttaactctactttctttgtgtcggttttattcccaagcagctgctccctagctgtggctggtaatggtttgtgttctcccagcttaacaatcccagaggaaaaacacctctttcccagttttgtggtttcagcaaaagtggttggtcttactggcctggtgtgagtcacatgccattcctaaggcagtcactatggcaagggggatggaat

SEQ ID NO: 72716 - DNA, 377 bp, Homo sapiens
gacatggaaacatctatcccctgacagccatcctattatgggcaggaactccatcttacacttgtttatattcttgatgacacctaatgtctcttaaaatatgtgtctcttaaaaactactcggtggccttagccatttggggagattataggcaaactgagtccattagttgactaaggaccaggagaggttcccgccagtgcccgggacttctatttgagcacgcacaacctcagcagcttagactagaaaactgtagacacagattccctggtgtatcccttcctgggccttcactctgaatgttggattcctctctagggaggctgtcatgactgcaaagcctttccccagtcagctcagcttctatgtcagc

SEQ ID NO: 72717 - DNA, 784 bp, Homo sapiens
gcacatatgtgtcatgtccctctggtctggaaggcgtgtagtgtctgagccccactgctgtcccctgcttaccacccaacactgagaaaatcaaactgggccacgtgcccacttgctgccttccttgcagctgagtccctaggcaaggaggccctggatgggggtggccgtgtcaccaaatatccgcttccctggtgataggaggtctgtgggccccactcatctcctgtgtgcttcccccctaaccaggagatgcttcagaaggtcgaagttgagtatgaaacgctgcctgggtggaaagcagacaccacaggcgccaggaggtgggaggacctgcccccacaggcccagaactacatccgctttgtggagaatcacgtgggagtcgcagtgtgtatcataacagtcttttctgctctctcagtcaaatgggttggtgttggcaagtcaagagagtcgatgatccagctgttttagtcgcagactgagctgatcccaacaggccctggcagcgtctggacttgtgtaaacagcagcagtcacgttcctcggccgccacaaccaacaccaaagcaggaaaaccattttctgtacttttatatttctgttcaacctgttggtttctacaatgattttaaacattggaaagccagccttgtgtatatttttaaaaattatattcaaaatgagccaaagtgctcagagaccttctatgacacattagtgtcacatggttgcgtgtccagccgaagcagtgtaataaacatctccaatggccactgaa

SEQ ID NO: 72718 - DNA, 648 bp, Homo sapiens
gcacatatgtgtcatgtccctctggtctggaaggcgtgtagtgtctgagccccactgctgtcccctgcttaccacccaacactgagaaaatcaaactgggccacgtgcccacttgctgccttccttgcagctgagtccctaaccaggagatgcttcagaaggtcgaagttgagtatgaaacgctgcctgggtggaaagcagacaccacaggcgccaggaggtgggaggacctgcccccacaggcccagaactacatccgctttgtggagaatcacgtgggagtcgcagtcaaatgggttggtgttggcaagtcaagagagtcgatgatccagctgttttagtcgcagactgagctgatcccaacaggccctggcagcgtctggacttgtgtaaacagcagcagtcacgttcctcggccgccacaaccaacaccaaagcaggaaaaccattttctgtacttttatatttctgttcaacctgttggtttctacaatgattttaaacattggaaagccagccttgtgtatatttttaaaaattatattcaaaatgagccaaagtgctcagagaccttctatgacacattagtgtcacatggttgcgtgtccagccgaagcagtgtaataaacatctccaatggccactgaa

SEQ ID NO: 72719 - DNA, 681 bp, Homo sapiens
gcacatatgtgtcatgtccctctggtctggaaggcgtgtagtgtctgagccccactgctgtcccctgcttaccacccaacactgagaaaatcaaactgggccacgtgcccacttgctgccttccttgcagctgagtccctaaccaggagatgcttcagaaggtcgaagttgagtatgaaacgctgcctgggtggaaagcagacaccacaggcgccaggaggtgggaggacctgcccccacaggcccagaactacatccgctttgtggagaatcacgtgggagtcgcagtcaaatgggttggtgttggcaagtcaagagagtcgatgatccagctgttttagtcgcagactgagctgatcccaacaggccctggcagcgtctggacttgtgtaaacagcagcagtcacgttcctcggccgccacaaccaacaccaaagcaggaaaaccattttctgtacttttatatttctgttcaacctgttggtttctacaatgattttaaacattggaaagccagccttgtgtatatttttaaaaattatattcaaaatgagccaaagtgctcagagaccttctatgacacattagtgtcacatggttgcgtgtccagccgaagcagtgtaataaacatctccaatggccactgaatgggagcagttgttacatgtttgatttgacttt

SEQ ID NO: 72720 - DNA, 1737 bp, Homo sapiens
acgccggcggcggcgggctcctggccgggccagcgcagcggaagagccaagccagcatgtcggggacccgagcctccaacgaccggccccccggcgcaggcggcgtcaagcgggggcggctgcagcaggaggcggcggcgaccggctcccgcgtgacggtggtgctgggcgcgcagtggggggacgagggcaaaggcaaggtggtggacctgctggccacggacgccgacatcatcagccgctgccaggggggcaacaacgccggccacacggtggtggtggatgggaaagagtacgacttccacctgctgcccagcggcatcatcaacaccaaggccgtgtccttcattggcaacggggtggtcatccacttgccaggcttgtttgaggaagcagagaagaatgaaaagaaaggcctgaaggactgggagaagaggctcatcatctctgacagagcccaccttgtgtttgattttcaccaggctgtcgacggacttcaggaagtgcagcgccaggcacaagaggggaagaatataggcaccaccaagaagggaatcggaccaacctactcttccaaagctgcccggacaggcctccgcatctgcgacctcctgtcagattttgatgagttttcctccagattcaagaacctggcccaccagcaccagtcgatgttccccaccctggaaatagacattgaaggccaactcaaaaggctcaagggctttgctgagcggatcagacccatggtccgagatggtgtttactttatgtatgaggcactccacggcccccccaagaagatcctggtggagggtgccaacgccgccctcctcgacattgacttcgggacctacccctttgtgacttcatccaactgcaccgtgggcggtgtgtgcacgggcctgggcatccccccgcagaacataggtgacgtgtatggcgtggtgaaagcctataccacacgtgtgggcatcggggccttccccaccgagcagatcaacgagattggaggcctgctgcagacccgcggccacgagtggggagtgaccacaggcaggaagaggcgctgcggctggctcgacctgatgattctaagatatgctcacatggtcaacggattcactgcgctggccctgacgaagctggacatcctggacgtactgggtgaggttaaagtcggtgtctcatacaagctgaacgggaaaaggattccctatttcccagctaaccaggagatgcttcagaaggtcgaagttgagtatgaaacgctgcctgggtggaaagcagacaccacaggcgccaggaggtgggaggacctgcccccacaggcccagaactacatccgctttgtggagaatcacgtgggagtcgcagtcaaatgggttggtgttggcaagtcaagagagtcgatgatccagctgttttagtcgcagactgagctgatcccaacaggccctggcagcgtctggacttgtgtaaacagcagcagtcacgttcctcggccgccacaaccaacaccaaagcaggaaaaccattttctgtacttttatatttctgttcaacctgttggtttctacaatgattttaaacattggaaagccagccttgtgtatatttttaaaaattatattcaaaatgagccaaagtgctcagagaccttctatgacacattagtgtcacatggttgcgtgtccagccgaagcagtgtaataaacatctccaatggccactgaa

SEQ ID NO: 72721 - DNA, 1821 bp, Homo sapiens
agcggggcggcatggtagggaggagctgtggggtggcaacccagaggcaaggaggtgggcagaggcccacgaacctggccctgaccctcagctcgtccccagctcacagcacagccctcccctggctgcctccaaggagtctccagctactgagtggccactccgtgccagctcagcccacccctcaccttcccagtgcctgtggaggcccaactagggtgacgctgggagaggagagggcttggaggagccacgggtcaaatgcaggaggccacacctgcctgcccaggaggactgcaggagccggatccttaacacctggaggggagcgggggggcaacaacgccggccacacggtggtggtggatgggaaagagtacgacttccacctgctgcccagcggcatcatcaacaccaaggccgtgtccttcattggcaacggggtggtcatccacttgccaggcttgtttgaggaagcagagaagaatgaaaagaaaggcctgaaggactgggagaagaggctcatcatctctgacagagcccaccttgtgtttgattttcaccaggctgtcgacggacttcaggaagtgcagcgccaggcacaagaggggaagaatataggcaccaccaagaagggaatcggaccaacctactcttccaaagctgcccggacaggcctccgcatctgcgacctcctgtcagattttgatgagttttcctccagattcaagaacctggcccaccagcaccagtcgatgttccccaccctggaaatagacattgaaggccaactcaaaaggctcaagggctttgctgagcggatcagacccatggtccgagatggtgtttactttatgtatgaggcactccacggcccccccaagaagatcctggtggagggtgccaacgccgccctcctcgacattgacttcgggacctacccctttgtgacttcatccaactgcaccgtgggcggtgtgtgcacgggcctgggcatccccccgcagaacataggtgacgtgtatggcgtggtgaaagcctataccacacgtgtgggcatcggggccttccccaccgagcagatcaacgagattggaggcctgctgcagacccgcggccacgagtggggagtgaccacaggcaggaagaggcgctgcggctggctcgacctgatgattctaagatatgctcacatggtcaacggattcactgcgctggccctgacgaagctggacatcctggacgtactgggtgaggttaaagtcggtgtctcatacaagctgaacgggaaaaggattccctatttcccagctaaccaggagatgcttcagaaggtcgaagttgagtatgaaacgctgcctgggtggaaagcagacaccacaggcgccaggaggtgggaggacctgcccccacaggcccagaactacatccgctttgtggagaatcacgtgggagtcgcagtcaaatgggttggtgttggcaagtcaagagagtcgatgatccagctgttttagtcgcagactgagctgatcccaacaggccctggcagcgtctggacttgtgtaaacagcagcagtcacgttcctcggccgccacaaccaacaccaaagcaggaaaaccattttctgtacttttatatttctgttcaacctgttggtttctacaatgattttaaacattggaaagccagccttgtgtatatttttaaaaattatattcaaaatgagccaaagtgctcagagaccttctatgacacattagtgtcacatggttgcgtgtccagccgaagcagtgtaataaacatctccaatggccactgaa

SEQ ID NO: 72722 - DNA, 1807 bp, Homo sapiens
acgccggcggcggcgggctcctggccgggccagcgcagcggaagagccaagccagcatgtcggggacccgagcctccaacgaccggccccccggcgcaggcggcgtcaagcgggggcggctgcagcaggaggcggcggcgaccggctcccgcgtgacggtggtgctgggcgcgcagtggggggacgagggcaaaggcaaggtggtggacctgctggccacggacgccgacatcatcagccgctgccaggggggcaacaacgccggccacacggtggtggtggatgggaaagagtacgacttccacctgctgcccagcggcatcatcaacaccaaggccgtgtccttcattggcaacggggtggtcatccacttgccaggcttgtttgaggaagcagagaagaatgaaaagaaaggcctgaaggactgggagaagaggctcatcatctctgacagagcccaccttgtgtttgattttcaccaggctgtcgacggacttcaggaagtgcagcgccaggcacaagaggggaagaatataggcaccaccaagaagggaatcggaccaacctactcttccaaagctgcccggacaggcctccgcatctgcgacctcctgtcagattttgatgagttttcctccagattcaagaacctggcccaccagcaccagtcgatgttccccaccctggaaatagacattgaaggccaactcaaaaggctcaagggctttgctgagcggatcagacccatggtccgagatggtgtttactttatgtatgaggcactccacggcccccccaagaagatcctggtggagggtgccaacgccgccctcctcgacattgacttcgggacctacccctttgtgacttcatccaactgcaccgtgggcggtgtgtgcacgggcctgggcatccccccgcagaacataggtgacgtgtatggcgtggtgaaagcctataccacacgtgtgggcatcggggccttccccaccgagcagatcaacgagattggaggcctgctgcagacccgcggccacgagtggggagtgaccacaggcaggaagaggcgctgcggctggctcgacctgatgattctaagatatgctcacatggtcaacggattcactgcgctggccctgacgaagctggacatcctggacgtactgggtgaggttaaagtcggtgtctcatacaagctgaacgggaaaaggattccctatttcccagctaaccaggagatgcttcagaaggtcgaagttgagtatgaaacgctgcctgggtggaaagcagacaccacaggcgccaggaggtgggaggacctgcccccacaggcccagaactacatccgctttgtggagaatcacgtgggagtcgcagtcaaatgggttggtgttggcaagtcaagagagtcgatgatccagctgttttagtcgcagactgagctgatcccaacaggccctggcagcgtctggacttgtgtaaacagcagcagtcacgttcctcggccgccacaaccaacaccaaagcaggaaaaccattttctgtacttttatatttctgttcaacctgttggtttctacaatgattttaaacattggaaagccagccttgtgtatatttttaaaaattatattcaaaatgagccaaagtgctcagagaccttctatgacacattagtgtcacatggttgcgtgtccagccgaagcagtgtaataaacatctccaatggccactgaaaaaaaaccaccacccccgatacccacaccaaaacaaacaccacacaacaaaggggcgcgcggcaaaaacc

SEQ ID NO: 72723 - DNA, 1770 bp, Homo sapiens
acgccggcggcggcgggctcctggccgggccagcgcagcggaagagccaagccagcatgtcggggacccgagcctccaacgaccggccccccggcgcaggcggcgtcaagcgggggcggctgcagcaggaggcggcggcgaccggctcccgcgtgacggtggtgctgggcgcgcagtggggggacgagggcaaaggcaaggtggtggacctgctggccacggacgccgacatcatcagccgctgccaggggggcaacaacgccggccacacggtggtggtggatgggaaagagtacgacttccacctgctgcccagcggcatcatcaacaccaaggccgtgtccttcattggcaacggggtggtcatccacttgccaggcttgtttgaggaagcagagaagaatgaaaagaaaggcctgaaggactgggagaagaggctcatcatctctgacagagcccaccttgtgtttgattttcaccaggctgtcgacggacttcaggaagtgcagcgccaggcacaagaggggaagaatataggcaccaccaagaagggaatcggaccaacctactcttccaaagctgcccggacaggcctccgcatctgcgacctcctgtcagattttgatgagttttcctccagattcaagaacctggcccaccagcaccagtcgatgttccccaccctggaaatagacattgaaggccaactcaaaaggctcaagggctttgctgagcggatcagacccatggtccgagatggtgtttactttatgtatgaggcactccacggcccccccaagaagatcctggtggagggtgccaacgccgccctcctcgacattgacttcgggacctacccctttgtgacttcatccaactgcaccgtgggcggtgtgtgcacgggcctgggcatccccccgcagaacataggtgacgtgtatggcgtggtgaaagcctataccacacgtgtgggcatcggggccttccccaccgagcagatcaacgagattggaggcctgctgcagacccgcggccacgagtggggagtgaccacaggcaggaagaggcgctgcggctggctcgacctgatgattctaagatatgctcacatggtcaacggattcactgcgctggccctgacgaagctggacatcctggacgtactgggtgaggttaaagtcggtgtctcatacaagctgaacgggaaaaggattccctatttcccagctaaccaggagatgcttcagaaggtcgaagttgagtatgaaacgctgcctgggtggaaagcagacaccacaggcgccaggaggtgggaggacctgcccccacaggcccagaactacatccgctttgtggagaatcacgtgggagtcgcagtcaaatgggttggtgttggcaagtcaagagagtcgatgatccagctgttttagtcgcagactgagctgatcccaacaggccctggcagcgtctggacttgtgtaaacagcagcagtcacgttcctcggccgccacaaccaacaccaaagcaggaaaaccattttctgtacttttatatttctgttcaacctgttggtttctacaatgattttaaacattggaaagccagccttgtgtatatttttaaaaattatattcaaaatgagccaaagtgctcagagaccttctatgacacattagtgtcacatggttgcgtgtccagccgaagcagtgtaataaacatctccaatggccactgaatgggagcagttgttacatgtttgatttgacttt

SEQ ID NO: 72724 - DNA, 1770 bp, Homo sapiens
acgccggcggcggcgggctcctggccgggccagcgcagcggaagagccaagccagcatgtcggggacccgagcctccaacgaccggccccccggcgcaggcggcgtcaagcgggggcggctgcagcaggaggcggcggcgaccggctcccgcgtgacggtggtgctgggcgcgcagtggggggacgagggcaaaggcaaggtggtggacctgctggccacggacgccgacatcatcagccgctgccaggggggcaacaacgccggccacacggtggtggtggatgggaaagagtacgacttccacctgctgcccagcggcatcatcaacaccaaggccgtgtccttcattggcaacggggtggtcatccacttgccaggcttgtttgaggaagcagagaagaatgaaaagaaaggcctgaaggactgggagaagaggctcatcatctctgacagagcccaccttgtgtttgattttcaccaggctgtcgacggacttcaggaagtgcagcgccaggcacaagaggggaagaatataggcaccaccaagaagggaatcggaccaacctactcttccaaagctgcccggacaggcctccgcatctgcgacctcctgtcagattttgatgagttttcctccagattcaagaacctggcccaccagcaccagtcgatgttccccaccctggaaatagacattgaaggccaactcaaaaggctcaagggctttgctgagcggatcagacccatggtccgagatggtgtttactttatgtatgaggcactccacggcccccccaagaagatcctggtggagggtgccaacgccgccctcctcgacattgacttcgggacctacccctttgtgacttcatccaactgcaccgtgggcggtgtgtgcacgggcctgggcatccccccgcagaacataggtgacgtgtatggcgtggtgaaagcctataccacacgtgtgggcatcggggccttccccaccgagcagatcaacgagattggaggcctgctgcagacccgcggccacgagtggggagtgaccacaggcaggaagaggcgctgcggctggctcgacctgatgattctaagatatgctcacatggtcaacggattcactgcgctggccctgacgaagctggacatcctggacgtactgggtgaggttaaagtcggtgtctcatacaagctgaacgggaaaaggattccctatttcccagctaaccaggagatgcttcagaaggtcgaagttgagtatgaaacgctgcctgggtggaaagcagacaccacaggcgccaggaggtgggaggacctgcccccacaggcccagaactacatccgctttgtggagaatcacgtgggagtcgcagtgtgtatcataacagtcttttctgctctctcagtcaaatgggttggtgttggcaagtcaagagagtcgatgatccagctgttttagtcgcagactgagctgatcccaacaggccctggcagcgtctggacttgtgtaaacagcagcagtcacgttcctcggccgccacaaccaacaccaaagcaggaaaaccattttctgtacttttatatttctgttcaacctgttggtttctacaatgattttaaacattggaaagccagccttgtgtatatttttaaaaattatattcaaaatgagccaaagtgctcagagaccttctatgacacattagtgtcacatggttgcgtgtccagccgaagcagtgtaataaacatctccaatggccactgaa

SEQ ID NO: 72725 - DNA, 521 bp, Homo sapiens
gcctcccaaataggtgggactagcacctggctaatttttatatattttgtagggacggggttctgttatgttgttcaggctggcctcagacgcctgggcttaagcgatctgcacaccttggcctctcaaagtgctgagattctgtgggattcgcacctggcctaaaacataggtattaatagttatattcaaggtaagaataacattttgaatatttgaaaaggtgttgaacactaataattttggaaagccttttctacaaaattttgaggaaaggaagaaaaagaagttttggcagaaagataaggaatgccagaatacactgattaaattcttagaacctataccaaaatattaaaaatttttcctaaagtaaaatttgacattctgtggtttggagagtttaactttaggagtaatttataacagaatcatatatatgaaaaatttttatcttgattttcagtttttgcagagtgctttgaaggtaatacattgctgtctgaaggagtgttgttttg

SEQ ID NO: 72726 - DNA, 253 bp, Homo sapiens
cagaaaacaggggggagtccttcacccttcccactacaacagcccacttccagtcacaagcatgccaatttcgactcctcactatttcctgatacagcctttctggccacgttcatggcaccctccatgtgcacaacaccacaatcccatctacctgagtgcaatctcctggtgggactccctggctgcagtcttgcacctctctaatttatcctctgtaccatagtcaacatgaccctgccaaaacccaaat

SEQ ID NO: 72727 - DNA, 1542 bp, Homo sapiens
  misc_feature (199)..(199): n is a, c, g, or t
  misc_feature (310)..(310): n is a, c, g, or t
  misc_feature (531)..(531): n is a, c, g, or t
  misc_feature (749)..(749): n is a, c, g, or t
cagaaatcatctccttgctttgcattctttgcctgcaggacacggcaacatttcacccccttgtgagccttcgggatgattttacacgtgagggagggatctgtaaccattagcaattctttattatcaaagacacaactttacatatacattcacataggcctagcagggccccctggcctgcaggtggcacaggacngggcatgtgctgactccacactgaatccccacatctcctgcatggcatggcttagcacacctgtgtttgaaaactcaggttcgtttcctcaatgtttttcacgtcatcaanggcatagctccttagacccaaaagctgtgcctttgcctgacccggcgtaagaagcctatgcacttcctgatatgttttctcctctgtttgcttctaatgtctccggatgaaatcattgagtcatttttaatcactgtaaaacatcagagaattaacttggaaaacatgggaagaccttggtgaaaaaggaaatcctatgaagtgtaaagaatttttgagcnaaaatgagtgagactattaatgtttgaaaatgatgaacttggcagaaacactacaacattttcatttttaacagcattatcagaaacacactctgaaaacatgcacagaactcaggaccttactgtgaataaagctgaaattgagcaaaggcatttataccctcaggagggatttcttcagcgttttaaattgttttttctttcttcctagtaagtcntgagttcaagatttactacaacaaaactaactcatgcagaactgtacacccctgtcataatttcaaactgcccgtgagataccaggtgtgtctgcggtacatatgagcgtgcttgtatgcacaaccgaattataatttagttcaagaagacatgacttcaatccccagcaaagagttttcagctgctgtaggttgtctgtcttgctctgtttgggtttttaaggttggagcgtctccaggatcattgtttaaataagactgtgctcagactcaactttcagctttttctgtaaagggagtcgagatgaggctgtgggcaccgaatgtcatgaatcaggagacggtcggtgacctcgggccggttctagaagcccaatgccagtgcaaagaggaaagagcaggaaagagatggccttttccatgcagccatttctttctcacttcccaacggttcacatgaacgacgccggaagcccacggagactccactctcccaacagtcgacttctgaatctgatttttaaaatgccaacagcttccactctcccagctgatttaaaaaaaaaaattattataatcaatgtgcttgaatcctgcacacactcctatccagtgagggacgctcaatggtgctgctggggccaatctgagaccacagcaaaacagccattgtcctgagaatgttttatgacgtaacgatatggtgtcttttacatacttttttctgttctggaaataagggaaattgaaattggtttctaattaacttaagttcttcaccaacctcagtatc

SEQ ID NO: 72728 - DNA, 3535 bp, Homo sapiens
cgggagcggaccgtaagcccggcagcccgagaggaagatgaacagccccaggcagagcctctcggagagtggaccccgagccgcccccaggtagccaggagccgcctcagcggcagccgcaaactcagtagccgcccgtgctgcccgtggctggggcgagggagcccagagctggggaccaaggctccgccacctgcggcacagcctcacacctgaacgctgtcctcccgcagacgagaccggcgggcactgcaaagctgggactcgtctttgaaggaaaaaaaatagcgagtaagaaatccagcaccattcttcactgacccatcccgctgcacctcttgtttcccaagtttttgaaagctggcaactctgacctcggtgtccaaaaatcgacagccactgagaccggctttgagaagccgaagatttggcagtttccagactgagcaggacaaggtgaaagcaggttggaggcgggtccaggacatctgagggctgaccctgggggctcgtgaggctgccaccgctgctgccgctacagacccagccttgcactccaaggctgcgcaccgccagccactatcatgtccactcccggggtcaattcgtccgcctccttgagccccgaccggctgaacagcccagtgaccatcccggcggtgatgttcatcttcggggtggtgggcaacctggtggccatcgtggtgctgtgcaagtcgcgcaaggagcagaaggagacgaccttctacacgctggtatgtgggctggctgtcaccgacctgttgggcactttgttggtgagcccggtgaccatcgccacgtacatgaagggccaatggcccgggggccagccgctgtgcgagtacagcaccttcattctgctcttcttcagcctgtccggcctcagcatcatctgcgccatgagtgtcgagcgctacctggccatcaaccatgcctatttctacagccactacgtggacaagcgattggcgggcctcacgctctttgcagtctatgcgtccaacgtgctcttttgcgcgctgcccaacatgggtctcggtagctcgcggctgcagtacccagacacctggtgcttcatcgactggaccaccaacgtgacggcgcacgccgcctactcctacatgtacgcgggcttcagctccttcctcattctcgccaccgtcctctgcaacgtgcttgtgtgcggcgcgctgctccgcatgcaccgccagttcatgcgccgcacctcgctgggcaccgagcagcaccacgcggccgcggccgcctcggttgcctcccggggccaccccgctgcctccccagccttgccgcgcctcagcgactttcggcgccgccggagcttccgccgcatcgcgggcgccgagatccagatggtcatcttactcattgccacctccctggtggtgctcatctgctccatcccgctcgtgatatgcttttgtttactgtaggcaaactggaagtggagtcataaaacaactgatgggatgtcagatgagtgtgaagcacatctatacatacaagagaaatgccacaaatttgggtgcgagtattcgtcaaccagttatatcagccaagtttggagcgagaagtcagtaaaaatccagatttgcaggccatccgaattgcttctgtgaaccccatcctagacccctggatatatatcctcctgagaaagacagtgctcagtaaagcaatagagaagatcaaatgcctcttctgccgcattggcgggtcccgcagggagcgctccggacagcactgctcagacagtcaaaggacatcttctgccatgtcaggccactctcgctccttcatctcccgggagctgaaggagatcagcagtacatctcagaccctcctgccagacctctcactgccagacctcagtgaaaatggccttggaggcaggaatttgcttccaggtgtgcctggcatgggcctggcccaggaagacaccacctcactgaggactttgcgaatatcagagacctcagactcttcacagggtcaggactcagagagtgtcttactggtggatgaggctggtgggagcggcagggctgggcctgcccctaaggggagctccctgcaagtcacatttcccagtgaaacactgaacttatcagaaaaatgtatataataggcaaggaaagaaatacagtactgtttctggacccttataaaatcctgtgcaatagacacatacatgtcacatttagctgtgctcagaagggctatcatcatcctacaactcacattagagaacatcctggcttttgagcacttttcaaacaatcaagttgactcacgtgggtcctgaggcctgcagcacgtcggatgctaccccactatgacagaggattgtggtcacaacttgatggctgcgaagacctaccctccgtttttctactagataggaggatggtagaagtttggctgctgtcataacatccagagctttgtcgtattttggcacacagcagaggcccagatattagaaaggctctattccaataaactatgaggactgccttatggatgatttaagtgtctcactaaagcatgaaatgtgaatttttattgttgtacatacgatttaaggtatttaaagtattttcttctctgtgagaaggtttattgttaatacaaggtataataaaattatcgcaacccctctccttccagtataaccagctgaagttgcagatgttagatatttttcataaacaagttcgagtcaaagttgaaaattcatagtaagattgatatctataaaatagatataaatttttaagagaaagaatttagtattatcaaagggataaagaaaaaaatactatttaagatgtgaaaattacagtccaaaatactgttctttccaggctatgtataaaatacatagtgaaaattgtttagtgatattacatttatttatccagaaaactgtgatttcaggagaacctaacatgctggtgaatattttcaactttttccctcactaattggtacttttaaaaacataacataaattttttgaagtctttaataaataacccataattgaagtgtataatataaaaaattttaaaaatctaagcagcttattgtttctctgaaagtgtgtgtagttttactttcctaaggaattaccaagaatatcctttaaaatttaaaaggatggcaagttgcatcagaaagctttattttgagatgtaaaaagattcccaaacgtggttacattagccattcatgtatgtcagaagtgcagaattggggcacttaatggtcaccttgtaacagttttgtgtaactcccagtgatgctgtacacatatttgaagggtctttctcaaagaaatattaagcatgttttgttgctcagtgtttttgtgaattgcttggttgtaattaaattctgagcctgatattgatatggttttaagaagcagttgtaccaagtgaaattattttggagattataataaatatatacattcaatctgagttgcata

SEQ ID NO: 72729 - DNA, 222 bp, Homo sapiens
gggattacaggcgtgagccaccgtgcccagcccatgactggtttttctgaggcttattatgtagcttcctcttttcctggaacttgttaccagaaatgaaggcagcttcctaatattgataaggtagacatagcatttatatgttttcccaattgattaatgatgaaatctaaatgtgcgatctcacttatgcaggtgcgagtattcgtcaaccagttatat

SEQ ID NO: 72730 - DNA, 3422 bp, Homo sapiens
cgggagcggaccgtaagcccggcagcccgagaggaagatgaacagccccaggcagagcctctcggagagtggaccccgagccgcccccaggtagccaggagccgcctcagcggcagccgcaaactcagtagccgcccgtgctgcccgtggctggggcgagggagcccagagctggggaccaaggctccgccacctgcggcacagcctcacacctgaacgctgtcctcccgcagacgagaccggcgggcactgcaaagctgggactcgtctttgaaggaaaaaaaatagcgagtaagaaatccagcaccattcttcactgacccatcccgctgcacctcttgtttcccaagtttttgaaagctggcaactctgacctcggtgtccaaaaatcgacagccactgagaccggctttgagaagccgaagatttggcagtttccagactgagcaggacaaggtgaaagcaggttggaggcgggtccaggacatctgagggctgaccctgggggctcgtgaggctgccaccgctgctgccgctacagacccagccttgcactccaaggctgcgcaccgccagccactatcatgtccactcccggggtcaattcgtccgcctccttgagccccgaccggctgaacagcccagtgaccatcccggcggtgatgttcatcttcggggtggtgggcaacctggtggccatcgtggtgctgtgcaagtcgcgcaaggagcagaaggagacgaccttctacacgctggtatgtgggctggctgtcaccgacctgttgggcactttgttggtgagcccggtgaccatcgccacgtacatgaagggccaatggcccgggggccagccgctgtgcgagtacagcaccttcattctgctcttcttcagcctgtccggcctcagcatcatctgcgccatgagtgtcgagcgctacctggccatcaaccatgcctatttctacagccactacgtggacaagcgattggcgggcctcacgctctttgcagtctatgcgtccaacgtgctcttttgcgcgctgcccaacatgggtctcggtagctcgcggctgcagtacccagacacctggtgcttcatcgactggaccaccaacgtgacggcgcacgccgcctactcctacatgtacgcgggcttcagctccttcctcattctcgccaccgtcctctgcaacgtgcttgtgtgcggcgcgctgctccgcatgcaccgccagttcatgcgccgcacctcgctgggcaccgagcagcaccacgcggccgcggccgcctcggttgcctcccggggccaccccgctgcctccccagccttgccgcgcctcagcgactttcggcgccgccggagcttccgccgcatcgcgggcgccgagatccagatggtcatcttactcattgccacctccctggtggtgctcatctgctccatcccgctcgtggtgcgagtattcgtcaaccagttatatcagccaagtttggagcgagaagtcagtaaaaatccagatttgcaggccatccgaattgcttctgtgaaccccatcctagacccctggatatatatcctcctgagaaagacagtgctcagtaaagcaatagagaagatcaaatgcctcttctgccgcattggcgggtcccgcagggagcgctccggacagcactgctcagacagtcaaaggacatcttctgccatgtcaggccactctcgctccttcatctcccgggagctgaaggagatcagcagtacatctcagaccctcctgccagacctctcactgccagacctcagtgaaaatggccttggaggcaggaatttgcttccaggtgtgcctggcatgggcctggcccaggaagacaccacctcactgaggactttgcgaatatcagagacctcagactcttcacagggtcaggactcagagagtgtcttactggtggatgaggctggtgggagcggcagggctgggcctgcccctaaggggagctccctgcaagtcacatttcccagtgaaacactgaacttatcagaaaaatgtatataataggcaaggaaagaaatacagtactgtttctggacccttataaaatcctgtgcaatagacacatacatgtcacatttagctgtgctcagaagggctatcatcatcctacaactcacattagagaacatcctggcttttgagcacttttcaaacaatcaagttgactcacgtgggtcctgaggcctgcagcacgtcggatgctaccccactatgacagaggattgtggtcacaacttgatggctgcgaagacctaccctccgtttttctactagataggaggatggtagaagtttggctgctgtcataacatccagagctttgtcgtattttggcacacagcagaggcccagatattagaaaggctctattccaataaactatgaggactgccttatggatgatttaagtgtctcactaaagcatgaaatgtgaatttttattgttgtacatacgatttaaggtatttaaagtattttcttctctgtgagaaggtttattgttaatacaaggtataataaaattatcgcaacccctctccttccagtataaccagctgaagttgcagatgttagatatttttcataaacaagttcgagtcaaagttgaaaattcatagtaagattgatatctataaaatagatataaatttttaagagaaagaatttagtattatcaaagggataaagaaaaaaatactatttaagatgtgaaaattacagtccaaaatactgttctttccaggctatgtataaaatacatagtgaaaattgtttagtgatattacatttatttatccagaaaactgtgatttcaggagaacctaacatgctggtgaatattttcaactttttccctcactaattggtacttttaaaaacataacataaattttttgaagtctttaataaataacccataattgaagtgtataatataaaaaattttaaaaatctaagcagcttattgtttctctgaaagtgtgtgtagttttactttcctaaggaattaccaagaatatcctttaaaatttaaaaggatggcaagttgcatcagaaagctttattttgagatgtaaaaagattcccaaacgtggttacattagccattcatgtatgtcagaagtgcagaattggggcacttaatggtcaccttgtaacagttttgtgtaactcccagtgatgctgtacacatatttgaagggtctttctcaaagaaatattaagcatgttttgttgctcagtgtttttgtgaattgcttggttgtaattaaattctgagcctgatattgatatggttttaagaagcagttgtaccaagtgaaattattttggagattataataaatatatacattcaatctgagttgcata

SEQ ID NO: 72731 - DNA, 518 bp, Homo sapiens
  misc_feature (89)..(89): n is a, c, g, or t
atagtcttccctgatgcgacgatctgtaaaaaaccacaacttggcagccacagaactacacatcttgatcagcttgtgcttccttgccnggattatttcctcttggatgtaacgtctacctgggtcggggggctcctccctcgctctcggccgactgagccgggctggggccgcttttaaattacttctctcctaatgatgacctgagtcctgctattcaatgggagagtcaataagatcctgtaggatcttatttggaactgactttgtcgattttaattttgttcctgcttgtttttaaattttcttgttgtttccctagaaaggaaagatgatgcttagttttaaatatttaaaaatgtgcaagttgctttgctataataaaactaaatgcatacatacaaaaaataaaattatagttgatgtggtagtgtttggaattcaaaatataaatgcttagcgtgaggtaatcctttatctttccacattttaccagtttgtaagtttgagtatttaat

SEQ ID NO: 72732 - DNA, 351 bp, Homo sapiens
agtataattgtgtttacttttggcctcatgagagaaaggaaaatatactattctattaaatacttcttggtagctgggtctcaattttcctgctcttaggtctgggcatacttttataaaagtcttgagtgtattttttttctattatggctccatgtcacccccattcattcattcagcaaatacttattgagcatctactatatgtcaggaacttttctagctcctggggagctagctcctgccttctgggaacttaggttctagagggtaaagacaaaaaagaggcaagaatgtatgtcagacagtgataagtgtcatggagaaaaataaagtagggcagtggagata

SEQ ID NO: 72733 - DNA, 278 bp, Homo sapiens
cacacacacacagccgccactcgtggtcctcccaggaggccttaggagtgtgtggagccccccaccgagcatattgatcaaagccaccctcggaggggagcctgttccctgggtgtgatgaaagagcaggctctggagttggcagccctggtttggagcgtgggcccaccatgctccagctgcgggaccccaggtgaggcagttccctgaggggccgtttcctcagctgtaagatatacacgacaatgccttctgccaggctgatccagagagccact

SEQ ID NO: 72734 - DNA, 1062 bp, Homo sapiens
acagctggagaaccgtgtggtcttatctgtgtccagcgggggccagcatacagtcttattagtcaaggacaaagaacagagctgatgaagcctctgagggcctggcttctgtcctgcacaacctccctcacagaacagggaagcagtgacagctgcagatggcagcgggcctctccccagccctgagcactgtgtcagttcctgccttttctcatcagcagaacagaatccttttcctcttttccttcctcctctttggaattttcctgggacctacagaataaagggggggatggacagggggttttcaaaaggaacatggctcactcagagctatatggttagacgtttctccccttttccctaccttccatggtcctggttggccctggctttgcctactagaaaaccaaaacttcccccctggggttttgtgcccactctctgagaagttggggctccatcaagccccattctagtcatgtgcccctttcctgtccctaacagtccacaggcaaacaaatggtacagtcataagagccatctgtcacggacccacgcccagaggaacgtgcagaaaaaagcagagctacatggctgtgggcaactataagccaaatatttggctcagaacaggtgtccatgggacaaaaaagaacgatcctccacttgaccaagaaaaaagtgattctcccagaagcacaaagcatactcttgcccctcaggtgttgcttgtgtacatcgtacccatccattcggcttcacctgcagccaacggcctggaatcgcaaagagacaccactctgggcagagcagagcagggtatggggtggggagagagggtggagggttttataaacaaacttaacagcaatattgaaaggaggtgggggattgagggagggacagagtgttggagggccagagactagtcctgagatggaaacagcaacttgtacagtggctgagaaaataggatatagttttgatttttttaattgtaaaatattttggagggagaacaaaatcttttaacattttgaataaatttagagttttata

SEQ ID NO: 72735 - DNA, 1173 bp, Homo sapiens
acagctggagaaccgtgtggtcttatctgtgtccagcgggggccagcatacagtcttattagtcaaggacaaagaacagagctgatgaagcctctgagggcctggcttctgtcctgcacaacctccctcacagaacagggaagcagtgacagctgcagatggcagcgggcctctccccagccctgagcactgtgtcagttcctgccttttctcatcagcagaacagaatccttttcctcttttccttcctcctctttggaattttcctgggacctacagaataaagggggggatggacagggggttttcaaaaggaacatggctcactcagagctatatggttagacgtttctccccttttccctaccttccatggtcctggttggccctggctttgcctactagaaaaccaaaacttcccccctggggttttgtgcccactctctgagaagttggggctccatcaagccccattctagtcatgtgcccctttcctgtccctaacagtccacaggcaaacaaatggtacagtcataagagccatctgtcacggacccacgcccagaggaacgtgcagaaaaaagcagagctacatggctgtgggcaactataagccaaatatttggctcagaacaggtgtccatgggacaaaaaagaacgatcctccacttgaccaagaaaaaagtgattctcccagaagcacaaagcatactcttgcccctcaggtgttgcttgtgtacatcgtacccatccattcggcttcacctgcagccaacggcctggaatcgcaaagagacaccactctgggcagagcagagcagggtatggggtggggagagagggtggagggttttataaacaaacttaacagcaatattgaaaggaggtgggggattgagggagggacagagtgttggagggccagagactagtcctgagatggaaacagcaacttgtacagtggctgagaaaataggatatagttttgatttttttaattgtaaaatattttggagggagaacaaaatcttttaacattttgaataaatttagagttttataaaataggccacttgttttctacacattccctgctttttaagggagcacatattatgtgccaggcactgctgggaaagacagaataaactataaacctggtgttgaggctac

SEQ ID NO: 72736 - DNA, 910 bp, Homo sapiens
gggagagggagggagaataaagaaggagaagggaagaaaagggaaaggaagggtgggaaaagaaggggaagggaagagaggaagggaaagagcctgccataatgaatttgggaatctgtttcaagatgctacaacctagtgtaaaagaaaaactgttttcagtatagcctacacctcttagataaagttatgacttttcacaaaatttagcaggcaaaactacttactacctaaaggactgataaattttactactttcccttcctatacaagttcagaaaaatagaaatatttgtctaaacgacagaagtttcaaaaatttcagaatataaattctttattattttatccaaatttaagcatctgatgtgtgatatgagtatataacatatacctttacagtccaattagtaaacatattagtctattaaaatatgaagatttcagaagagctcttccaataaagaatttgtttatagtccaacagattataattcaatttcaattgataaattttcttgcgtgccagtatatatgatatgaacataaataaaacccttacaatttagtgagacagaaaaatatgtacacgttaaccaccaccaaccgtccgctctaggcagatctttcaacataaaagagtgctttctacattcttggagtctcaagtcagtttgttaaactgcgcttatatatattaacatgccaatgtttggttactgagtgtagcacttaaattttcaaaggagaaaaacccttctcaaactataaactacacatctaactcggattagcaagaaccaccattagtgagaaagcaaagcaggtggccaagaaagatgtaaccaattccccatcacttccagaggaataattcatagctggttaggcagacagagaagaattattc

SEQ ID NO: 72737 - DNA, 716 bp, Homo sapiens
  misc_feature (673)..(673): n is a, c, g, or t
gaataccctgttcttttctaccgtctttttaagttgataggtaagcagcattcaaggaaggtgggaataaaaattgttgaaatgtttaaatataaaatgatatacatatatgtaaaatttcattatccacattaatggagtggatacatcaaaatacattttttaattgtgtgtttcctaagaatgtggctttgtgatcatataaggattcacaacattaacaaatcttattttctgatatctaggatttttcttaactaaaaccatggaccagtcatctccatcctcctttcttgctctttgcccttgccctcccttctttgaaaaaaaaaatattttttagaagaattgcagaaatttctcacattggtcccaacaatggaaacacaatacaaagacacattcaaagaaaagtctatacaaccttagggtggaagtgatctttttaacaagattggaaacacagacatattttacttaataaaaaatttaaatgtcatatggcagggaccacagtcaaagttaaaacaacaagtagactagaagaaatatttgtatagtaataggaaacatgtcagtgtccctgtatacaaagagaagtttaagttataatgaagatgaacacactttatatttgttgactttttcaatgtcctgttctgtgaattgcttnttcacagtgtgaccacttctccaataacgtcgacgcggccgca

SEQ ID NO: 72738 - DNA, 343 bp, Homo sapiens
  misc_feature (300)..(300): n is a, c, g, or t
tttttatcagattggtttaaggttaaatagtgacaatatccattttggtgaagatgcaaggaaattggcagaaacattgctggcaaagttatctgggtgtgaattaaaatcaaatacacataactttcagtgaacaaccttctgagaaattatattgtcactatttaaccttaaaccaatctgataaaaactagtattacagtaatactttttaaaaaacaatccattaacccttataatgaagatgaacacactttatatttgttgactttttcaatgtcctgttctgtgaattgcttnttcacagtgtgaccacttctccaataacgtcgacgcggccgca

SEQ ID NO: 72739 - DNA, 708 bp, Homo sapiens
aaaatttaaatgtcatatggcagggaccacagtcaaagttaaaacaacaagtagactagaagaaatatttgtatagtaataggaaacatgtcagtgtccctgtatacaaagagaagtttaagttattggagaagtggtcacactgtgaataagcaattcacagaacaggacattgaaaaagtcaacaaatataaagtgtgttcatcttcattataagggttaatggattgttttttaaaaagtattactgtaatactagtttttatcagattggtttaaggttaaatagtgacaatatccattttggtgaagatgcaaggaaattggcagaaacattgctggcaaagttatctgggtgtgaattaaaatcaaatacacataactttcagtgaacaaccttctgagaaattataaaaataaaagcttccatgcataaaaatgtaaggacacagatgtttattgaaacatattctagaggccagatgtgttggctcacacctgtaatctcagcactttaggaggctgaagcaagcacaggtcacttgaggtcaggagtttgtggccagcctggccaacatggtgaaacccatctctactaaaaatacaaaaattagtggagtatggggttgtgtgcctgtagtcccagctactcaggaggctgaggcaggagaaccacttgaacccaggaggtggaggttgcagtgagcc

SEQ ID NO: 72740 - DNA, 755 bp, Homo sapiens
gtgatgagatctcattgtgttctccatgctgatttcaaactcctgggctcaaacaatcctcccattttagcatcccaaagggatgagattacaggtatgtaccaccataactttacaaaatgagatttttatataagaatgattcaaatgttcagggatgaaagagtcactaacataaaagaagaatgggatgaggtgagaaggatgaatacaaaaataattagatattcttgaaatcagaaatgtgctccctaattatatgaaatgttgtttgattacataaaataaagtggaaatgaatgattgactgaacagcccacaagaagaatcacttaatgctctgaaaattaccagtaaactgattaaaatctaaaattgctttctgttaaagctttactgattagtttttcttccaaagctctcttgtttctagttgttttcttggtcttaactacccattatatgctttgttaaagtgtttatgccctgattcaatgtgattatctcaatttttatttcattctgtcctaactcttgcaacctgcatgtcctctttattattgatcaatccaactgcaaagttcaccttacctgactaaggattattcattaagttttacttgtttatctgacatttattattttgtctctttgctagtcactctgagccatggtcatgatgacttaggattctggatctcttatgaataacaaatttatccttaataaagtctctatactaaagaagaatctaa

SEQ ID NO: 72741 - DNA, 854 bp, Homo sapiens
ttggagcctccgtgcccacaggctcctgtctcctcagcatggggcccgcccccttgggggtatgctctccacaggtggctggggacagggaggtgagcccacctagagctgccaacagagaccctccccacccccaccccaatgggggaaagggaaggaggggttggggaaaccgggcatagagttcagctttgttgcccctggctgcaaggccttgtgttggctgagtttcgctctctagccctcagttccctattgtataaaaggcaacattggcacctgcatgctctctttctcaggatcagataagaatatactaaaaagtggatcagaatgtgctgagtctggggtcagcgatacgtggcatcactgtgcttacccaggaggcctgagacgcctctccatcagagcccaatgctacccagcgctcctctccccttttcccattccttggtcaacattagttggtggcctggcaccaatgtccaagaggtggtgtgacataaaagaggcacctcctggggagtcagatgacctggattccagccctgaccatgccaggctaaccacatggccttgagcctgccactcgaccttgctggaacagtttcctcctgtgctacgtgaggatgctactgcttgtttgagagacaaagaagatcaaggtggttaagcaccccccagccccaaaagacttggacaaattgcaaaacccataaaagtgtaagtacactactggccgggtacagtagctcacacctgtaatcctagcactttgagaggctaagccaggaggattgcttgaggccaggagtttgagatcagcctgggcaacatagcaagaccctgtttct

SEQ ID NO: 72742 - DNA, 481 bp, Homo sapiens
cacctgcacggtaggccttccatatgacaagactggtaccactaatcctctttgtttctatgacgtttttcaccttcacggtaggccttccatatgacaagactggtaccactaatcctctttaattttctggatattgtgggctttttaaaccaatctcattagtggcatctttacatggagagattgagagaaagggcacttcccctttaaagaaatcagtctttttggttgatcttggccactgttctgaggaatcgttatagccgctaggggaaaacttaatcttcatccactgaccagaacaagctataatccatgtgtgcccaaacttggaagttcacaaagccattaaagggctttaaaagcacagttgttagcaccttggttgcttagtggtggctggagttactctggccctttccgttctcccaaagccttcccagaaaagtatggaacttaggtgtggaacagaaatgac

SEQ ID NO: 72743 - DNA, 1067 bp, Homo sapiens
gttattaatgttaaagaaccacagaatgttgtaaatatagattcatatacaatttctcattaaagtcgattgtatgcctatcagcaaaacaatatttacatgggttttgattaggatggaagaatgctctcattctatttaaatagacagtataaaagtacaatatttgctaaaattgaattgttgctgggaatttttgctgggagaaaagataaaggactcttgaggactaattatatggaaggtagcagaaggtggtcctacagaacagcagattgaggactaaatatacaaaaaatgctggctactcagctaagctcttattactgagtagaggcaggaagatactgttcaggtgagagaaaaactgaaactaacaaaaacatccctaacccagagagagtttctctctctctttgtcattcttgtcttgtttcttgtttgcagatccacagttgagacaatgtgctgctctgtatgtcaaggtcagactttggctgtttgtttctgatgtctccactcttaggagacaggacaccagcttccaggtttctctgaggtgctttgaaatgtgtagaaagatagtctccagttagattacttattaggcaactctgagataccatgacctttgttaaataacaagaacaccacctccttgctctcctgcttctgccctcagtgggagaaactggcaggagcctcatcagcacatatcaggggccctaagagttcagtcaaagatctaatgagtcacaggatgggggatgaaattgggaaaggtctggattagcagagttgctgcagaaagaagtagaggggaatatcttagaaggcacttggacagaatgggggtgatataaaagatgtatgctgtcatttttgttttggctcctagaaaatatagcagaaagtgagaatttgtgccatacatcctgttctgcaccttaatatggaagtttgcctttccacacgagtcttccttcacaattaacctctaattttttttttgcagttttctccagattttggaagattacgacaaacttcctaaaagattagaaaaa

SEQ ID NO: 72744 - DNA, 388 bp, Homo sapiens
tgcagactactgagccagttaggtggcaagcctcagctagggagggcactgggtctggaacaggtcgtgtacgttcaaagtcgtgactgcgggcagcttgcctcattcctctgtgcttcagttctgtgctctgtaacatggggataattatagtgtacagctcataaaatggagaggattaaatgaaataacataaagcacttagacacatagtgtcttagacatattgagcccatagtggcactcaataagattacttgctcttgatgttattatgtttgtcactgtcccgcttattccaaaaccagtcagctcttccctcctgaggggccacagtagcagcagcactgaggcatgcaccatattgaatgtgaagttgaatgatttg

SEQ ID NO: 72745 - DNA, 1743 bp, Homo sapiens
ggcagacagacagaagcacacatatgattaatacagcacagctgcaagacagttatatgctgcccagctagctgcaatgcaggtatctccaggagggaagctgccaggcataccccaaggcaaccttggtgctgctgtatctcctaccagcattcacacagacaagagcacaaacagcccaccacccaaaagcaaggatgaagtggcacagccactgaacctatcagctaaacccaagacctctgatggcaaatcacccacatcacccacctctccccatatgccagctctgagaataaacagtggggcaggccccctcaaagcctctgtcccagcagcgttagctagtccttcagccagagttagcacaataggttacttaaatgaccatgatgctgtcaccaaggcaatccaagaagctcggcaaatgaaggagcaactccgacgggaacaacaggtgcttgatgggaaggtggctgttgtgaatagtctgggtctcaataactgccgaacagaaaaggaaaaaacaacactggagagtctgactcagcaactggcagttaaacagaatcaagaaggaaaatttagccatgcaatgatggatttcaatctgagtggagattctgatggaagtgctggagtctcagagtcaagaatttatagggaatcccgagggcgtggtagcaatgaaccccacataaagcgtccaatgaatgccttcatggtgtgggctaaagatgaacggagaaagatccttcaagcctttcctgacatgcacaactccaacatcagcaagatattgggatctcgctggaaagctatgacaaacctagagaaacagccatattatgaggagcaagcccgtctcagcaagcagcacctggagaagtaccctgactataagtacaagcccaggccaaagcgcacctgcctggtggatggcaaaaagctgcgcattggtgaatacaaggcaatcatgcgcaacaggcggcaggaaatgcggcagtacttcaatgttgggcaacaagcacagatccccattgccactgctggtgttgtgtaccctggagccatcgccatggctgggatgccctcccctcacctgccctcggagcactcaagcgtgtctagcagcccagagcctgggatgcctgttatccagagcacttacggtgtgaaaggagaggagccacatatcaaagaagagatacaggccgaggacatcaatggagaaatttatgatgagtacgacgaggaagaggatgatccagatgtagattatgggagtgacagtgaaaaccatattgcaggacaagccaactgataagggtcaaaagattgttgtgaccttaggacttaaagaagccctaactggttcatccttaccagtggccaagcacattaactttctcatacactgactgttactttaactgttagtcttaaatagttgggacatcagctgactaatagacctcagcctcaaaaggcttggaaagaaaaaacaaatacaacaagcaaacaacaatatcaacaacaagagattgaaataagctatgggtaaaataatgccagtaattcagctgctacatccaagcactgaagtcttacccgtcaacttttttttttttttaaataaactttatggctgtttgttctacaatgttctagaaattctcactcaggtacacagtgccaacaagtggcttgtgaatgtgttttgttgttttgtgctacaatttt

SEQ ID NO: 72746 - DNA, 1382 bp, Homo sapiens
ctacatgatatatgttgggaacttttgtagtaaaaaacatctcccacataaaaatattcaataactagataattagtctcagattcaaaatgcatgataacatatcatgtaacttttctgttcacatgtgaattatatcatgatctaatgtagaaatgagaaatgtatccattaaattatctatgagctttaagggacataatacaaaagtttggctagaatgcaaaccagaaaaaaaaaaatactgcccagtgtttatatctttaggtacaaaaccaccaccacctctgttcttgtgggatctcactaatcaaaaacaggtttatgtatttctgggttttggctaacatctcaactttagattttcttgttctcagccatatcactttctggaatgcttagaagctgtgcaaattggaatcctaacctcctttcttcataggatctcgctggaaagctatgacaaacctagagaaacagccatattatgaggagcaagcccgtctcagcaagcagcacctggagaagtaccctgactataagtacaagcccaggccaaagcgcacctgcctggtggatggcaaaaagctgcgcattggtgaatacaaggcaatcatgcgcaacaggcggcaggaaatgcggcagtacttcaatgttgggcaacaagcacagatccccattgccactgctggtgttgtgtaccctggagccatcgccatggctgggatgccctcccctcacctgccctcggagcactcaagcgtgtctagcagcccagagcctgggatgcctgttatccagagcacttacggtgtgaaaggagaggagccacatatcaaagaagagatacaggccgaggacatcaatggagaaatttatgatgagtacgacgaggaagaggatgatccagatgtagattatgggagtgacagtgaaaaccatattgcaggacaagccaactgataagggtcaaaagattgttgtgaccttaggacttaaagaagccctaactggttcatccttaccagtggccaagcacattaactttctcatacactgactgttactttaactgttagtcttaaatagttgggacatcagctgactaatagacctcagcctcaaaaggcttggaaagaaaaaacaaatacaacaagcaaacaacaatatcaacaacaagagattgaaataagctatgggtaaaataatgccagtaattcagctgctacatccaagcactgaagtcttacccgtcaacttttttttttttttaaataaactttatggctgtttgttctacaatgttctagaaattctcactcaggtacacagtgccaacaagtggcttgtgaatgtgttttgttgttttgtgctacaatttt

SEQ ID NO: 72747 - DNA, 433 bp, Homo sapiens
taatagactgaaaaataggaatgcaaggaaaagagctgacaaaagttttaacgctaacacgaagtgatgtttcctgttttcaggaagtgctggagtctcagagtcaagaatttatagggaatcccgagggcgtggtagcaatgaaccccacataaagcgtccaatgaatgccttcatggtgtgggctaaagatgaacggagaaagatccttcaagcctttcctgacatgcacaactccaacatcagcaagatattgggtaagaaaaccattaagaactaagtgacgtatggaataaaggtactgttctgttttctgcagttgtggaaggatcctggatttggaggccatacaggtcgtgttatttgcttatccagaaaataaacatcatcattgaggcttcttctggtgatgaagcattctatgtccattgag

SEQ ID NO: 72748 - DNA, 1502 bp, Homo sapiens
ggcagacagacagaagcacacatatgattaatacagcacagctgcaagacagttatatgctgcccagctagctgcaatgcaggtatctccaggagggaagctgccaggcataccccaaggcaaccttggtgctgctgtatctcctaccagcattcacacagacaagagcacaaacagcccaccacccaaaagcaaggttacttaaatgaccatgatgctgtcaccaaggcaatccaagaagctcggcaaatgaaggagcaactccgacgggaacaacaggaaaaaacaacactggagagtctgactcagcaactggcagttaaacagaatcaagaaggaaaatttagccatgcaatgatggatttcaatctgagtggagattctgatggaagtgctggagtctcagagtcaagaatttatagggaatcccgagggcgtggtagcaatgaaccccacataaagcgtccaatgaatgccttcatggtgtgggctaaagatgaacggagaaagatccttcaagcctttcctgacatgcacaactccaacatcagcaagatattgggatctcgctggaaagctatgacaaacctagagaaacagccatattatgaggagcaagcccgtctcagcaagcagcacctggagaagtaccctgactataagtacaagcccaggccaaagcgcacctgcctggtggatggcaaaaagctgcgcattggtgaatacaaggcaatcatgcgcaacaggcggcaggaaatgcggcagtacttcaatgttgggcaacaagcacagatccccattgccactgctggtgttgtgtaccctggagccatcgccatggctgggatgccctcccctcacctgccctcggagcactcaagcgtgtctagcagcccagagcctgggatgcctgttatccagagcacttacggtgtgaaaggagaggagccacatatcaaagaagagatacaggccgaggacatcaatggagaaatttatgatgagtacgacgaggaagaggatgatccagatgtagattatgggagtgacagtgaaaaccatattgcaggacaagccaactgataagggtcaaaagattgttgtgaccttaggacttaaagaagccctaactggttcatccttaccagtggccaagcacattaactttctcatacactgactgttactttaactgttagtcttaaatagttgggacatcagctgactaatagacctcagcctcaaaaggcttggaaagaaaaaacaaatacaacaagcaaacaacaatatcaacaacaagagattgaaataagctatgggtaaaataatgccagtaattcagctgctacatccaagcactgaagtcttacccgtcaacttttttttttttttaaataaactttatggctgtttgttctacaatgttctagaaattctcactcaggtacacagtgccaacaagtggcttgtgaatgtgttttgttgttttgtgctacaatttt

SEQ ID NO: 72749 - DNA, 552 bp, Homo sapiens
atgctttccacgttagttccagtgaatgcctgggatgagagctgtagcctagccttacaggccctctaaagccttggctgaagcagtgatgctggctcctcccaggacctgctggaatgttcctccttgtgttctgttctacttttcaccatccctactagcagtatttcctcgtcttccaaaatagcagggtctgattcctggtaatggtgctgagaccaggcgtgctgggttctctgagcagagtgtgtcgaggctattgccttttgctatacaggttctgtacattgggcctccaggttaattgggtttctagaaggatcctaggaagatgacatgtctttttcctttttgtcacatgctgacagagctggcctccctttcaactgggtttgaggtatttcctcagaggagagtgagctctgagttgtagaagtgtctgggtgtgattcaatccaagcaacaatcctgaggtactgcagggccgaacaccatctttctgggactgggtcctcaggacaagcaaggagttgatggaccaaaccctggttt

SEQ ID NO: 72750 - DNA, 308 bp, Homo sapiens
tgccatcccgcgccccgtttattgcgggcccgaaaaagatttcggccgcatctaggttaattgggtttctagaaggatcctaggaagatgacatgtctttttcctttttgtcacatgctgacagagctggcctccctttcaactgggtttgaggtatttcctcagaggagagtgagctctgagttgtagaagtgtctgggtgtgattcaatccaagcaacaatcctgaggtactgcagggccgaacaccatctttctgggactgggtcctcaggacaagcaaggagttgatggaccaaaccctggttt

SEQ ID NO: 72751 - DNA, 376 bp, Homo sapiens
ataaaagtctacacattgggtacagtgcacattgcttgggtggtgggtgtaccagagtctcagaaatcaccactgaagaatttattcatgtaaccaagcgccacctgttttctcttatatgaagaccaagctcagtaatgctgtgtttttatggacctataattgtgtccatgctgccctgtcattttaccagttcttgtatttgagcagataataccaaaaatggtgcaaacttacttttgctacagatgatgacaattttagactaggttacacatatttatacatatagtacctaagggtaggagctcaggcaagagtgtagggaggagcccagtaaatgtgagatgaaattctagagcaggtaaagtcaacg

SEQ ID NO: 72752 - DNA, 376 bp, Homo sapiens
ctactactactactaaaggcgcgagcggtcgaacaagatcgtaccattgcactccagcctgggcaacaggagttaaactctgtcttaataataataataataataaaattatctgggtgtggtggcgcatacctgtggtctaagctgttctggaggctgatttgggaagatgcttgagtgtgggaggtttaggctgcagtgagctgtgatcatgccactggagtctagcctgggcaacacagtgagaccccatctaaaaacaaaaacaaaaacaaaaacaaaaatatcatcagccagtcttgttggctcacgtttgtaagtaatcccagcacttttgggagactgaaggtgagatcacttgaggccaggagtttga

SEQ ID NO: 72753 - DNA, 402 bp, Homo sapiens
gcttccccagcacattatacaagcacaacaggaagctgcaattttgaaacaagttcaggaaactggaccacagcctgcagtcttactcaagactctgaggatgacttggactgggccattggcagcagaattcctgccaaagcattaattccagactctgatcacacgccaggtagtggtcagcacttcctgtacgtcaactcatctggctccaaggaaggatccgttgccagaattactacttccaaatccttcccagcaagccttggaatgtgtactgttcggttctggttctacatgattgatcccaggagtatgggaatattaaaggtgtataccattgaagaatcggggctaaacatcctggtgtggtcagtgattggaaataaaagaacgggatgg

SEQ ID NO: 72754 - DNA, 661 bp, Homo sapiens
gaatagctctgctctttgtactctggaacctcaaatgacactgaaactgcaatagtctgatttcctctggctatgaagttaggctgaggagagcacagcgggccctgctgacctcttgccaagtttctggttgttttcttttccaacaaggctgggtcctttctgcatcagaggaacgacactgtgtgctcagcactctctcagcacaactcagatggtgccctgcatctcccattgccctggaaaccacgctgaagagaagtgtccggatgccacctagtggagttagctattctctgttggtgccatctgttaataaaccaaactgggcttaatgaatcatcttcagcatcctcatagcactgctccttccacaacttgtcctcacctcctcatcactcttaatattatgactaattcttttagtggttgtagggtggctccaggtggggggcattcatgctgtggttctcagtccgggcaacaccttagaaccacctgggaggctttaaaaagtactggtatctgtgcccatttcaggccgtgaaacacaatctcctgggatggggctgggacattggtggttttgctgttgttgctttaacagctctattgaggtataattaacatttgataaagtgcacatttttaaaatgttcta

SEQ ID NO: 72755 - DNA, 378 bp, Homo sapiens
tgtttactatccattccagcaatattcctttatgccagcctccatcatagagattagagccaaagtgcctcattcttcacttccgtcacagctggggtggccgtggaactccgtcctggtcaatgtgttctaagtaggaatctgcttttgctcttttccccttcctccttctcccggtctggatcacaaggaattctggcagatgctgtatcactaagacaccgttaaaccgtggtaccagtcctggatgatctgtcactgtacctctagttatatgagactaacgaattcccctctgtttggtttacacactgtaactgagtttctatgtaatccaaattgaggccagaattagctgtttttcaggcattattctaa

SEQ ID NO: 72756 - DNA, 153 bp, Homo sapiens
gaaactgggtatcctgctataatgcgagttctgaaaatcaataggtcacaccacaacaaaggaaaatttgactacttagaccaatatgaggtcccttcagggagtgtctgtatactccctgaactctgcaggtaagtgtactccttaccttta

SEQ ID NO: 72757 - DNA, 497 bp, Homo sapiens
aagtatttttcccattgcccatgcagggaaattatataaattttatgtctgcaccaaaggtattatgtttaaagagataacagtttctgttctgggagaaaaatctgaggaaacacaatcaattttttgtttcccaccaagcaggtaaaagtagcttccttatacctggccacgtgagccactcagaaaaccccaaggggctccattcttttccttgaaggaaacggtgtttgtgagtttcaggagcctcatgcaaccggcacgttcctccacattgtcctttggtgacttgaggttgagaaggaacaatatttctcttcctaacttcaataagaggctcagagtcccagagagtttagttaacttccttgaggtcatgtgttaaataaggaaggaaggagacaaaacagctttctgggcacctgattccccctcttgcccacaggactctgctgttgttttcattctgtgggcagaaaatgcttaaaaaaaaaaaa

SEQ ID NO: 72758 - DNA, 548 bp, Homo sapiens
gagacggagtttcgctcttgttgctcttgttaatttaagatgtgtatctcaaatctctgcccttgtgactggcatatgttaattagctgggcatggtggctggcgcctgtaatcccagctactagggaggttgaggcaggagaattgcttgaacccaggaggcagaggttgcagtgagccaagatcgagccattgcactccagcatgggcaacaagagcaaaactctatctcaaaaaaaaaaaaaaaaaaattctcagattttcttgacaattgaatataatctataaacagaactgtttttattcttactcatcctttattcttctagtaagaattgcctagtaaggttttgaagtttttctcatatagttcacatatatttctagctaaaattattttcttcctattgtgaagacttttttaaaaataaaagtatgtgctaacttgttgaggacggcaatcaatctattagcttatatatttccttttcagtcactttactacaaattattgatagtaattgaatctcttctcattttggggactt

SEQ ID NO: 72759 - DNA, 478 bp, Homo sapiens
gtagcaatcatttaaacaaattccatttcatagatttgaattgagaagggcttagaggactctctgaatgacctccatgctttcatcctggcattgctgttttctcagggagcaaacttttccagagcctcttcctcagacttctaacaattctaagttccacttaggacctgccgtacattgagtgtttatttcctccccaaattcatatgttgaaatcctaacaccgaatatgaggagtgtttgcagctggggcttttgagaggtgatgaggtcacaggggcagagccctcattaataggattagtgtccttatgaaagagaccccagagagcttcctcacttctcctgctatgtgaggatacagtgagaagatgaccatctgtgagccaggaacgggccctcagtggaactcaatctacttgtacttcccagcctctagatctgtgagcaataaatttcctttgttttaaagcca

SEQ ID NO: 72760 - DNA, 300 bp, Homo sapiens
gggttgattctctatctgagtgagtggtgcatctgcatctctgggttctattttatgtggggttgattctctatctgagtgagtggggtgtctgcatctctggatcctgttgtatatggggttgattctctatcggagtgagtggggcatctgcatctctgggttctgttgtatgtgggagtgatgctccatctgagctgggcgtctgcatctctgggtttatggatccctaagcccaactcactcacagcttggccctccatgtgctggtctttcctctgccttacccatgtttggtta

SEQ ID NO: 72761 - DNA, 573 bp, Homo sapiens
gaaaatgttaaaaacatacttttaaaagaaatattttgctaatacaaacaagtggaaaaatagtcaacaggctttacagtaggtactataggaggtagggagagagatcaatcaaccaattaatagacagatgaagggtatagcctgctgaacctgttatttgagagactatttagcctaattaccagcatgtcaaagaaaagatgacactcacaactttgtccaaatctgaggcaagactcactcacagaagcagtagagacatatttctttatgtatctttgcttcagtcacctggcgctggggacagaagtaccgtgaagagatgaacgttgcagaacaatgtctcaggtattcaggcatgcaatactttccacagatgtcagaaatggcaacttgctgcagggagacacaaggtcattccatgcaccattatcaggattgtggtgcacagactgtgagcagactacttaatgcatctctgattcagccagccattcttcttgtcttccaaatgctttgtattaagtcattgttgagctctataaagtcctttgaaaacacaaaaaccat

SEQ ID NO: 72762 - DNA, 395 bp, Homo sapiens
agattgagattccagagcatcggatgaacgggacttatagctaaggcgtactcacccacccctcccttcgtctttttacgcacgcagcaactcgtcctcacgtgcataggggtagtggacagtgttgacttgaattgctgtccctcgttccaagcctttcctgtgaatgaacccgaaaacactcgacaggtcgtgaataatcgttttaatgagtgtgcaaagcgtgcgacggggtgcaccgagctgtcgggttaaacaaacaacttgtaccctgaccaaatccgattgttaaagtgcaaagtgatgtcagtaccatttccattgcctttcggaaatccacagatctgacacgcgggagtccaattttccccattaaagaaaaataacaataaatt

SEQ ID NO: 72763 - DNA, 393 bp, Homo sapiens
tgagatggtgtctcactctgtcgcccaggctggagcgcagtggcatgatctcggctcactgcaagctccacctcctgggttcacgccattctcctgcctcagcctcccaagtagctgggactacaggcacccgctaccacacccagctaattttttgtatttttagtaaagacagtgtttcaccatgttagccaggatggtctcgatatcctgaccttgtgatccgcctgcctcggcctcccaaagtgctgagattacaggcgtgatgggattacaggtgtaagccattgcacccggccacagtcatacttatccttattggttattcttactggttattctcaatcacaccctctcgaccagtactggccaacagaactctatgcacagatg

SEQ ID NO: 72764 - DNA, 399 bp, Homo sapiens
ccaagatgaatgtggtttatacaattcctcctttgttctccagggtctgggcagaccaaatgttctccagaaggcatctcagcaggtgtccttggatgtgtgtgctttatttaggcttcctcaagctatagaacttaatggacagcctagctagaaaatgcagcagccaaaaaagaaaattcaagaacagtgagtgttgttcaactccattagagggaaactcattcgccatcatgtatcctcagttcacactgtgtttttgatcccaggataaaagacagtcagaggcaatataactcagtgattaagcactcaggccagagtcaagtgtaccagccttttagtcctggtgctgtcacaaactggctgaatgcccctgggcatggtccttggcgttgg

SEQ ID NO: 72765 - DNA, 341 bp, Homo sapiens
ttggagtcaggtgcttccaggtctcccagactggtactgcatactggtggctctacagttatggagactcgaggtggccccatccttatggctttgataggcattgagctagtggaggctgtctgcagggcttaaacctgtggtagtactctgcctgggccccagggctctccaatgcatcctttaatatcttggtggaggtagctgtgcctccacagctcttgcactctgagtacctgcagagttggcaccctgtggacgccaacaaggtttactgcttatactttcaaagagacagcccaagctgtacctgtgctggcttgtgccacagctagggtggc

SEQ ID NO: 72766 - DNA, 734 bp, Homo sapiens
tttcaagtcagtatttctttttttcaaattagctgcagttcttttaagccttaaagaaatctttgatatatgcaacactgccctgagctgaacggtggggttggagttggctagccggggaaggctataggacagagaaaaaagggggggtgagtgggggaaggccataggacagagaaacatggggagcaaattaccaaactgtacctccctggaaaatgctcattctactttttaaaaaagtttgttaccgtaagtagtgtctatgtattggcaactgttctgctgattcgatgaatgtaataaatcataccttcttaccttcttgtaaaatcacctgcattgggactaaaggccatagtcccctaagaggggaaaggcttttctctaagaaagaagttaggagttcttgaaaggattgatgatccacttcctcagtaaaaaatgtattgaggaggccaggcacggtggctcatgcctgtaatcccagcactttgggaggccgagggatcacctgaggacaggagcttgagaccagccttgccaacatggcaaagccccgtctctactaaaaatacaaaaattagccaggtgtgctggcaggcacctgtaaccccagctactcgggaggctgaggcaggagaatcacttgaacctgggaggtggaggttgcagtgagccaaaactgcaccactgcactccagcctgggtgacagagcaagactctgtctcga

SEQ ID NO: 72767 - DNA, 560 bp, Homo sapiens
tatatcattagcaccatatcccatggtcagccccacctgaataaacggcatattgggatttttccacaaactatgagcctaatgaaaaaggaaatggataagggaaacaagttcccagcctatgtcacatgagtttctgcactacgtgttatgtggtaaggtatgcattccctcaggacttcccaaatccattacatgctagggttttctctctggtatgcattctggtgtgatgtaccctaagagctgccttacggacaaaagttttcccacattcatcacattcatagggtttctcccctgtgtgaattctctggtgtactctgagagttgaattttgggcaaaagctttcccgcattcattacactcatagggtttctcccctgtgtgaattctctggtgtgcactaaggtgtgatttctgggagaacgttttcccacaatcattacattcataggatttctcccctgtgtgaattctttgatgtactctgagggttgaattatgggcaaatggcttcccacatacattacattcatagggtttctcccccgtatga

SEQ ID NO: 72768 - DNA, 341 bp, Homo sapiens
gagaaaaaagaaaaaaatagaaaaatgtaacaacatattgtttagggatacatgcacgtatgatgaactgtttttgaaaacaaaaaattaagggaacaataagcgaaatctgggatagtggttacctctaagggagcagcaagcagatggaataaagcacatagtagctgcactggtattaatgctaattctcagttaatgtggtaagtgacaggatgtatttttttatgcttcataattacgtgtacacattgcacatatcaaatacagaatagcattttaaaagataagttaaaacagacttcaataagaaaattagcctatgtgcaaaatttaactgt

SEQ ID NO: 72769 - DNA, 510 bp, Homo sapiens
cctgctctttattattcatagaatttatatgcaagtccggacagtggctgtggaaggatatgtccaagctgtggctgggcgtctggagggcagtgccatgcaactgtaagggctttggtagcattgcatggctatgcataaattcagcagttaaatataacacccttacacccccaccctgaaccattgaactcctgacctcaagtgatctgcctgcctcggtatcccaaagtgttcagattacaggcatgagctaccgtgcccagccagaactttctacaatgatggaaatgttctgtatttgctctccggtacagtagccactagtcacatgtggctattgaaaactttaaatgtgactagtgcaattaaggagcttaattttttttaatttaattttaggccaggcctgtaatcccagcactctgggaggccgaggcaggcggatcacttgaggtcaggagtttgagactagcctggccaatgtggcagaaccccatctctactaaa

SEQ ID NO: 72770 - DNA, 554 bp, Homo sapiens
acttgattaggaaaagttagacaatcatagcaaaaacaaaaccaaaaaactttccttcttagaccaggtaacatgaggaagggggaaaaaaacccaaacaaaatagtccccccacatgacaggtgtcttcagcttgccatattgatccaaagttcatacattttatcatgtacaagatacattagacttacaataaagtctaattattagacttttatgtcagtggattgtgcttgcagaaatacagaagtaacatactgaccctaggtgaggagtttcttacatggttaactggattgacccaattggagtaaaagatttttgctgttacctcgatgctcctgcagttgttacctcagcatgccactgtagtccttgactctcacattaaaactaactttggctaggtactggtggctcacacctgtaagtaatcccagtactttaggaggctgagagtggaggattacttgagtccaggagttggagaccagcctggccaatatagactgtccctacaaagaaaataaaattgtttcatcttccaaaaaaaa

SEQ ID NO: 72771 - DNA, 2430 bp, Homo sapiens
tattcttttatatatagacataggtataatacatttcatataactgagaatttatacaaagcgtattctgagtttactcactttctccacaatgtttccttttctccttgcaataggaaaaaaaaaaagaagatgggttttttaagtccaatatatgttattttcttcttttttggagtcaaagtacattgccaatatgaaacttatcagtgggatgaagactatgaccaagagccagatgatgattaccaaacaggattcccatttcgtcaaaatgtagactacggagttccttttcatcagtatactttaggctgtgtcagtgaatgcttctgtccaactaactttccatcatcaatgtactgtgataatcgcaaactcaagactatcccaaatattccgatgcacattcagcaactctaccttcagttcaatgaaattgaggctgtgactgcaaattcattcatcaatgcaactcatcttaaagaaattaacctcagccacaacaaaattaaatctcaaaagattgattatggtgtgtttgctaagcttccaaatctactacaacttcatctagagcataataatttagaagaatttccatttcctcttcctaaatctctggaaagactccttcttggttacaatgaaatctccaaactgcagacaaatgctatggatgggctagtaaacttgaccatgcttgatctctgttataattatcttcatgattctctgctaaaagacaaaatctttgccaaaatggaaaaactaatgcagctcaacctctgcagtaacagattagaatcaatgcctcctggtttgccttcttcacttatgtatctgtctttagaaaataattcaatttcttctatacccgaaaaatacttcgacaaacttccaaaacttcatactctaagaatgtcacacaacaaactacaagacatcccatataatatttttaatcttcccaacattgtagaactcagtgttggacacaacaaattgaagcaagcattctatattccaagaaatttggaacacctatacctacaaaataatgaaatagaaaagatgaatcttacagtgatgtgtccttctattgacccactacattaccaccatttaacatacattcgtgtggaccaaaataaactaaaagaaccaataagctcatacatcttcttctgcttccctcatatacacactatttattatggtgaacaacgaagcactaatggtcaaacaatacaactaaagacacaagttttcaggagatttccagatgatgatgatgaaagtgaagatcacgatgatcctgacaatgctcatgagagcccagaacaagaaggagcagaagggcactttgaccttcattattatgaaaatcaagaatagcaagaaactatataggtatacacttacgacttcacaaaacctatacttaatatagtaaatctaagtaaacatgtattactcaaagtaatatatttagaattatgtattagtataagatcagaattgaatttaagttgttggtgacatctgcatcatttcataggattagaacttactcaaaataatgtaaatctttaaaaatataaattagaatgacaagtgggaatcataaattaaacgttaatggtttcttatgctctttttaaatatagaaatatcatgttaaagaaagtgagtgtatcatttctattaacagtaatttttctaaaaatgaggaaggaagtagcattagcagtaaagacccacaggccatgacctttttgatcactctgaggacaatatttaaatgacaggaaggtatattaatgtaacaagcattcatttaaggaatagaccattttctctgacctcttcttcaggaaagctttcacactggtatttgtgatctcaccattatgacatccatccccctagctcaccacatagcacatagaatgatatttttgatttgtaagaggccatccaggtactaaggacccaaggcatacagattcacaaaattaactaatctttttgcctcagaataccaaaacaacaaaattataaagctgtatttggacaactaaaaaacaccaaactatctcattgcaatttgtattttagcagatttcagcaactatcctaaacaatgttattgtgttccattttaactgggataaatgtttttgtaaaaatacaaccatagaaaggcctctttgttacaaaatgatttgcaaagaaataactgctttgtttgcaagattaaattagtgttggcaaaataaagttctaaagataatactaaacactttatgcttatcagccaatatctacataagctaaaattgaatacagttcctttataatttgaatgacaggttttaacatcttctttaaaaccttaaaaatcactttttcgttaatgtattattt

SEQ ID NO: 72772 - DNA, 2575 bp, Homo sapiens
tgaccaagaacacaagcatcttaatttgaatccacaaagtttcatgtaatgaaaagaaatacataattttaattcaacccgagtgttttccaagaagattgtatttgcttaaattgctacagtaattcaagagacagccctgtctggacacagagttactgtggatttttaagagactcagttaaagaatttaggaatttctgattcatttaaaggatttacaaattcatcaacccctgaaaactaaagcaaattgaacaggaaaaaaaaaaagaagatgggttttttaagtccaatatatgttattttcttcttttttggagtcaaagtacattgccaatatgaaacttatcagtgggatgaagactatgaccaagagccagatgatgattaccaaacaggattcccatttcgtcaaaatgtagactacggagttccttttcatcagtatactttaggctgtgtcagtgaatgcttctgtccaactaactttccatcatcaatgtactgtgataatcgcaaactcaagactatcccaaatattccgatgcacattcagcaactctaccttcagttcaatgaaattgaggctgtgactgcaaattcattcatcaatgcaactcatcttaaagaaattaacctcagccacaacaaaattaaatctcaaaagattgattatggtgtgtttgctaagcttccaaatctactacaacttcatctagagcataataatttagaagaatttccatttcctcttcctaaatctctggaaagactccttcttggttacaatgaaatctccaaactgcagacaaatgctatggatgggctagtaaacttgaccatgcttgatctctgttataattatcttcatgattctctgctaaaagacaaaatctttgccaaaatggaaaaactaatgcagctcaacctctgcagtaacagattagaatcaatgcctcctggtttgccttcttcacttatgtatctgtctttagaaaataattcaatttcttctatacccgaaaaatacttcgacaaacttccaaaacttcatactctaagaatgtcacacaacaaactacaagacatcccatataatatttttaatcttcccaacattgtagaactcagtgttggacacaacaaattgaagcaagcattctatattccaagaaatttggaacacctatacctacaaaataatgaaatagaaaagatgaatcttacagtgatgtgtccttctattgacccactacattaccaccatttaacatacattcgtgtggaccaaaataaactaaaagaaccaataagctcatacatcttcttctgcttccctcatatacacactatttattatggtgaacaacgaagcactaatggtcaaacaatacaactaaagacacaagttttcaggagatttccagatgatgatgatgaaagtgaagatcacgatgatcctgacaatgctcatgagagcccagaacaagaaggagcagaagggcactttgaccttcattattatgaaaatcaagaatagcaagaaactatataggtatacacttacgacttcacaaaacctatacttaatatagtaaatctaagtaaacatgtattactcaaagtaatatatttagaattatgtattagtataagatcagaattgaatttaagttgttggtgacatctgcatcatttcataggattagaacttactcaaaataatgtaaatctttaaaaatataaattagaatgacaagtgggaatcataaattaaacgttaatggtttcttatgctctttttaaatatagaaatatcatgttaaagaaagtgagtgtatcatttctattaacagtaatttttctaaaaatgaggaaggaagtagcattagcagtaaagacccacaggccatgacctttttgatcactctgaggacaatatttaaatgacaggaaggtatattaatgtaacaagcattcatttaaggaatagaccattttctctgacctcttcttcaggaaagctttcacactggtatttgtgatctcaccattatgacatccatccccctagctcaccacatagcacatagaatgatatttttgatttgtaagaggccatccaggtactaaggacccaaggcatacagattcacaaaattaactaatctttttgcctcagaataccaaaacaacaaaattataaagctgtatttggacaactaaaaaacaccaaactatctcattgcaatttgtattttagcagatttcagcaactatcctaaacaatgttattgtgttccattttaactgggataaatgtttttgtaaaaatacaaccatagaaaggcctctttgttacaaaatgatttgcaaagaaataactgctttgtttgcaagattaaattagtgttggcaaaataaagttctaaagataatactaaacactttatgcttatcagccaatatctacataagctaaaattgaatacagttcctttataatttgaatgacaggttttaacatcttctttaaaaccttaaaaatcactttttcgttaatgtattattt

SEQ ID NO: 72773 - DNA, 2509 bp, Homo sapiens
  misc_feature (2420)..(2421): n is a, c, g, or t
  misc_feature (2463)..(2463): n is a, c, g, or t
tgaccaagaacacaagcatcttaatttgaatccacaaagtttcatgtaatgaaaagaaatacataattttaattcaacccgagtgttttccaagaagattgtatttgcttaaattgctacagtaattcaagagacagccctgtctggacacagagttactgtggatttttaagagactcagttaaagaatttaggaatttctgattcatttaaaggatttacaaattcatcaacccctgaaaactaaagcaaattgaacaggaaaaaaaaaaagaagatgggttttttaagtccaatatatgttattttcttcttttttggagtcaaagtacattgccaatatgaaacttatcagtgggatgaagactatgaccaagagccagatgatgattaccaaacaggattcccatttcgtcaaaatgtagactacggagttccttttcatcagtatactttaggctgtgtcagtgaatgcttctgtccaactaactttccatcatcaatgtactgtgataatcgcaaactcaagactatcccaaatattccgatgcacattcagcaactctaccttcagttcaatgaaattgaggctgtgactgcaaattcattcatcaatgcaactcatcttaaagaaattaacctcagccacaacaaaattaaatctcaaaagattgattatggtgtgtttgctaagcttccaaatctactacaacttcatctagagcataataatttagaagaatttccatttcctcttcctaaatctctggaaagactccttcttggttacaatgaaatctccaaactgcagacaaatgctatggatgggctagtaaacttgaccatgcttgatctctgttataattatcttcatgattctctgctaaaagacaaaatctttgccaaaatggaaaaactaatgcagctcaacctctgcagtaacagattagaatcaatgcctcctggtttgccttcttcacttatgtatctgtctttagaaaataattcaatttcttctatacccgaaaaatacttcgacaaacttccaaaacttcatactctaagaatgtcacacaacaaactacaagacatcccatataatatttttaatcttcccaacattgtagaactcagtgttggacacaacaaattgaagcaagcattctatattccaagaaatttggaacacctatacctacaaaataatgaaatagaaaagatgaatcttacagtgatgtgtccttctattgacccactacattaccaccatttaacatacattcgtgtggaccaaaataaactaaaagaaccaataagctcatacatcttcttctgcttccctcatatacacactatttattatggtgaacaacgaagcactaatggtcaaacaatacaactaaagacacaagttttcaggagatttccagatgatgatgatgaaagtgaagatcacgatgatcctgacaatgctcatgagagcccagaacaagaaggagcagaagggcactttgaccttcattattatgaaaatcaagaatagcaagaaactatataggtatacacttacgacttcacaaaacctatacttaatatagtaaatctaagtaaacatgtattactcaaagtaatatatttagaattatgtattagtataagatcagaattgaatttaagttgttggtgacatctgcatcatttcataggattagaacttactcaaaataatgtaaatctttaaaaatataaattagaatgacaagtgggaatcataaattaaacgttaatggtttcttatgctctttttaaatatagaaatatcatgttaaagaaagtgagtgtatcatttctattaacagtaatttttctaaaaatgaggaaggaagtagcattagcagtaaagacccacaggccatgacctttttgatcactctgaggacaatatttaaatgacaggaaggtatattaatgtaacaagcattcatttaaggaatagaccattttctctgacctcttcttcaggaaagctttcacactggtatttgtgatctcaccattatgacatccatccccctagctcaccacatagcacatagaatgatatttttgatttgtaagaggccatccaggtactaaggacccaaggcatacagattcacaaaattaactaatctttttgcctcagaataccaaaacaacaaaattataaagctgtatttggacaactaaaaaacaccaaactatctcattgcaatttgtattttagcagatttcagcaactatcctaaacaatgttattgtgttccattttaactgggataaatgtttttgtaaaaatacaaccatagaaaggcctctttgttacaaaatgatttgcaaagaaataactgcttttggttttgcaaggaatttaaaattanntggtttgggccaaaaattaaaagttccttaaaggattaattnccttaaaaccactttttatggccttaatcaggcccaaatattctta

SEQ ID NO: 72774 - DNA, 819 bp, Homo sapiens
ggtctccatctcctgacctcatgatgtgcccacttcggccttccaaagtggccgcaaagtggcccacttcggccaaagtgcacttcggccttccaaagtgcattacaggcgtgagccaccacgcccggcctggcctttttttttattattagtttttatgtgggagaacacagagtttcgcactacggatggcgccagggctgggagtggcaggggcgcaatcgtggggtatcactggacaacttgcgggccctcctataggctaacaaagcagagtcatcactgtgcgcgtcacgtcgctctccacaagataggtagggagattatcacggggcattgcatccaccctatgtgccagtggaaataaattatgatctcatatatgttagtgaggatagagacagagcaggagaattaacaactacagtgtgtggagccaagcgacgagagtatatggcagaaaaggtcgcgtggaccacaaaagtgggtgggataccaaggcgagaaactttgtggggcaccatcaagataatagtgagtgacatttgtggggataaaatatgtagaagataggattaattatacagagcgactcatgagagtcgccagtcttcgcgacaaagccaaacacccagtgaaacagagggggcaactaggcaagagctggatctccacatatacacattgtatacatcacagccccaaaagggggggcacgagacacacgcggtaaaagcggtgagtgattgggcaacaaccaaggagccgacccatgcgagggagagacgagagagaagcaacacacaccgccagggcccg

SEQ ID NO: 72775 - DNA, 1481 bp, Homo sapiens
ggtctccatctcctgacctcatgatgtgcccacttcggccttccaaagtggccgcaaagtggcccacttcggccaaagtgcacttcggccttccaaagtgcattacaggcgtgagccaccacgcccggcctggccttttttttttttttttttgagacacagtttcactcgttgcccaggctggagtgcagtggcgcaatctcggctcactgcaacttctgcctcctaggttcaagcagttctcctgcctcagcctcccaagtagttgggattacgggcatgcaccaccatgcctggataattttttcttatttttagtagagacaggatttcatcatgttggccatgctggtttcgaactcctgaccacatgtggtccacccaccttggcctcaattatgtgcattttggtatatttacttgtatttcaacatcttgtgagtttgaaaaacctgaaaggccagaatgcttccttttatttctcaccatttgggcagcacctaagtggttttgtaaaatgcagcatctggtgctgtgggtctctctcaggccttgagggacacttccttcctccccactcgcctcctctccactagactttggttcctagagggcgtggggccgggtctgaggttcttgcctgccttccctcccattggtctttggttgctcatccctctaactgcaccccttcttggtccttcctccacagacttcagataatagataagtcattagcaaaccagaccgaatctttagggtgaagagctccccaaagccatctggtgaggtcattgtggggaccagggactgattatttgtcacctggatcacaaagatgggactgtctgctcaggctggtggtgacaggatcctgacccgtggtcctctcccgctccctctgctccaccaggacacatgtataggacactgtgctgtgtgcagtggagaaatctccctgggccaggggaaagttcagacagtgcctctagattgtgttttgcctcctccaatgtagagttgacatctggaccccagagcccagcagggctttctgtcagacatgctagggtggtagaaatgggccctccaggtccccctgcagtgcactgggcagagacctccggaaagccggcagcgggagcgcttcctgggcagcttcccccagcacagtgttcccaaaccagtccatccggaaaacagtctgtacagcaaatgctgtgtgagatcttaggcttttcactttttttgttttgttttgtttttgaaagaaagaaaaaaatacaattaacaagcctcttttgtaaatgggtttcctttctatgtataaaatcgtggtggtcccttgtttttacatgttcatgctgtgtaattttgagatgttactgagatatgttctgaacataatgtgcatttttttctgtacagatgaaatgggagaatttaataaagagtttgcaggtttttacttgttaaatctt

SEQ ID NO: 72776 - DNA, 733 bp, Homo sapiens
agccagcccttgccgtggccggagccgagcggcgcatccgggccggagaagaggacgacgacgaggtcctcgaagtggacccgtttgcgaagcgccagggagaaggaggagcggacgcatcgtagaaaggggtggtggcgcccgaccccgcgccccggcccgaagctctgagggcttcccggcccccactgcctgcggcatggcccggggctcggcgctcccgcggcggccgctgctgtgcatcccggccgtctgggcggccgccgcgcttctgctctcagtgtcccggacttcaggtgaagtggaggttctggatccgaacgaccctttaggaccccttgatgggcaggacggcccgattccaactctgaaaggttactttctgaattttctggagccagtaaacaatatcaccattgtccaaggccagacggcaattctgcactgcaaggtggcaggaaacccaccccctaacgtgcggtggctaaagaatgatgccccggtggtgcaggagccgcggcggatcatcatccggaagacagaatatggttcacgactgcgaatccaggacctggacacgacagacactggctactaccagtgcgtggccaccaacgggatgaagaccattaccgccactggcgtcctgtttgtgcggctgggtccaacgcacagcccaaatcataactttcaagatggggtctcactatgctgtccagattctggtgacaaa

SEQ ID NO: 72777 - DNA, 4092 bp, Homo sapiens
agccagcccttgccgtggccggagccgagcggcgcatccgggccggagaagaggacgacgacgaggtcctcgaagtggacccgtttgcgaagcgccagggagaaggaggagcggacgcatcgtagaaaggggtggtggcgcccgaccccgcgccccggcccgaagctctgagggcttcccggcccccactgcctgcggcatggcccggggctcggcgctcccgcggcggccgctgctgtgcatcccggccgtctgggcggccgccgcgcttctgctctcagtgtcccggacttcaggtgaagtggaggttctggatccgaacgaccctttaggaccccttgatgggcaggacggcccgattccaactctgaaaggttactttctgaattttctggagccagtaaacaatatcaccattgtccaaggccagacggcaattctgcactgcaaggtggcaggaaacccaccccctaacgtgcggtggctaaagaatgatgccccggtggtgcaggagccgcggcggatcatcatccggaagacagaatatggttcacgactgcgaatccaggacctggacacgacagacactggctactaccagtgcgtggccaccaacgggatgaagaccattaccgccactggcgtcctgtttgtgcggctgggtccaacgcacagcccaaatcataactttcaggatgattaccacgaggatgggttctgccagccttaccggggaattgcctgtgcacgcttcattggcaaccggaccatttatgtggactcgcttcagatgcagggggagattgaaaaccgaatcacagcggccttcaccatgatcggcacgtctacgcacctgtcggaccagtgctcacagttcgccatcccatccttctgccacttcgtgtttcctctgtgcgacgcgcgctcccgggcacccaagccgcgtgagctgtgccgcgacgagtgcgaggtgctggagagcgacctgtgccgccaggagtacaccatcgcccgctccaacccgctcatcctcatgcggcttcagctgcccaagtgtgaggcgctgcccatgcctgagagccccgacgctgccaactgcatgcgcattggcatcccagccgagaggctgggccgctaccatcagtgctataacggctcaggcatggattacagaggaacggcaagcaccaccaagtcaggccaccagtgccagccgtgggccctgcagcacccccacagccaccacctgtccagcacagacttccctgagcttggaggggggcacgcctactgccggaaccccggaggccagatggagggcccctggtgctttacgcagaataaaaacgtacgcatggaactgtgtgacgtaccctcgtgtagtccccgagacagcagcaagatggggattctgtacatcttggtccccagcatcgcaattccactggtcatcgcttgccttttcttcttggtttgcatgtgccggaataagcagaaggcatctgcgtccacaccgcagcggcgacagctgatggcctcgcccagccaagacatggaaatgcccctcattaaccagcacaaacaggccaaactcaaagagatcagcctgtctgcggtgaggttcatggaggagctgggagaggaccggtttgggaaagtctacaaaggtcacctgttcggccctgccccgggggagcagacccaggctgtggccatcaaaacgctgaaggacaaagcggaggggcccctgcgggaggagttccggcatgaggctatgctgcgagcacggctgcaacaccccaacgtcgtctgcctgctgggcgtggtgaccaaggaccagcccctgagcatgatcttcagctactgttcgcacggcgacctccacgaattcctggtcatgcgctcgccgcactcggacgtgggcagcaccgatgatgaccgcacggtgaagtccgccctggagccccccgacttcgtgcaccttgtggcacagatcgcggcggggatggagtacctatccagccaccacgtggttcacaaggacctggccacccgcaatgtgctagtgtacgacaagctgaacgtgaagatctcagacttgggcctcttccgagaggtgtatgccgccgattactacaagctgctggggaactcgctgctgcctatccgctggatggccccagaggccatcatgtacggcaagttctccatcgactcagacatctggtcctacggtgtggtcctgtgggaggtcttcagctacggcctgcagccctactgcgggtactccaaccaggatgtggtggagatgatccggaaccggcaggtgctgccttgccccgatgactgtcccgcctgggtgtatgccctcatgatcgagtgctggaacgagttccccagccggcggccccgcttcaaggacatccacagccggctccgagcctggggcaacctttccaactacaacagctcggcgcagacctcgggggccagcaacaccacgcagaccagctccctgagcaccagcccagtgagcaatgtgagcaacgcccgctacgtggggcccaagcagaaggccccgcccttcccacagccccagttcatccccatgaagggccagatcagacccatggtgcccccgccgcagctctacgtccccgtcaacggctaccagccggtgccggcctatggggcctacctgcccaacttctacccggtgcagatcccaatgcagatggccccgcagcaggtgcctcctcagatggtccccaagcccagctcacaccacagtggcagtggctccaccagcacaggctacgtcaccacggccccctccaacacatccatggcagacagggcagccctgctctcagagggcgctgatgacacacagaacgccccagaagatggggcccagagcaccgtgcaggaagcagaggaggaggaggaaggctctgtcccagagactgagctgctgggggactgtgacactctgcaggtggacgaggcccaagtccagctggaagcttgagtggcaccagggcccggggttcggggatagaagccccgccgagaccccacagggacctcagtcacctttgagaagacaccatactcagcaatcacaagagcccgccggccagtgggcttgtttgcagactgggtgaggtggagccctgctcctctctgtcctctgacacagagagctgccctgcctaggagcacccaagccaggcagggggtctggcagcacggcgtcctggggagcaggacacatggtcatccccagggctgtatacattgattctggtggtagactggtagtgagcagcaaatgcctttcaagaaaataggtggcagcttcactccatgtcatatatggagtgaatatttcaaaacgttgggaataagggcctgcaaaaggcagcgaggaggcacctcgggtcttgaggttcctgacaaccgatctggtctgttggtttgaggatgaaggggctccatttctgctgcctccctgctgagaatattctccctttagcagccaaagattcgctggaacggaggctgccctctgctgcctgttggggtcggaagacaaggggcttctgaaatgggagttcctgagatacaacaaaatgtgtgccttcaaagaaactgacagctttgtatttggtgaaatggttttaattatactccatgtgtattttgcccactttttttgggaattcaagggaaagtgtttcttgggtttggaatgttcagaggaagcagtattgtacagaacacggtattgttatttttgttaagaatcatgtacagagcttaaatgtaatttatatgtttttaatatgccattttcattgaagtattttggtcttaagatgactttagtaatttaactgtttatgttacccacgttgggatccagttggtcttggtttgcttctctctgtaccacgtgcacatgaggtccattcattttacagcccctgttacacacagacccacaggcagccgtctgtgcccgcacacattgttggtcctatttgtaaatcccacacccggtgtatccaataaagtgaaaccaacccc

SEQ ID NO: 72778 - DNA, 572 bp, Homo sapiens
agccagcccttgccgtggccggagccgagcggcgcatccgggccggagaagaggacgacgacgaggtcctcgaagtggacccgtttgcgaagcgccagggagaaggaggagcggacgcatcgtagaaaggggtggtggcgcccgaccccgcgccccggcccgaagctctgagggcttcccggcccccactgcctgcggcatggcccggggctcggcgctcccgcggcggccgctgctgtgcatcccggccgtctgggcggccgccgcgcttctgctctcagtgtcccggacttcaggagccacacaggacagttgacccaacacttctgccacctgaagaacgacacctgcattcctccatctctgggaccaccaaggaactcagggagcttggaatctctcagatcaaaaagatactgactcatcggatagccatgccatcctgaaaacggccttccttgtgtgtacattatttgcaacaagcaacaagtttataagcactttggtaaaattgcatgtgagggttaaaatattaaagtcagtgcgtcaacttgaaataaatgatgagttat

SEQ ID NO: 72779 - DNA, 4334 bp, Homo sapiens
gggtggaggagggcgggcggggccttcaggcccaggagcgccagagacctatggggttcgcctgaagcccccggaatgtgtgagacacttcttactagtaaatgggcttcagtatcccccatccctgcactcctgcaggaaggtgagaatcgggacagtcgcaggctgggagacgctctgcttttcctgcgtcctgctgggagctgcgcgctccaggtatcctggcctgccgccctagccggcccaaggagccacacaggacagttgacccaacacttctgccacctgaagaacgacacctgcattcctccatctctgggaccaccaaggaactcagggagcttggaatctctcagatcaaaaagatactgactcatcggatagccatgccatcctgaaaacggccttcctttgaagaaaatgtgagtgggaaacatgaagagtgatgaaatgaacaagttgagtgactcccaccctgttgaagagattgaacttcatccccagttcctgtgaagctttctggatctcgtcttccaaggtgaagtggaggttctggatccgaacgaccctttaggaccccttgatgggcaggacggcccgattccaactctgaaaggttactttctgaattttctggagccagtaaacaatatcaccattgtccaaggccagacggcaattctgcactgcaaggtggcaggaaacccaccccctaacgtgcggtggctaaagaatgatgccccggtggtgcaggagccgcggcggatcatcatccggaagacagaatatggttcacgactgcgaatccaggacctggacacgacagacactggctactaccagtgcgtggccaccaacgggatgaagaccattaccgccactggcgtcctgtttgtgcggctgggtccaacgcacagcccaaatcataactttcaggatgattaccacgaggatgggttctgccagccttaccggggaattgcctgtgcacgcttcattggcaaccggaccatttatgtggactcgcttcagatgcagggggagattgaaaaccgaatcacagcggccttcaccatgatcggcacgtctacgcacctgtcggaccagtgctcacagttcgccatcccatccttctgccacttcgtgtttcctctgtgcgacgcgcgctcccgggcacccaagccgcgtgagctgtgccgcgacgagtgcgaggtgctggagagcgacctgtgccgccaggagtacaccatcgcccgctccaacccgctcatcctcatgcggcttcagctgcccaagtgtgaggcgctgcccatgcctgagagccccgacgctgccaactgcatgcgcattggcatcccagccgagaggctgggccgctaccatcagtgctataacggctcaggcatggattacagaggaacggcaagcaccaccaagtcaggccaccagtgccagccgtgggccctgcagcacccccacagccaccacctgtccagcacagacttccctgagcttggaggggggcacgcctactgccggaaccccggaggccagatggagggcccctggtgctttacgcagaataaaaacgtacgcatggaactgtgtgacgtaccctcgtgtagtccccgagacagcagcaagatggggattctgtacatcttggtccccagcatcgcaattccactggtcatcgcttgccttttcttcttggtttgcatgtgccggaataagcagaaggcatctgcgtccacaccgcagcggcgacagctgatggcctcgcccagccaagacatggaaatgcccctcattaaccagcacaaacaggccaaactcaaagagatcagcctgtctgcggtgaggttcatggaggagctgggagaggaccggtttgggaaagtctacaaaggtcacctgttcggccctgccccgggggagcagacccaggctgtggccatcaaaacgctgaaggacaaagcggaggggcccctgcgggaggagttccggcatgaggctatgctgcgagcacggctgcaacaccccaacgtcgtctgcctgctgggcgtggtgaccaaggaccagcccctgagcatgatcttcagctactgttcgcacggcgacctccacgaattcctggtcatgcgctcgccgcactcggacgtgggcagcaccgatgatgaccgcacggtgaagtccgccctggagccccccgacttcgtgcaccttgtggcacagatcgcggcggggatggagtacctatccagccaccacgtggttcacaaggacctggccacccgcaatgtgctagtgtacgacaagctgaacgtgaagatctcagacttgggcctcttccgagaggtgtatgccgccgattactacaagctgctggggaactcgctgctgcctatccgctggatggccccagaggccatcatgtacggcaagttctccatcgactcagacatctggtcctacggtgtggtcctgtgggaggtcttcagctacggcctgcagccctactgcgggtactccaaccaggatgtggtggagatgatccggaaccggcaggtgctgccttgccccgatgactgtcccgcctgggtgtatgccctcatgatcgagtgctggaacgagttccccagccggcggccccgcttcaaggacatccacagccggctccgagcctggggcaacctttccaactacaacagctcggcgcagacctcgggggccagcaacaccacgcagaccagctccctgagcaccagcccagtgagcaatgtgagcaacgcccgctacgtggggcccaagcagaaggccccgcccttcccacagccccagttcatccccatgaagggccagatcagacccatggtgcccccgccgcagctctacgtccccgtcaacggctaccagccggtgccggcctatggggcctacctgcccaacttctacccggtgcagatcccaatgcagatggccccgcagcaggtgcctcctcagatggtccccaagcccagctcacaccacagtggcagtggctccaccagcacaggctacgtcaccacggccccctccaacacatccatggcagacagggcagccctgctctcagagggcgctgatgacacacagaacgccccagaagatggggcccagagcaccgtgcaggaagcagaggaggaggaggaaggctctgtcccagagactgagctgctgggggactgtgacactctgcaggtggacgaggcccaagtccagctggaagcttgagtggcaccagggcccggggttcggggatagaagccccgccgagaccccacagggacctcagtcacctttgagaagacaccatactcagcaatcacaagagcccgccggccagtgggcttgtttgcagactgggtgaggtggagccctgctcctctctgtcctctgacacagagagctgccctgcctaggagcacccaagccaggcagggggtctggcagcacggcgtcctggggagcaggacacatggtcatccccagggctgtatacattgattctggtggtagactggtagtgagcagcaaatgcctttcaagaaaataggtggcagcttcactccatgtcatatatggagtgaatatttcaaaacgttgggaataagggcctgcaaaaggcagcgaggaggcacctcgggtcttgaggttcctgacaaccgatctggtctgttggtttgaggatgaaggggctccatttctgctgcctccctgctgagaatattctccctttagcagccaaagattcgctggaacggaggctgccctctgctgcctgttggggtcggaagacaaggggcttctgaaatgggagttcctgagatacaacaaaatgtgtgccttcaaagaaactgacagctttgtatttggtgaaatggttttaattatactccatgtgtattttgcccactttttttgggaattcaagggaaagtgtttcttgggtttggaatgttcagaggaagcagtattgtacagaacacggtattgttatttttgttaagaatcatgtacagagcttaaatgtaatttatatgtttttaatatgccattttcattgaagtattttggtcttaagatgactttagtaatttaactgtttatgttacccacgttgggatccagttggtcttggtttgcttctctctgtaccacgtgcacatgaggtccattcattttacagcccctgttacacacagacccacaggcagccgtctgtgcccgcacacattgttggtcctatttgtaaatcccacacccggtgtatccaataaagtgaaaccaacccc

SEQ ID NO: 72780 - DNA, 3434 bp, Homo sapiens
ccatgattctgaggcctccacagccatgtggaactggatgattaccacgaggatgggttctgccagccttaccggggaattgcctgtgcacgcttcattggcaaccggaccatttatgtggactcgcttcagatgcagggggagattgaaaaccgaatcacagcggccttcaccatgatcggcacgtctacgcacctgtcggaccagtgctcacagttcgccatcccatccttctgccacttcgtgtttcctctgtgcgacgcgcgctcccgggcacccaagccgcgtgagctgtgccgcgacgagtgcgaggtgctggagagcgacctgtgccgccaggagtacaccatcgcccgctccaacccgctcatcctcatgcggcttcagctgcccaagtgtgaggcgctgcccatgcctgagagccccgacgctgccaactgcatgcgcattggcatcccagccgagaggctgggccgctaccatcagtgctataacggctcaggcatggattacagaggaacggcaagcaccaccaagtcaggccaccagtgccagccgtgggccctgcagcacccccacagccaccacctgtccagcacagacttccctgagcttggaggggggcacgcctactgccggaaccccggaggccagatggagggcccctggtgctttacgcagaataaaaacgtacgcatggaactgtgtgacgtaccctcgtgtagtccccgagacagcagcaagatggggattctgtacatcttggtccccagcatcgcaattccactggtcatcgcttgccttttcttcttggtttgcatgtgccggaataagcagaaggcatctgcgtccacaccgcagcggcgacagctgatggcctcgcccagccaagacatggaaatgcccctcattaaccagcacaaacaggccaaactcaaagagatcagcctgtctgcggtgaggttcatggaggagctgggagaggaccggtttgggaaagtctacaaaggtcacctgttcggccctgccccgggggagcagacccaggctgtggccatcaaaacgctgaaggacaaagcggaggggcccctgcgggaggagttccggcatgaggctatgctgcgagcacggctgcaacaccccaacgtcgtctgcctgctgggcgtggtgaccaaggaccagcccctgagcatgatcttcagctactgttcgcacggcgacctccacgaattcctggtcatgcgctcgccgcactcggacgtgggcagcaccgatgatgaccgcacggtgaagtccgccctggagccccccgacttcgtgcaccttgtggcacagatcgcggcggggatggagtacctatccagccaccacgtggttcacaaggacctggccacccgcaatgtgctagtgtacgacaagctgaacgtgaagatctcagacttgggcctcttccgagaggtgtatgccgccgattactacaagctgctggggaactcgctgctgcctatccgctggatggccccagaggccatcatgtacggcaagttctccatcgactcagacatctggtcctacggtgtggtcctgtgggaggtcttcagctacggcctgcagccctactgcgggtactccaaccaggatgtggtggagatgatccggaaccggcaggtgctgccttgccccgatgactgtcccgcctgggtgtatgccctcatgatcgagtgctggaacgagttccccagccggcggccccgcttcaaggacatccacagccggctccgagcctggggcaacctttccaactacaacagctcggcgcagacctcgggggccagcaacaccacgcagaccagctccctgagcaccagcccagtgagcaatgtgagcaacgcccgctacgtggggcccaagcagaaggccccgcccttcccacagccccagttcatccccatgaagggccagatcagacccatggtgcccccgccgcagctctacgtccccgtcaacggctaccagccggtgccggcctatggggcctacctgcccaacttctacccggtgcagatcccaatgcagatggccccgcagcaggtgcctcctcagatggtccccaagcccagctcacaccacagtggcagtggctccaccagcacaggctacgtcaccacggccccctccaacacatccatggcagacagggcagccctgctctcagagggcgctgatgacacacagaacgccccagaagatggggcccagagcaccgtgcaggaagcagaggaggaggaggaaggctctgtcccagagactgagctgctgggggactgtgacactctgcaggtggacgaggcccaagtccagctggaagcttgagtggcaccagggcccggggttcggggatagaagccccgccgagaccccacagggacctcagtcacctttgagaagacaccatactcagcaatcacaagagcccgccggccagtgggcttgtttgcagactgggtgaggtggagccctgctcctctctgtcctctgacacagagagctgccctgcctaggagcacccaagccaggcagggggtctggcagcacggcgtcctggggagcaggacacatggtcatccccagggctgtatacattgattctggtggtagactggtagtgagcagcaaatgcctttcaagaaaataggtggcagcttcactccatgtcatatatggagtgaatatttcaaaacgttgggaataagggcctgcaaaaggcagcgaggaggcacctcgggtcttgaggttcctgacaaccgatctggtctgttggtttgaggatgaaggggctccatttctgctgcctccctgctgagaatattctccctttagcagccaaagattcgctggaacggaggctgccctctgctgcctgttggggtcggaagacaaggggcttctgaaatgggagttcctgagatacaacaaaatgtgtgccttcaaagaaactgacagctttgtatttggtgaaatggttttaattatactccatgtgtattttgcccactttttttgggaattcaagggaaagtgtttcttgggtttggaatgttcagaggaagcagtattgtacagaacacggtattgttatttttgttaagaatcatgtacagagcttaaatgtaatttatatgtttttaatatgccattttcattgaagtattttggtcttaagatgactttagtaatttaactgtttatgttacccacgttgggatccagttggtcttggtttgcttctctctgtaccacgtgcacatgaggtccattcattttacagcccctgttacacacagacccacaggcagccgtctgtgcccgcacacattgttggtcctatttgtaaatcccacacccggtgtatccaataaagtgaaaccaacccc

SEQ ID NO: 72781 - DNA, 723 bp, Homo sapiens
agccagcccttgccgtggccggagccgagcggcgcatccgggccggagaagaggacgacgacgaggtcctcgaagtggacccgtttgcgaagcgccagggagaaggaggagcggacgcatcgtagaaaggggtggtggcgcccgaccccgcgccccggcccgaagctctgagggcttcccggcccccactgcctgcggcatggcccggggctcggcgctcccgcggcggccgctgctgtgcatcccggccgtctgggcggccgccgcgcttctgctctcagtgtcccggacttcaggtgaagtggaggttctggatccgaacgaccctttaggaccccttgatgggcaggacggcccgattccaactctgaaaggttactttctgaattttctggagccagtaaacaatatcaccattgtccaaggccagacggcaattctgcactgcaaggtggcaggaaacccaccccctaacgtgcggtggctaaagaatgatgccccggtggtccaacgcacagcccaaatcataactttcagtaagtatctgttttccccaagccatgttctgctgctctgagggtttttgttatgtaggaatccggggtttaaatcctgccagctcatgtctttgccgaatttgctagaagttggctgggcttcacacaggggtggccacgtgcttgcttagggttgggaaacatttacatttttcatgtttcttgt

SEQ ID NO: 72782 - DNA, 582 bp, Homo sapiens
ctgatgttgggagtggggacaaaggataggaaaagggctgggcagcaggagggatcacctaccatggaggacaaagaccttgccctcaagtgtccctcccattcatggagtaccagctcagttctactcagtgcagacaggcagcagaacagcagcttggggagagcaggaaagaatcagctgccaatgttgtagtggagacggatttcagggcctgatgagggtccaagtatggactgcaattgggatgcatgagaacatcctcaaaccctggaataggaaggcacccatgtgccctgatttctcctcggctctcattccaggagccacacaggacagttgacccaacacttctgccacctgaagaacgacacctgcattcctccatctctgggaccaccaaggaactcagggagcttggaatctctcagatcaaaaagatactgactcatcggatagccatgccatcctgaaaacggccttccttgtgtgtacattatttgcaacaagcaacaagtttataagcactttggtaaaattgcatgtgagggttaaaatattaaagtcagtgcgtcaacttga

SEQ ID NO: 72783 - DNA, 524 bp, Homo sapiens
gggtggaggagggcgggcggggccttcaggcccaggagcgccagagacctatggggttcgcctgaagcccccggaatgtgtgagacacttcttactagtaaatgggcttcagtatcccccatccctgcactcctgcaggaaggtgagaatcgggacagtcgcaggctgggagacgctctgcttttcctgcgtcctgctgggagctgcgcgctccaggtatcctggcctgccgccctagccggcccaaggagccacacaggacagttgacccaacacttctgccacctgaagaacgacacctgcattcctccatctctgggaccaccaaggaactcagggagcttggaatctctcagatcaaaaagatactgactcatcggatagccatgccatcctgaaaacggccttccttgtgtgtacattatttgcaacaagcaacaagtttataagcactttggtaaaattgcatgtgagggttaaaatattaaagtcagtgcgtcaacttgaaataaatgatgagttat

SEQ ID NO: 72784 - DNA, 4044 bp, Homo sapiens
gggtggaggagggcgggcggggccttcaggcccaggagcgccagagacctatggggttcgcctgaagcccccggaatgtgtgagacacttcttactagtaaatgggcttcagtatcccccatccctgcactcctgcaggaaggtgagaatcgggacagtcgcaggctgggagacgctctgcttttcctgcgtcctgctgggagctgcgcgctccaggtatcctggcctgccgccctagccggcccaaggtgaagtggaggttctggatccgaacgaccctttaggaccccttgatgggcaggacggcccgattccaactctgaaaggttactttctgaattttctggagccagtaaacaatatcaccattgtccaaggccagacggcaattctgcactgcaaggtggcaggaaacccaccccctaacgtgcggtggctaaagaatgatgccccggtggtgcaggagccgcggcggatcatcatccggaagacagaatatggttcacgactgcgaatccaggacctggacacgacagacactggctactaccagtgcgtggccaccaacgggatgaagaccattaccgccactggcgtcctgtttgtgcggctgggtccaacgcacagcccaaatcataactttcaggatgattaccacgaggatgggttctgccagccttaccggggaattgcctgtgcacgcttcattggcaaccggaccatttatgtggactcgcttcagatgcagggggagattgaaaaccgaatcacagcggccttcaccatgatcggcacgtctacgcacctgtcggaccagtgctcacagttcgccatcccatccttctgccacttcgtgtttcctctgtgcgacgcgcgctcccgggcacccaagccgcgtgagctgtgccgcgacgagtgcgaggtgctggagagcgacctgtgccgccaggagtacaccatcgcccgctccaacccgctcatcctcatgcggcttcagctgcccaagtgtgaggcgctgcccatgcctgagagccccgacgctgccaactgcatgcgcattggcatcccagccgagaggctgggccgctaccatcagtgctataacggctcaggcatggattacagaggaacggcaagcaccaccaagtcaggccaccagtgccagccgtgggccctgcagcacccccacagccaccacctgtccagcacagacttccctgagcttggaggggggcacgcctactgccggaaccccggaggccagatggagggcccctggtgctttacgcagaataaaaacgtacgcatggaactgtgtgacgtaccctcgtgtagtccccgagacagcagcaagatggggattctgtacatcttggtccccagcatcgcaattccactggtcatcgcttgccttttcttcttggtttgcatgtgccggaataagcagaaggcatctgcgtccacaccgcagcggcgacagctgatggcctcgcccagccaagacatggaaatgcccctcattaaccagcacaaacaggccaaactcaaagagatcagcctgtctgcggtgaggttcatggaggagctgggagaggaccggtttgggaaagtctacaaaggtcacctgttcggccctgccccgggggagcagacccaggctgtggccatcaaaacgctgaaggacaaagcggaggggcccctgcgggaggagttccggcatgaggctatgctgcgagcacggctgcaacaccccaacgtcgtctgcctgctgggcgtggtgaccaaggaccagcccctgagcatgatcttcagctactgttcgcacggcgacctccacgaattcctggtcatgcgctcgccgcactcggacgtgggcagcaccgatgatgaccgcacggtgaagtccgccctggagccccccgacttcgtgcaccttgtggcacagatcgcggcggggatggagtacctatccagccaccacgtggttcacaaggacctggccacccgcaatgtgctagtgtacgacaagctgaacgtgaagatctcagacttgggcctcttccgagaggtgtatgccgccgattactacaagctgctggggaactcgctgctgcctatccgctggatggccccagaggccatcatgtacggcaagttctccatcgactcagacatctggtcctacggtgtggtcctgtgggaggtcttcagctacggcctgcagccctactgcgggtactccaaccaggatgtggtggagatgatccggaaccggcaggtgctgccttgccccgatgactgtcccgcctgggtgtatgccctcatgatcgagtgctggaacgagttccccagccggcggccccgcttcaaggacatccacagccggctccgagcctggggcaacctttccaactacaacagctcggcgcagacctcgggggccagcaacaccacgcagaccagctccctgagcaccagcccagtgagcaatgtgagcaacgcccgctacgtggggcccaagcagaaggccccgcccttcccacagccccagttcatccccatgaagggccagatcagacccatggtgcccccgccgcagctctacgtccccgtcaacggctaccagccggtgccggcctatggggcctacctgcccaacttctacccggtgcagatcccaatgcagatggccccgcagcaggtgcctcctcagatggtccccaagcccagctcacaccacagtggcagtggctccaccagcacaggctacgtcaccacggccccctccaacacatccatggcagacagggcagccctgctctcagagggcgctgatgacacacagaacgccccagaagatggggcccagagcaccgtgcaggaagcagaggaggaggaggaaggctctgtcccagagactgagctgctgggggactgtgacactctgcaggtggacgaggcccaagtccagctggaagcttgagtggcaccagggcccggggttcggggatagaagccccgccgagaccccacagggacctcagtcacctttgagaagacaccatactcagcaatcacaagagcccgccggccagtgggcttgtttgcagactgggtgaggtggagccctgctcctctctgtcctctgacacagagagctgccctgcctaggagcacccaagccaggcagggggtctggcagcacggcgtcctggggagcaggacacatggtcatccccagggctgtatacattgattctggtggtagactggtagtgagcagcaaatgcctttcaagaaaataggtggcagcttcactccatgtcatatatggagtgaatatttcaaaacgttgggaataagggcctgcaaaaggcagcgaggaggcacctcgggtcttgaggttcctgacaaccgatctggtctgttggtttgaggatgaaggggctccatttctgctgcctccctgctgagaatattctccctttagcagccaaagattcgctggaacggaggctgccctctgctgcctgttggggtcggaagacaaggggcttctgaaatgggagttcctgagatacaacaaaatgtgtgccttcaaagaaactgacagctttgtatttggtgaaatggttttaattatactccatgtgtattttgcccactttttttgggaattcaagggaaagtgtttcttgggtttggaatgttcagaggaagcagtattgtacagaacacggtattgttatttttgttaagaatcatgtacagagcttaaatgtaatttatatgtttttaatatgccattttcattgaagtattttggtcttaagatgactttagtaatttaactgtttatgttacccacgttgggatccagttggtcttggtttgcttctctctgtaccacgtgcacatgaggtccattcattttacagcccctgttacacacagacccacaggcagccgtctgtgcccgcacacattgttggtcctatttgtaaatcccacacccggtgtatccaataaagtgaaaccaacccc

SEQ ID NO: 72785 - DNA, 554 bp, Homo sapiens
agcattgattgagaaccctgtttcatgtatgatatcagaagctggaaactctatcagtgaatccttggttttcttatgactcacaaagaatttcacataaagtaagagaaaatcttgcttagtaacagtctgcactacatataataatagaacacaatttgtatgtgaaagtagtaagatatacttcattcataaaaagcaccatgcttctggctagataaatgatttgaagtcccagagagaaattgcaatttttagttctgggatacccttatgctacttacactttttaaaatttaatacattcacgtgtttaaatgtattgagatttttaagcttgtgaatgaaattagcatcgtgctgtggctgtcaacgtgatgcactgcaattccccctgagtggtagggtttaaatattaattcagctcttgcacctgtttgccagcattcggctgttgaatttccatcacatttaataagtctcggtgacgcaacccatgtccttttgcctgggctcctttaatatagtgttaaattctcacccatctgaaattc

SEQ ID NO: 72786 - DNA, 425 bp, Homo sapiens
atcaaatattcttagtgtagccatccatttacaagtgttattttcaagagcaaaatttatgcctttaaactgtgataattaaattaatactggtgagaactatcagatataccactgtgacagaacagatggcctagagacagtgatacctttaaaagttaaataattgctgagcgcggtggcttacgcctgtaatcccagcactttgggaggccgcggtgtgtggatcacggggtcaggagttcaagaccagcctggccaagatggtgaaaccccatctctactaaaaatacaggtgggcgcctataatcccagctactcaggaggctgaggcagagaattgcttgaacccaggaggcggaggttgcagtgagccaagatcgcgccactgcactccagcctaggtgacagcgagactccgtctc

SEQ ID NO: 72787 - DNA, 317 bp, Homo sapiens
atatggattctagtaccaccattgccgacattgatttgctctttggcctttggcaaatcgctttgcccaaagtcactttgttctctgatcactaattttctccattaaaaaaaaaaaagtctcagccgggcacagtggctcacacctgtaatcccagcactttgggaggccaaggcgggtggatcacgaggtcaggagtttgagaccagcctggcaaagatagtgaaaccccatctctactaaaaatacagctgggcgtggtggcatgtgcctatagtcccagctactcaggaggctgaggcaggagaatcacttga

SEQ ID NO: 72788 - DNA, 871 bp, Homo sapiens
ttggggtaggttttgccctttttaagatccacatgaaatctttcgcctccgaagttcgagggtaactttcgttccctcctggccttcgcgacaccctcgagtcggacggaggccgagtcgtgtcctcacccccagcagcctgcggcggccgggacccccggaggcccttcttccgctccttggaaacttaaaatgtggggtgagggagagacgcgttacgtttgacagaccggtgaaattaaagacactcaagcttctcagagtgatttgaagaaatgctcagcgttctgccgaaatatagttttaagtttttaaaccacggcatggtttttaaaggctgaaggacccacagtttttttctcttaaagggcacgcattcattttgattaatatttcttaacatgcagccaaagccaggactcgggctcactgctgcaggggtgtcctcgggaagtcccgaggggggaaaggcgcgcaagcctgaaatggagatgaaaataaacaggcataatatttgctacctcactgcgttgggcgtagtagtaactaattcttaaaaaacgtcttagatgacatataagtagtaaagccgttgtatgctaatctagaatttttgagaaaaacttaatcacccaaatgtttgctataatgtgatgaagatagcatccatcggcagtagccaggatcaaatgacgagtagatatggttataaatggggcccatgcagtataattagtatatgaaaccaagatgtcagtcctcacacagaatttgtgtaatgatatgcatttgggaggcttcaggccttttcagctatttgatacaggttgattcttactgaatacagaataataaaaaatgaattactggt

SEQ ID NO: 72789 - DNA, 406 bp, Homo sapiens
acaaaaagctgcacatatttaatgtatcctattgtgtaattaatttttaatttttttgtgtacttcctaaacttatagtcctgcgagtctgggaacagatctgtttttcacttatcctgatttaatgacagtttccaacattgttttgttattacaagtaggggatctttttttttgcccgtttaatgaagatactaaaaataatgcactggaaggagtggaagagttggaaaatttgtaaccatcataatacaggtgtaataggtttgggaaagaatcctcaaaaatgttaaagcaagggaggaaagtttgttgagaagcaagatgttcttctctcctgcccgcccccgcggttggttgttggtggtcagaattattgtgtaataaataatagacattttttctt

SEQ ID NO: 72790 - DNA, 179 bp, Homo sapiens
ccggccatttgtaggatttctaaaaggaagctgctattattcattcctgtcttatgggggagctgcaggctcagcgagggcaaagctgcacagcaaacagcagcacttgaacatgtctgccgggtctcagcgccagggatacagctgagccaggacgttcccggcccccacagtgtgca

SEQ ID NO: 72791 - DNA, 1228 bp, Homo sapiens
agcggtgcgatggcgcggtcttggctcactgcaacctccgctcgctgcaacccccgtctctactgaaaatgcaaaaaattagccgggcagggtggcgggcgcctgtggtcccagctactccgaggctgaagcaggagaatggcgtcaagcggcgaggcggagcttgcggtgagccgagatcgtgccgctgcactccagcctgggcaacagagcaagactccatctcaaaaagaaaaaaaaagtagagatgggatctctagcctcctaagttaatttagcctcccaaatgccagacaaagaatctaacataaaatttaccttgaataagatatatgatattgattctgagctgctttgtattttttctgactttggcatctgtatcttggtgctttctgttagactggtagagtttaagaacctaaggagtatgcattgtacttcagtgctaacttttttcttcatttactttctgtgtatataggcagcatattttttttgtagaacattaacccagattgctaatagcttcatgttacggcattcttccacacagtccagattgatttaaggaaaagcagaaatggaagtcaaagtgtgttataaattgagactgaaaaacatgctttaaaaaatagatttaatttcttacactgtgaatagccattgtattgttttgtttctgataaatcagttgttttgggcccctatttttgaactgttaaaaaattttgatgcttttcgtggataaaagtagtgcctctctttatacaactgatggggttttaaaaagtgtaaattgccttttttgttaaacttattttaaatgctttagtatttaaagggtgtatgttattaattaatctgcatatttgtaacgcaaataactacttcctgatttacatctcaatatattcttctttcatttgcccaatttaaaaaatacgtagtctctattgttgctgtttactaatagttttagatcccaatgtgtattagaattatagctacaaaaagttgcaagtaaaatttagcaatttcctattcaaacaggatctcattagtatgttttttaatgtgtagaattaacactttaaaataaacaggtgtgaaaattataaaggaatatatatgacaattattttctgtacattaatgtctaaacattatacttactttttcataataaaggaaattttggaaccaaatttgctgagtttagcataaa

SEQ ID NO: 72792 - DNA, 1414 bp, Homo sapiens
tctgatagattagttcaagtgattctcctgcctcagcctccggagtggctgggattacaggcacctgccaccaagcacggctaattttgtatttttagtagaaacggggtttcgccatgtggccaggctggtctcgaactcctgacctcagatgatccactcaccccagcacttgggaggctgaggcaggcagatcacgaggtcaggagatcgagatctcttggctaacacggtgaaacccgtctctactgaaaatgcaaaaaattagccgggcagggtggcgggcgcctgtggtcccagctactccgaggctgaagcaggagaatggcgtcaagcggcgaggcggagcttgcggtgagccgagatcgtgccgctgcactccagcctgggcaacagagcaagactccatctcaaaaagaaaaaaaaagtagagatgggatctctagcctcctaagttaatttagcctcccaaatgccagacaaagaatctaacataaaatttaccttgaataagatatatgatattgattctgagctgctttgtattttttctgactttggcatctgtatcttggtgctttctgttagactggtagagtttaagaacctaaggagtatgcattgtacttcagtgctaacttttttcttcatttactttctgtgtatataggcagcatattttttttgtagaacattaacccagattgctaatagcttcatgttacggcattcttccacacagtccagattgatttaaggaaaagcagaaatggaagtcaaagtgtgttataaattgagactgaaaaacatgctttaaaaaatagatttaatttcttacactgtgaatagccattgtattgttttgtttctgataaatcagttgttttgggcccctatttttgaactgttaaaaaattttgatgcttttcgtggataaaagtagtgcctctctttatacaactgatggggttttaaaaagtgtaaattgccttttttgttaaacttattttaaatgctttagtatttaaagggtgtatgttattaattaatctgcatatttgtaacgcaaataactacttcctgatttacatctcaatatattcttctttcatttgcccaatttaaaaaatacgtagtctctattgttgctgtttactaatagttttagatcccaatgtgtattagaattatagctacaaaaagttgcaagtaaaatttagcaatttcctattcaaacaggatctcattagtatgttttttaatgtgtagaattaacactttaaaataaacaggtgtgaaaattataaaggaatatatatgacaattattttctgtacattaatgtctaaacattatacttactttttcataataaaggaaattttggaaccaaatttgctgagtttagcataaa

SEQ ID NO: 72793 - DNA, 1085 bp, Homo sapiens
caggcatgagccaccatgcccagctaattttttaatttttctgtagaggtagggtcctgggcaacagagcaagactccatctcaaaaagaaaaaaaaagtagagatgggatctctagcctcctaagttaatttagcctcccaaatgccagacaaagaatctaacataaaatttaccttgaataagatatatgatattgattctgagctgctttgtattttttctgactttggcatctgtatcttggtgctttctgttagactggtagagtttaagaacctaaggagtatgcattgtacttcagtgctaacttttttcttcatttactttctgtgtatataggcagcatattttttttgtagaacattaacccagattgctaatagcttcatgttacggcattcttccacacagtccagattgatttaaggaaaagcagaaatggaagtcaaagtgtgttataaattgagactgaaaaacatgctttaaaaaatagatttaatttcttacactgtgaatagccattgtattgttttgtttctgataaatcagttgttttgggcccctatttttgaactgttaaaaaattttgatgcttttcgtggataaaagtagtgcctctctttatacaactgatggggttttaaaaagtgtaaattgccttttttgttaaacttattttaaatgctttagtatttaaagggtgtatgttattaattaatctgcatatttgtaacgcaaataactacttcctgatttacatctcaatatattcttctttcatttgcccaatttaaaaaatacgtagtctctattgttgctgtttactaatagttttagatcccaatgtgtattagaattatagctacaaaaagttgcaagtaaaatttagcaatttcctattcaaacaggatctcattagtatgttttttaatgtgtagaattaacactttaaaataaacaggtgtgaaaattataaaggaatatatatgacaattattttctgtacattaatgtctaaacattatacttactttttcataataaaggaaattttggaaccaaatttgctgagtttagcataaa

SEQ ID NO: 72794 - DNA, 1206 bp, Homo sapiens
agcggtgcgatggcgcggtcttggctcactgcaacctccgctcgctgcaacccccgtctctactgaaaatgcaaaaaattagccgggcagggtggcgggcgcctgtggtcccagctactccgaggctgaagcaggagaatggcgtcaagcggcgaggcggagcttgcggtgagccgagatcgtgccgctgcactccagcctgggcaacagagcaagactccatctcaaaaagaaaaaaaaagtagagatgggatctctagcctcctaagttaatttagcctcccaaatgccagacaaagaatctaacataaaatttaccttgaataagatatatgatattgattctgagctgctttgtattttttctgactttggcatctgtatcttggtgctttctgttagactggtagagtttaagaacctaaggagtatgcattgtacttcagtgctaacttttttcttcatttactttctgtgtatataggcagcatattttttttgtagaacattaacccagattgctaatagcttcatgttacggcattcttccacacagtccagattgatttaaggaaaagcagaaatggaagtcaaagtgtgttataaattgagactgaaaaacatgctttaaaaaatagatttaatttcttacactgtgaatagccattgtattgttttgtttctgataaatcagttgttttgggcccctatttttgaactgttaaaaaattttgatgcttttcgtggataaaagtagtgcctctctttatacaactgatggggttttaaaaagtgtaaattgccttttttgttaaacttattttaaatgctttagtatttaaagggtgtatgttattaattaatctgcatatttgtaacgcaaataactacttcctgatttacatctcaatatattcttctttcatttgcccaatttaaaaaatacgtagtctctattgttgctgtttactaatagttttagatcccaatgtgtattagaattatagctacaaaaagttgcaagtaaaatttagcaatttcctattcaaacaggatctcattagtatgttttttaatgtgtagaattaacactttaaaatacacccgtagccccccatagccacgttcactcatgtgtatccagttgagtagcttaaggttcttcctttattgttttttttttgtaaaaaaaaagcttcaggttcc

SEQ ID NO: 72795 - DNA, 408 bp, Homo sapiens
acacttgggtcatcttcatccacacacaagtcctccagccttggggcagccatagcagatcacaccaggagtgcggcccagcagccgtggctgaaaggctgcctttaccacatttccttccatcccccccatggcaggtcttcctttatactgtactgcattagacactccactaggcactgagggcacccttcccatctggggccacaggcttgaaatagagtggttgacagggtgccctaacccagctgggacaggcaggtcagcttgccagccatgcctgggtcctgagggcagagtcaggagacaggtctgccttgacccccagggcagcaggcttttacctggcctctgggtcatctctgtctgcccagccctggtcctcatccgctgccttctcctcacccc

SEQ ID NO: 72796 - DNA, 393 bp, Homo sapiens
tgtaagtcatttgtagataaaatgtacttagggagtgcctactaagtgtgagatgctatcatagctgggagaagggaaggggtaggagtaacaatggaggagtgggttagtagaacagcccccatttcaggaaaactatattttattagggagatatatgtgcacaggactatttctatggcaaggcataaaacagcgcatgcctcagtagtaaattgcacatgtaacactttgtccagcagaattctctggaactgaaagatgtataatggaaccaagtaaaccagcaactgtaccatttctaactgtgaggagaaaacaagtggtgaaagttgtgcctcacaggtgctttgtgcaacaaattacaacaaaatttagaagcactaccatcct

SEQ ID NO: 72797 - DNA, 968 bp, Homo sapiens
ccagtggtcattcacctcttaaactttccactcttgcactgatcatcacctccacagcatatatctcacaaaatcttttcttatccaagtgtaaagacttattttttagcccagaacattattttttgttatttactttcccacaatgtttagatgagcatttatgtgaatgactgaatagatgcactgtgtcattatctaaacacgaaaacaggatcagtaacttttgttggatttgggcttactattgataaacactctagaatacacagttttaagcattgtctatgcaggtgattggcaatagttcgatgaatttatgaggaatgctgcagaaagagtctctgaattctctgattgaactcaggcctccttgatcccacaattaaaatgttagcataagcatgatattgtcatttttgcttaaattttattctcattttttatgtaaaattatattgtcttggagataggaaggatgagcaataatcctccatttaaatgtccataaaattataaatttaatcctgcaaaaccgactaaaaagtatttcatttgcattggatttttcctaccaccattccaaggataagtattatgctcatgttgaaaaaataaaataatttagttatttattgatttcttgtcatttatttcatgttgtcctgagattggatctaaactttgagctcctaatcattgctcagattgtgtggcctcgtaagattgtgcgtaataagtaaacaagcatctgtacacttgttaacttaatgagcttctgtatgtgacactttaagcctttttaaaaattaagtgctgggctatgcttggtgtctcatgcctgtaatctaagcactttgggaggctgaggaaggaggttcgctggaacccaggcatttgaaaccagcctgggcagcatagagacctcatctctttaaaaaaatttttaaaatagtaattatatgaaa

SEQ ID NO: 72798 - DNA, 258 bp, Homo sapiens
ccccccgctgcaattgaatcagcatcccatgtaacctgcccagaaaataggagtggaaatgagctgggtagccaccccgagcctctgccattaacttcatttacacattgttctcactcagccactcacaggaaggcatctttatgaaagcactgcaaacactatgtgtgaaaaaatccagatggtataaatagcttttcacttctaattgcaacttgcccctcacattttgtttcctgagagctctgaaaagagacc

SEQ ID NO: 72799 - DNA, 620 bp, Homo sapiens
aaatatatgagtttattataactgatgggtttccctctgaaattatagtgcaacattggttaactatttcctcaaacagattttttttaaaattaagttttacatcaacaggaagagcatattggttttggatgactgactgaattttaatgaatctacagtctttacttgaagtttaggtgttttcagggaagttctgtcttcaccttcttcctggaaacccagatttttattagacatggatttttagatgtaagaaaatattaatttaatttcatcatgttaaggactacttttctatgcatgtgtaaactgcttcaagcacttaacaggcttcttttttgttttatgatacgataattaatatattaagcatgctttgaaatgcattttaagatagaaaaggttaatcttttaaggaataacatagacaacttattgctagtattgtattgactggatccattctgattttttattgttattgaataatcaggcaagagctctgtagatttttttttgcctttaagaaaaaaatttcagtggaatggaattaacaaacataggtagccttttttattttttgggagatagggtctcactctgtcatctacactgga

SEQ ID NO: 72800 - DNA, 601 bp, Homo sapiens
ttttttacagcagattacacaaataccagttgaacttgtaaaagataagagtgctttcatatgaggatgacatattgtggtgaaattaaatgtgttcatgtagcttaacatcaggtttcatattgttacttatgagttaatagtcatggtgcatttggaacaaattattgaaaatatctccaagtttaaatagacaaatcaagatatgaaattaacctttctaaacttaagagggtaaaaagaaatcacttggccaatcacaactagcgcgcgtctttttaaaacgttgatcaaagccagtttcagcgccaacatttaaaaaaaaattaagacacgtcatcctagtagctagacacaattttgccaaggaaaaccaaagtacgttttaaataaaagctagaaacatggcacagaggggaaagggttgaaaacaccagcagttaaagatggacggaggaaagttttaatatttggtctacatgcaggagatgttctgtcagggagtgggcgtctccaccaatcgagctgcaggggaaaggctgccttgtccaatcagaacaggggtgtctttatatatacgggtacgaaaggctagactttc

SEQ ID NO: 72801 - DNA, 1084 bp, Homo sapiens
  misc_feature (752)..(754): n is a, c, g, or t
ccacctttaagtgaagcctcatggtctgtgatgttttcctaccaagagagggcaatagagcagaaaacttgcaggactagaaaagatgtgggttctggttccagctttgccacatggaggggcaactgaggaccagccacttaaaacttcccagggcctcaggtttcctcacttaatccccataataacctacaattttgagttcccaggcaaacctgaaattacatcatattcattatctgttgttacactttatcctgcccccaaaatcttaatgaaattgtgtaaggaataaaaacaaattggtggttgaaatgctaggtaaatgcaaaaagaataaagatatgatccagaacagtaaatgtttatagactgcttataaaaaagttaattcactcatcttgacaatggcaatgataacacatgtgcttcttaccacctggggatactgggtgaatgaaggcatctgaagactataaagtacaagacagatgtgggtggaattagatgagagcctggtctggctttctcagttctgattacatttcttccctgatgactcacttacaagttagtgaactccttgtttaagtattacaaactgcacaccttctcccttctcaatctagcttcacatcaggccttcctgccaaagcggcaaacttgccacatggggcaaggtactccccaagcagacaaggcccatctgtgtcatgagtgatacccaatgctaatgccatgctctgaaatgnnntgcccaccttggcttcccaaagtgctgggattgcagacgtgagtcactgcgcccagccattccatgtctcttaagtctcagaatctcccctagctccctccaggtgtctgcagtggttgtcccctcaaagctgtcccacaccctcctccgaggaccctttgtgtatctcctccagctaccgcagagcccacaaacccaggcatctatcaaagtccctcattcatgagggtggtgaggacacagactgcgaccagaacagaaatatgaaaatgtgaatgacagcgtcccccgtgtgtggaatgtggggattaaaagcatttatcaacctct

SEQ ID NO: 72802 - DNA, 604 bp, Homo sapiens
  misc_feature (594)..(594): n is a, c, g, or t
  misc_feature (598)..(598): n is a, c, g, or t
ctgaaaagagagcttattgtacctcacgcacagcagcaggtttaacagaaaagtagacatgtttatagtcccagatttacagcacaccttataaacaccttattacttagaatccagtctgctgtcccagaaactaagaatgtgactttgttaagcagtaggatttgttgacataaatgtcttgactaagtttgccattgtggttaaccaaaacgcatttactcctgggaaagtaaacacaagcaaacaaaatgcctcttatactacaatacggttgcaaagtccaagatcaagggactggaatcttatgagggccttctgctatgagagtcacatggcagaagggcaagagaagacaagagagaatgcaagaggaggaaaaactcatccttttatgatggcactaattccactcatgagggtgtagccctaatggcctcatcacctcttaaaggacctacttcttacttctgttacactgacaaattgcaacatgagttttggaaaggacaaacattcaaaccatagaattatgctcctgcccacccccacctaaactcatgtcctcacacacaaaatacattcgttgcttcncagnaaaaaa

SEQ ID NO: 72803 - DNA, 250 bp, Homo sapiens
tggcatgcgcctgcaatcccagctactcaggaggctgaggcaggagaattgcttgaacccaggaggagggagaattgcttgaaccctgggcgacagagcgagactccatctcaaaaacaaaacaaaacaaaaccaaaaactaaaatgtcagcagggccacgctccctcctaaggcttcagggagaatcattttttgcctcctccagcttctagtaggtccaggtgtccttggcttatggcctcatcactc

SEQ ID NO: 72804 - DNA, 328 bp, Homo sapiens
gtttgaggtggagtctcgctccgtcgcccaggctggagtgcagtggcacaatctcggctcactgcaagctccgcctcccgggttcacgccattctcctgcccaggaggtggaggttgtggtaagctgagatcatgccattgtgctccagcctgggcaacaagagcgaaactccatctcaaaagaaaaaaaaaaaagaataaatatagtaaagcgtgtgaactttgaagccaggctacttggacatgatccagtttgatccagccattcactagctgggtgacttttgacaagtgacataacatctctgaggctctacttcctctctgt

SEQ ID NO: 72805 - DNA, 802 bp, Homo sapiens
tagggcattaccaatttgggacggatctgtagtgtgagagattgttgtcactcttagctccaaacataggttgactttatatattatttacatgttcagaattatactgtgtagaaattcaaatgaaacttgcaaaatacttttctggcaggaagccctggagaggatcgttcatggaaacaaggatgacgactggggtaagaaatgcaggtgactcgtgagtggtcagggagtggaagagaagacggctggaaggttttagcattcagaaaaaaaatggagacaactagagttgatctgaagattatggcagaattcaatattgggggaaagaaacaagatgggggttagaaattagaaacagcagagctcccacaggttggaaaggttggaaaggatttgagcaagagaacaagaaggagcctgctaatagcaccctgggtttacatcaagagaagcacctggagagaattaactcgggaggaggtgggggcatgggaaaccttttcatctccaagagcgggcaggaacagcagctggcctgaacttgaaggtacaccaggtagcttgcgtgggccaggagaaggtgattctcttctatgcctctctccaacgccctgcttctgatgctgctcctctacctgtattgaggggaagatacatccctaagaagttccctgaaccccattctttgttgtggctaactggtccccttggaatttttctactaattttcaattccccctctcacctggtgaaatcttgaatcttactgttcaataaaagttcttctaccgaaatt

SEQ ID NO: 72806 - DNA, 1593 bp, Homo sapiens
  misc_feature (1161)..(1161): n is a, c, g, or t
ctgcagggacgagcgtgagttttgtaccgcggttaccacctactttccagctccaggtcttagtctaagagggagtgtctgctcatgaagaggcaaagccccaggagctgcgaaaagccttgcatggcccatctgagagatgtgctgagtcggcttgttaaaaatgacaggcaaagcctgtggggtggggcagctttcttggcctgagcgcatcttggttgagccagaggtgacttggggtggggagtggggcgccggttggtgggttctccctttaatttctcaaaggctgtggtgtttatgagtctgttggaatcctggttgggttggaatgaaggaaggttctagaaccattgtgggaagctcgctagtaaagatggtttggagatcggaagttgactgactttcccccattgaaaaatgtcacctgagattttagtgcctgtatcacgattataggctcaactttcttttccttgttttctttgatttagttctccttatgtgcaaaattactgtgtgatgttggctagtcgtattatcacagccactccgtgttttcaggatttgtagctggaagtcctatagcacttaagtcttcacttacagatcagcgcttgcttttattctgttttgtgtgatttctgctgttttcctgtgagttggtgttttcttcccaagtaggctcaggactcctctagggcaggacattatatgcatgtacatagtgtcctccagtgtaggggaggagaaggaggagaggtgaggtgggaaaagggtgagggaaggcttggatatttgaagttatttacaaatgagcttagacgtaaatccagttaacagatgacaccacaaattaatgattaaagaaatcctgaaattattttgtaaattacacacttatattgctgcattttttttctgttgaaagcattacttttaacagaaatggaaacattggaaataaaccatgtttttctcaccttttatgtcttcatctcttaatgtaccagtccctagagaagctgaagcccaatcctgtgtcctccaccccagccacccagccccatggtgaggacacagggagcttaggatagtactgctgcgtgcagcatacacctttgtctcattgacgtgcagagactgaccagatagagaagnttttttgatggaaaactcactgtggtgtctgcctggttgatcttgaatgatggcaagtgggcacttttcaggtaactattgatgattaactgacaaagatctgtgaaggctacactttgtcacttcagagtgccagagatacccatcagtaatatttttacatatatgcttagtaccatgcaggtaaatcccaggtgattgtcatcgagctgaacttttactcagatgtttaaagtgatgcacttgtaaggttataaggtgaaaatgctaatgtttaaagctatttggcattttaatttgacagttgttttataaatgaaccaaaaagaaagaagttgctgttttgcaataaatcagtgtgacacaaatcatatttcttaatatttcaagtgactgcttgccaactgcctgatggaatggcaccgtgaattc

SEQ ID NO: 72807 - DNA, 307 bp, Homo sapiens
acatccacagaaacttctgccagcgtgtgatgagctttcagggtgctggctccattcagctgctttcagtcctgtaccgagaaaaacattctgtgttaaagacgatggtgtcagctgctgaattgcttctgtaagtcctttaaaactcaaaaacccaatctatgtagattcatgttaaaatttccacatcagagttaacgtacaggatgtgcttgaataactttaccaacgtgaattttacttatattcttaaatgttatgctgttatattttattttgaagacattaaatggaacttcagatttag

SEQ ID NO: 72808 - DNA, 418 bp, Homo sapiens
ccaccacccccggctaatgttttccatttttatttcttatttattttttttgagacgtcgtcttgctctgtcgcccaggctagagtgcaatggcatgatctcagctcactgcaacatccgcctcccgggttcatgcgattctcctgcatcagcctcccgagtagctgggagctctagcctgagagacagagcaagattccatctcaaaaaataaataaatcttcgcgttagataaagggtttacttgtaaactggtaatttgttgcttttctgtgttaatctctaggtaaagtagcgacttccctctcctatttacgcatgcgctattactgtatttctactgagcgatgactttctctgcgtttctcatgtagcattgcactccagcctgggcaacaagggcgaagttctctcaaaa

SEQ ID NO: 72809 - DNA, 704 bp, Homo sapiens
cccccgggatgaagtgacccagcagaaataccagagaccggagacggaatggcccagggtcagcctccacccggaaccggaggatgcagcgaagacgtctccttgaagtgggatacggatgtgaaccggcccaagtgctcgccggtccgtcaagacgcgctgcccggctgctcccgtgtccaactcgggctgtgtccgcccaggcgggcctgtgcgcggaggtcctaccgctgcacctccgcgcctaccgcagcccgcacccccgcacccgggcagccaacgtgcaggaggcccgggcgccttcagcggagacgccccgaccgcggctgcctcgccgcagcgttagcttttacctacgtggggaagtaaggggaatttgcgaccgccagcccagtccgctgaaaacctgtggctgacccaccctcttcctttttctgacccacgttggctccaaaaaaaaaaatccctagggatccactgggagccagttgagcaggagtggattaagacacgtgtcgcagggtgtatggtggaaagaaacgttttcctttgctagaatgaaccttgggaaggatcccttttgattccgtagatgtaagaggctacacaatattatggaagaaggatgtaaaaaaaatgtattattattttttagttaccaactggactgaagtaaaagaccttttaaacttaaaaaaaaaaaa

SEQ ID NO: 72810 - DNA, 906 bp, Homo sapiens
  misc_feature (886)..(886): n is a, c, g, or t
  misc_feature (896)..(896): n is a, c, g, or t
cacgcgtcgggcaggagaagatggcgaccgtgtgggatgaggccgagcaagatggaattggggaggaggtgctcaagatgtccacggaggagatcatccagcgcacacggctgctggacagtgagatcaagatcatgaagagtgaagtgttgagagtcacccatgagctccaagccatgaaggacaagataaaagagaacagtgagaaaatcaaagtgaacaagaccctgccgtaccttgtctccaacgtcatcgagctcctggatgttgatcctaatgaccaagaggaggatggtgccaatattgacctggactcccagaggaagggcaagtgtgctgtgatcaaaacctctacacgacagacgtacttccttcctgtgattgggttggtggatgctgaaaagctaaagccaggagacctggtgggtgtgaacaaagactcctatctgatcctggagacgctgcccacagagtatgactcgcgggtgaaggccatggaggtagacgagaggcccacggagcaatacagtgacattgggggtttggacaagcagatccaggagctggtggaggccattgtcttgccaatgaaccacaaggagaagtttgagaacttggggatccaacctccaaaaggggtgctgatgtatgggcccccagggacggggaagaccctcctggcccgggcctgtgccgcacagactaaggccaccttcctaaagctggctggcccccagctggtgcagatgttcattggagatggtgccaagctagtccgggatgcctttgccctggccaaggagaaagcgccctctatcatcttcattgatgagttggatgccatcggcaccaagcgctcacggctgaagtgcgcaataaaagatgntttagggtcnctgcaaaaaa

SEQ ID NO: 72811 - DNA, 872 bp, Homo sapiens
  misc_feature (852)..(852): n is a, c, g, or t
  misc_feature (862)..(862): n is a, c, g, or t
cacgcgtcgggcaggagaagatggcgaccgtgtgggatgaggccgagcaagatggaattggggaggaggtgctcaagatgtccacggaggagatcatccagcgcacacggctgctggacagtgagatcaagatcatgaagagtgaagtgttgagagtcacccatgagctccaagccatgaaggacaagataaaagagaacagtgagaaaatcaaagtgaacaagaccctgccgtaccttgtctccaacgtcatcgagctcctggatgttgatcctaatgaccaagaggaggatggtgccaatattgacctggactcccagaggaagggcaagtgtgctgtgatcaaaacctctacacgacagacgtacttccttcctgtgattgggttggtggatgctgaaaagctaaagccaggagacctggtgggtgtgaacaaagactcctatctgatcctggagacgctgcccacagagtatgactcgcgggtgaaggccatggaggtagacgagaggcccacggagcaatacagtgacattgggggtttggacaagcagatccaggagctggtggaggccattgtcttgccaatgaaccacaaggagaagtttgagaacttggggatccaacctccaaaaggggtgctgatgtatgggcccccagggacggggaagaccctcctggcccgggcctgtgccgcacagactaaggccaccttcctaaagctggctggcccccagctggtgcagatgttcattggaggtgcaggccaagaagaaagccaacctacaatactacgcctagggcacacaggccagccccagtctcacggctgaagtgcgcaataaaagatgntttagggtcnctgcaaaaaa

SEQ ID NO: 72812 - DNA, 1364 bp, Homo sapiens
  misc_feature (1129)..(1129): n is a, c, g, or t
  misc_feature (1344)..(1344): n is a, c, g, or t
  misc_feature (1354)..(1354): n is a, c, g, or t
cacgcgtcgggcaggagaagatggcgaccgtgtgggatgaggccgagcaagatggaattggggaggaggtgctcaagatgtccacggaggagatcatccagcgcacacggctgctggacagtgagatcaagatcatgaagagtgaagtgttgagagtcacccatgagctccaagccatgaaggacaagataaaagagaacagtgagaaaatcaaagtgaacaagaccctgccgtaccttgtctccaacgtcatcgagctcctggatgttgatcctaatgaccaagaggaggatggtgccaatattgacctggactcccagaggaagggcaagtgtgctgtgatcaaaacctctacacgacagacgtacttccttcctgtgattgggttggtggatgctgaaaagctaaagccaggagacctggtgggtgtgaacaaagactcctatctgatcctggagacgctgcccacagagtatgactcgcgggtgaaggccatggaggtagacgagaggcccacggagcaatacagtgacattgggggtttggacaagcagatccaggagctggtggaggccattgtcttgccaatgaaccacaaggagaagtttgagaacttggggatccaacctccaaaaggggtgctgatgtatgggcccccagggacggggaagaccctcctggcccgggcctgtgccgcacagactaaggccaccttcctaaagctggctggcccccagctggtgcagatgttcattggagatggtgccaagctagtccgggatgcctttgccctggccaaggagaaagcgccctctatcatcttcattgatgagttggatgccatcggcaccaagcgctttgacagtgagaaggctggggaccgggaggtgcagaggacaatgctggagcttctgaaccagctggatggcttccagcccaacacccaagttaaggtaattgcagccacaaacagggtggacatcctggaccccgccctcctccgctcgggccgccttgaccgcaagatagagttcccgatgcccaatgaggaggcccgggccagaatcatgcagatccactcccgaaagatgaatgtcagtcctgacgtgaactacgaggagctggcccngctgcacagatgacttcaatggggcccagtgcaaggctgtgtgtgtggaggcgggcatgatcgcactgcgcaggggtgccacggagctcacccacgaggactacatggaaggcatcctggaggtgcaggccaagaagaaagccaacctacaatactacgcctagggcacacaggccagccccagtctcacggctgaagtgcgcaataaaagatgntttagggtcnctgcaaaaaa

SEQ ID NO: 72813 - DNA, 1312 bp, Homo sapiens
  misc_feature (1077)..(1077): n is a, c, g, or t
  misc_feature (1292)..(1292): n is a, c, g, or t
  misc_feature (1302)..(1302): n is a, c, g, or t
cacgcgtcgggcaggagaagatggcgaccgtgtgggatgaggccgagcaagatggaattggggaggaggtgctcaagatgtccacggaggagatcatccagcgcacacggctgctggacagtgagatcaagatcatgaagagtgaagtgttgagagtcacccatgagctccaagccatgaaggacaagataaaagagaacagtgagaaaatcaaagtgaacaagaccctgccgtaccttgtctccaacgtcatcgagctcctggatgttgatcctaatgaccaagaggaggatggtgccaatattgacctggactcccagaggaagggcaagtgtgctgtgatcaaaacctctacacgacagacgtacttccttcctgtgattgggttggtggatgctgaaaagctaaagccaggagacctggtgggtgtgaacaaagactcctatctgatcctggagacgctgcccacagagtatgactcgcgggtgaaggccatggaggtagacgagaggcccacggagcaatacagtgacattgggggtttggacaagcagatccaggagctggtggaggccattgtcttgccaatgaaccacaaggagaagtttgagaacttggggatccaacctccaaaaggggtgctgatgtatgggcccccagggacggggaagaccctcctggcccgggcctgtgccgcacagactaagatggtgccaagctagtccgggatgcctttgccctggccaaggagaaagcgccctctatcatcttcattgatgagttggatgccatcggcaccaagcgctttgacagtgagaaggctggggaccgggaggtgcagaggacaatgctggagcttctgaaccagctggatggcttccagcccaacacccaagttaaggtaattgcagccacaaacagggtggacatcctggaccccgccctcctccgctcgggccgccttgaccgcaagatagagttcccgatgcccaatgaggaggcccgggccagaatcatgcagatccactcccgaaagatgaatgtcagtcctgacgtgaactacgaggagctggcccngctgcacagatgacttcaatggggcccagtgcaaggctgtgtgtgtggaggcgggcatgatcgcactgcgcaggggtgccacggagctcacccacgaggactacatggaaggcatcctggaggtgcaggccaagaagaaagccaacctacaatactacgcctagggcacacaggccagccccagtctcacggctgaagtgcgcaataaaagatgntttagggtcnctgcaaaaaa

SEQ ID NO: 72814 - DNA, 3682 bp, Homo sapiens
  misc_feature (18)..(18): n is a, c, g, or t
  misc_feature (24)..(24): n is a, c, g, or t
  misc_feature (33)..(33): n is a, c, g, or t
cgtagaggggcacagcantgtctngagtcgagnagaggtggcggcgccgcagccatggagggaggcggcggcggcggcggcggcggctcgggtggctgcgctgggaggcggcggtgagaggctcgcacgcctccagcccggccccggccccccgggagggagagccgagcagccccggctctgggctacggactatgggcgaatagctctgaccacccggcgaagagctgagaatgaagcggagagcatcagacagaggagctggggaaacgtcggccagggccaaggctctaggaagtgggatttctggaaataatgcaaagagagctggaccattcatccttggtccccgtctgggcaactcaccggtgccaagcatagtgcagtgtttggcgaggaaagatggcacggatgacttctatcagctgaagatcctgaccctggaggagaggggggaccaaggcatagagagccaggaagagcggcagggcaagatgctgctgcacaccgagtactcactgctgtctctcctgcacacgcaggatggcgtggtgcaccaccacggcctcttccaggaccgcacctgtgaaatcgttgaggacacagaatccagccggatggttaagaagatgaagaagcgcatctgcctcgtcctggactgcctctgtgctcatgacttcagcgataagaccgctgacctcatcaacctgcagcactacgtcatcaaggagaagaggctcagcgagagggagactgtggtaatcttctacgacgtggtccgcgtggtggaggccctgcaccagaaaaatatcgtgcacagagacctgaagctggggaacatggtgctcaacaagaggacacatcggataaccatcaccaacttctgcctcgggaagcatctggtgagcgagggggacctgctgaaggaccagagagggagccctgcctacatcagtcccgacgtgctcagcggccggccgtaccgtggcaagcccagtgacatgtgggccctgggcgtggtgctcttcaccatgctgtatggccagttccccttctacgacagcatcccgcaggagctcttccgcaagatcaaggctgccgagtataccattcctgaggatggacgggtttctgagaacaccgtgtgtctcatccggaagctgctggtccttgacccccagcagcgcctggccgccgccgacgtcctggaggccctcagtgccatcattgcatcatggcagtccctgtcatctctgagtgggcctttgcaagtggttcctgacattgatgaccaaatgagcaatgcggatagctcccaggaggcgaaggtgacggaggagtgctcccagtacgagtttgagaactacatgcgtcagcagctgctgctggccgaggagaagagctccatccatgacgcccggagctgggtacccaagcggcagttcggcagcgcaccaccggtgcgacggctgggccacgacgcacagcccatgacctccttggacacggccatcctggcgcagcgctacctgcggaaataacagcctcagccggggccaccagcactgctgccacttcttccagccccagccaaaggcgtggctgtcagggctgggccctgtagtgctggactctcccgggccacaatagggacagggcagggacagggacagcccaggtcacacgtggggtcagcagaggtaccacgaagctaccttttgggatgattgctcgattgtttggtttttaaatctgagaagcctagataactaatctgcttttaatcacgatgttttaatctacctctgtctctttaaccatgctgtctctggactgagcaagagggaggagggagcctgctcaccccactccagggccttccccagcggccaccaactgacctggggcgctgctccccacagtccaaataagctgaaagtgcagctcgctgcaggccccagagcgagcttcccctcctccctgctctcccaggcccctgccacagcctctttccgtccctctctttctgatccaggcccctcagtccaagctttggaaaaccttcacctcatcttaaaccgaactcaaatatatttatttttttaccataccaacttctctcccatctctaggtggctcagtccatggccactccctgcccccagcctggctggacagcaaggaatccacagcccacacgtgagctccctcctcacccccaggcagggaagcccctcctgccagtccctgtcccctttcagcccaccagtccctctctgctgccggtgatgggaggcctttctagacctggctctttctctcccgtctcagtggcttctctgaggtgctgtacacgcgcgttaacctgttcccttctctatccttccccgtggtactgagctcacgtggactcccagtgcgaaggggcccatgggttgggctgcaggcctggccgtgagcgggggctgcctgcacgctcccctagcctactcttgtgtttaggggatggtgggaacatatcccagtgcccttgcctcataatagatgtggtgactctcccggtagaccctagcaagggtcctccatggtggtgagggactcaggagaattgtagggattgggggaccctgcctgcctggcttgagaacagccctgctgcccttttgagccgagattttgaagtggatgcccgtcttgccagaaatgctgttctcaccagaatgccccctccccttgcccttactggacttggccctgcctgatgccaagcaaagacccttccccagaggcctaccccccatatgtcctcagagaggctgagtgtcccctccaggcagtcatgggccctgaggcccctcctgcctggccctgctccccagtggggaggtgactgtgtttcccagagtgtgagccgctctcctccccctaaaaagctgactcactgtgagtgaccttgggcaagttcccaaacctccttgtgcctcagtttccccatctggaaaaaatggggccacctcttgccagcagtagcagggctgcccacgcccctttctccccatgccccatccagcacttgggcgactcatgcctctgcctcagtgggcctgtgggagcctactggagcccagcacttactccccctgagcagcgagcctgcgtctgtctcagctgtccagcgctgagggccagggtcttgtgctgtggggctgggggatgccctcttttctatatttatttcatagaaagtctcctgcgggagcggaaatgcagtccggcctagggctcccagcccttgactgtcctcctgtgagggcctgaagctgggccagggcccgtcgcagcggagccccctctcagcagcccaccgggtccctccaggctgctgcccgtgcgtggtctttctcctccttttcaaagcaatagccgccgggtctgcaaagccctgtcagacagactgggcccttccaaggtcaagccatgtgtctgatgacattcctggtgaagcaaaggagaggaggatgggtcagccctcactgggtgtcacacactgagagaagtcctattgtaaagaaacggaaaaagtcacaaaaaagtttgtataaagacatatttttgtactacatggggactcttcctgcatgtcagcaataaaacttcctgatctggaaccactgtggaaaaa

SEQ ID NO: 72815 - DNA, 3921 bp, Homo sapiens
  misc_feature (2068)..(2068): n is a, c, g, or t
  misc_feature (2207)..(2207): n is a, c, g, or t
  misc_feature (2230)..(2230): n is a, c, g, or t
  misc_feature (2377)..(2377): n is a, c, g, or t
  misc_feature (2956)..(2956): n is a, c, g, or t
ataaatccccctttttgtgtctcagggcagacagaggttctggctgccttttacttgagtcatgggcgctccagagtggcagggtagtgtggtacagagagactcactgctccgtgtgtgtcctctggcacaccctccgctctggggccccactctcacctcgttcagttgacctgaaggagctccagcccactccagccccttcccacccatcatgccaggctataactccactggagcagtaggcggaccagctggaggccttctcagcagagcagagagctctcaaggagcagacagggggaggtgttggcaaggcagctgcaacaacaagttcaccccgctttggattttaaaaggatcgaaattcgaaatcctcttctggggttatgtgaggtgctgtggggtctttttccttcctcctttctttttggtaggcaagcaacataccaagttcctagaaaaggagaaaaacactgtggcagcccagagggccatagctaaagcgtgactcactcagagccgatcctactgacacacgtcccctccctccgtcccactctgccattgccccctcctgtcaggaccagactagggggtctgggactcccggggagccatgcaccccccacttgggtggtggtggcagggcaggggagtgttgccaaacctcaggaggacttggagctgcccgtgccacttcctgtggagagactccagtgcgcctgccgctcagccctgcagagcctcagctgtgcctgcccgtgccctggcagagggtgggaaagtcccaccagcagtgttgagttgaaagctcagccacactggcatgtgctctccggggcctgttgtcacaccatggcacctctcccctaccgcctccaagacagagtcttttcctaccaggtgtgccaaccatcggagatgagaggacaccagcttctactatttgccaggcattgggctaagtgccctccatgagattatcttatcttgctgaatcctaacccagttctggagtttggtgctgggatttcactgttgtacgcatgaggaaattgaggtttagcaagagattcacagagcaaggaagtggcagagccaggactaggaacctggctcccaaacccaccgtactttctcctgagctgtcctcctctcagcgtcttgagcctcagagacccacaggatgcatttgcagcttccgcggccatctctgaccaggggagaaaacccacagtgcctctgctctgtgggaaccttctggacaagaggcccgagcagccccatattcagggcagcggcactggagcttcagagctagagcagcccactccttgacgtgcaagtgaccctttgcagtgacccttcacctgtgcgatcaggctctagccgcctgcgggccaccagtcagactcctatggcagctgacagggcggacctgtataggcgctggagttggcgtttccgtggggaatccagaggacgggctggcctttgttttgcatcgagccctttgccagcagaattccccgagatcaccgagggctctcagagccgcctggatgcggctcccggggaaatccgccagcagccacacatgccctctgcctctgagagctgattgtagggagaggcagcccaaggcccccatggagctctccttcctgttgtcctcccagcttctccccctagcttctccacccagccagccgacacaggagcagggcagttgggtagagaggcatccttcctcactgcctgccccagtgggccaggaaacctttcccaggcctcttagacagggcctgcccaccctcccagcccccagtgtggtgtaaggtgtaagggtcctctcggggcacttccttttgtccacatgtgagttttctccaaaggatcagagcccaaagctgccctgccccacgcctttcagagggagggtctgtgatgttctagccagggcagagtcacaagtacgaggtaagggatgagtcagctttgatggaacagaaggaaaagtcattcggggcctggggccctgcccagggacacatctgggcatgangcagctgtcagttgtgtgtgcagctctggggccctgcagacctggtcttggatcctgctcttctgctcaccagctgcatgaccttggccaagtcctttcacttccctgtgcctttgttgtatcatctgaaacaggaccntgagaaaatccccctcattggcnactgtcagtttcttcctctgcagtggttgtggggccaagtgagaactgacatattccgtggttcggaggtggctcggggccagcccttgggtcaccttccaaggtggagtcactcacctctgctggacttccttttcctcatgtgtnaatgaggaaattgaactaaatctcaggtcactcccagtctagaatattacgtgaggctgtttttgagaaatctctgaaagttgttctaagccctaagctgtaccccgagattcagcccgggcagcaggtccagggatggcctgtgcaacactcagatacctgggagagaagccgatccctgctgggacagctcggctggtggccagaaaagtctggggcctgattcctctgctctgctccctggagagggggtcggggcagctgcttcaccctctgacgagaagcctacctcctactgttcaggattgggtgttggcccagtgaggtgtgtcctgcctgcgtgtcttgtgcctgttgctatagacactgaggtttgttcactctgtctcccactcctaggacacatcggataaccatcaccaacttctgcctcgggaagcatctggtgagcgagggggacctgctgaaggaccagagagggagccctgcctacatcagtcccgacgtgctcagcggtacgtgtgtgtgccagacattgggcctctaagctcaatacagccaggctctgtgacagtccantcagcaaatttgtgggcaggccctgggcaaggtgctggggcttcactgggggcccagaccagtactgtccctccccatacaaaatgtttggtctgttggaggtggaagacgtaatgataacatgaatgcatgtttaattcctctgaggttagtgctagggaggaacgggattgctgtgagagtggatgaagggtgcttggaggactttccccacaaggtgtgacagttgagctatgatcttaagggaaactaggaattccctgggtatgtgtgactaggctgaggctgagggtcccagaggcagcacagcacgttggagcaattgcaggctgctcagaaagtgagcctggttcaaggggaagccagagaggtgcgcaggggccagatcaggcaaggcctgacataggcctcagtaagagatgtcatcctttacttcaagtgcgagtggaagccattgaacagttcttaactgagtgtgctgctgtgagtttgtgtttcagagccctctctccttgtctgtgttcattcattctgttactgtttgctgagggccacccaggcccaaagctctgttctagacactttggagacaacagggaacaaagtagacaaacattgctgccttcatggagctgactttctagtggggatgagacagataatacacgaaacaaataagtaactcacaggccgggtgcagtggctcatgcctgtaatcccaacactttgggaggctgtggcgggatcataaggtcaggagttcgagaccagcctggccaatatggtgaaaccctgtctctactaaaaatacagaaattagccgggcgtggtggcggttgcctgtaatccaagctactcgggaggctaaggcaggagaatcgcttgaacccaggaggtggaggttgcagtgagccgagattgtgccactgcactccagcctgggcaacagggcgagactccatctc

SEQ ID NO: 72816 - DNA, 5072 bp, Homo sapiens
  misc_feature (18)..(18): n is a, c, g, or t
  misc_feature (24)..(24): n is a, c, g, or t
  misc_feature (33)..(33): n is a, c, g, or t
cgtagaggggcacagcantgtctngagtcgagnagaggtggcggcgccgcagccatggagggaggcggcggcggcggcggcggcggctcgggtggctgcgctgggaggcggcggtgagaggctcgcacgcctccagcccggccccggccccccgggagggagagccgagcagccccggctctgggctacggactatgggcgaatagctctgaccacccggcgaagagctgagaatgaagcggagagcatcagacagaggagctggggaaacgtcggccagggccaaggctctaggaagtgggatttctggaaataatgcaaagagagctggaccattcatccttggtccccgtctgggcaactcaccggtgccaagcatagtgcagtgtttggcgaggaaagatggcacggatgacttctatcagctgaagatcctgaccctggaggagaggggggaccaaggcatagagagccaggaagagcggcagggcaagatgctgctgcacaccgagtactcactgctgtctctcctgcacacgcaggatggcgtggtgcaccaccacggcctcttccaggaccgcacctgtgaaatcgttgaggacacagaatccagccggatggttaagaagatgaagaagcgcatctgcctcgtcctggactgcctctgtgctcatgacttcagcgataagaccgctgacctcatcaacctgcagcactacgtcatcaaggagaagaggctcagcgagagggagactgtggtaatcttctacgacgtggtccgcgtggtggaggccctgcaccagaaaaatatcgtgcacagagacctgaagctggggaacatggtgctcaacaagaggacacatcggataaccatcaccaacttctgcctcgggaagcatctggtgagcgagggggacctgctgaaggaccagagagggagccctgcctacatcagtcccgacgtgctcagcggccggccgtaccgtggcaagcccagtgacatgtgggccctgggcgtggtgctcttcaccatgctgtatggccagttccccttctacgacagcatcccgcaggagctcttccgcaagatcaaggctgccgagtataccattcctgaggatggacgggtttctgagaacaccgtgtgtctcatccggaagctgctggtccttgacccccagcagcgcctggccgccgccgacgtcctggaggccctcagtgccatcattgcatcatggcagtccctgtcatctctgagtgggcctttgcaagtggttcctgacattgatgaccaaatgagcaatgcggatagctcccaggaggtgagttggggagggcagatgggccattacccagccccaagggacaggcttctgggggcaggcagggcaagggcagaggtggcagctacccgcaggccacagagtttccttggtcttcttccccagccttggggtgggaaagggagacttcagtcctcagcctgagctgcctggggcctgccttgggcttggtgtagctggagatctttggccagagagacctgtgagacagccgagctggagccagtgcccaagtggcccaggccagccctctcagcttcctcctgctgcccaagtcacatttctctgccccctgactcagagttctctctcacccttcctgcttttcatttttcagatgattcatttctccctatttctttcctccccattccctgcactggagaaagtgttgggcctagggtgggggcagagacttgggcaccaggcagcagagggcaggtgatcttagggtgccccctggagggcagggcttggccgagcaacagcattgctgggccctggatattggaaggaccttccctccctggcccaccttggagctccacagtgagcagtgtgcaggtaggaccaggaggggccgtgcctgggagagcctcccagagcctcctggcccccgaggaaagagagttccaatccctacccacctccagcttccaccctttagctgtttggctaaaatcatcatcactagcccgcagtgagtgcctaccccgagggcacctcattcagccctcactgcgggcctgcgtggcctgtgttcttagccccatgttacagaagaggaaacagggttagagaggactttcccaaagccacacagcttagaagtagtggagctaagccttgaacccaagtctcatccggaagccctgctgtctcctgtggtgactggcacggggacaccacttcagcttctgttaccatctgcctagaccatcccagggagctcagcatggggccctgcgtatgtggctcctccaggtgctgcgcccccagcccagggcttgctcgtacctcttgacgtgcattagccgcctcagggctcagagaacctttgcgaggggccagacagctaaggcttctgaggtaaagtgacctctcacgcagccagtgagttaggaagcatgagtctgcgtcagtcccgggtccgcagggcggcctgcaaggggagttgaggttggctggagggggtcagggacccaccctcagcgccactcccacccccggccttgaggcctgagggtgtggtgcctggaagggtgactgcaggagccaggctgccagcactcttgcctgccctcctgtctgctgcgctgccttcatctgggtttatctttgtctccttcccaccctccccgcctcaaaggcgaaggtgacggaggagtgctcccagtacgagtttgagaactacatgcgtcagcagctgctgctggccgaggagaagagctccatccatgacgcccggagctgggtacccaagcggcagttcggcagcgcaccaccggtgcgacggctgggccacgacgcacagcccatgacctccttggacacggccatcctggcgcagcgctacctgcggaaataacagcctcagccggggccaccagcactgctgccacttcttccagccccagccaaaggcgtggctgtcagggctgggccctgtagtgctggactctcccgggccacaatagggacagggcagggacagggacagcccaggtcacacgtggggtcagcagaggtaccacgaagctaccttttgggatgattgctcgattgtttggtttttaaatctgagaagcctagataactaatctgcttttaatcacgatgttttaatctacctctgtctctttaaccatgctgtctctggactgagcaagagggaggagggagcctgctcaccccactccagggccttccccagcggccaccaactgacctggggcgctgctccccacagtccaaataagctgaaagtgcagctcgctgcaggccccagagcgagcttcccctcctccctgctctcccaggcccctgccacagcctctttccgtccctctctttctgatccaggcccctcagtccaagctttggaaaaccttcacctcatcttaaaccgaactcaaatatatttatttttttaccataccaacttctctcccatctctaggtggctcagtccatggccactccctgcccccagcctggctggacagcaaggaatccacagcccacacgtgagctccctcctcacccccaggcagggaagcccctcctgccagtccctgtcccctttcagcccaccagtccctctctgctgccggtgatgggaggcctttctagacctggctctttctctcccgtctcagtggcttctctgaggtgctgtacacgcgcgttaacctgttcccttctctatccttccccgtggtactgagctcacgtggactcccagtgcgaaggggcccatgggttgggctgcaggcctggccgtgagcgggggctgcctgcacgctcccctagcctactcttgtgtttaggggatggtgggaacatatcccagtgcccttgcctcataatagatgtggtgactctcccggtagaccctagcaagggtcctccatggtggtgagggactcaggagaattgtagggattgggggaccctgcctgcctggcttgagaacagccctgctgcccttttgagccgagattttgaagtggatgcccgtcttgccagaaatgctgttctcaccagaatgccccctccccttgcccttactggacttggccctgcctgatgccaagcaaagacccttccccagaggcctaccccccatatgtcctcagagaggctgagtgtcccctccaggcagtcatgggccctgaggcccctcctgcctggccctgctccccagtggggaggtgactgtgtttcccagagtgtgagccgctctcctccccctaaaaagctgactcactgtgagtgaccttgggcaagttcccaaacctccttgtgcctcagtttccccatctggaaaaaatggggccacctcttgccagcagtagcagggctgcccacgcccctttctccccatgccccatccagcacttgggcgactcatgcctctgcctcagtgggcctgtgggagcctactggagcccagcacttactccccctgagcagcgagcctgcgtctgtctcagctgtccagcgctgagggccagggtcttgtgctgtggggctgggggatgccctcttttctatatttatttcatagaaagtctcctgcgggagcggaaatgcagtccggcctagggctcccagcccttgactgtcctcctgtgagggcctgaagctgggccagggcccgtcgcagcggagccccctctcagcagcccaccgggtccctccaggctgctgcccgtgcgtggtctttctcctccttttcaaagcaatagccgccgggtctgcaaagccctgtcagacagactgggcccttccaaggtcaagccatgtgtctgatgacattcctggtgaagcaaaggagaggaggatgggtcagccctcactgggtgtcacacactgagagaagtcctattgtaaagaaacggaaaaagtcacaaaaaagtttgtataaagacatatttttgtactacatggggactcttcctgcatgtcagcaataaaacttcctgatctggaaccactgtggaaaaa

SEQ ID NO: 72817 - DNA, 3560 bp, Homo sapiens
tcagaagggtggtgataccaacttactattggaggcagtgggcagcgcaggacaggcccagggccgccgaccctggcaatgactgtcaccagctggagggaagagctgagaatgaagcggagagcatcagacagaggagctggggaaacgtcggccagggccaaggctctaggaagtgggatttctggaaataatgcaaagagagctggaccattcatccttggtccccgtctgggcaactcaccggtgccaagcatagtgcagtgtttggcgaggaaagatggcacggatgacttctatcagctgaagatcctgaccctggaggagaggggggaccaaggcatagagagccaggaagagcggcagggcaagatgctgctgcacaccgagtactcactgctgtctctcctgcacacgcaggatggcgtggtgcaccaccacggcctcttccaggaccgcacctgtgaaatcgttgaggacacagaatccagccggatggttaagaagatgaagaagcgcatctgcctcgtcctggactgcctctgtgctcatgacttcagcgataagaccgctgacctcatcaacctgcagcactacgtcatcaaggagaagaggctcagcgagagggagactgtggtaatcttctacgacgtggtccgcgtggtggaggccctgcaccagaaaaatatcgtgcacagagacctgaagctggggaacatggtgctcaacaagaggacacatcggataaccatcaccaacttctgcctcgggaagcatctggtgagcgagggggacctgctgaaggaccagagagggagccctgcctacatcagtcccgacgtgctcagcggccggccgtaccgtggcaagcccagtgacatgtgggccctgggcgtggtgctcttcaccatgctgtatggccagttccccttctacgacagcatcccgcaggagctcttccgcaagatcaaggctgccgagtataccattcctgaggatggacgggtttctgagaacaccgtgtgtctcatccggaagctgctggtccttgacccccagcagcgcctggccgccgccgacgtcctggaggccctcagtgccatcattgcatcatggcagtccctgtcatctctgagtgggcctttgcaagtggttcctgacattgatgaccaaatgagcaatgcggatagctcccaggaggcgaaggtgacggaggagtgctcccagtacgagtttgagaactacatgcgtcagcagctgctgctggccgaggagaagagctccatccatgacgcccggagctgggtacccaagcggcagttcggcagcgcaccaccggtgcgacggctgggccacgacgcacagcccatgacctccttggacacggccatcctggcgcagcgctacctgcggaaataacagcctcagccggggccaccagcactgctgccacttcttccagccccagccaaaggcgtggctgtcagggctgggccctgtagtgctggactctcccgggccacaatagggacagggcagggacagggacagcccaggtcacacgtggggtcagcagaggtaccacgaagctaccttttgggatgattgctcgattgtttggtttttaaatctgagaagcctagataactaatctgcttttaatcacgatgttttaatctacctctgtctctttaaccatgctgtctctggactgagcaagagggaggagggagcctgctcaccccactccagggccttccccagcggccaccaactgacctggggcgctgctccccacagtccaaataagctgaaagtgcagctcgctgcaggccccagagcgagcttcccctcctccctgctctcccaggcccctgccacagcctctttccgtccctctctttctgatccaggcccctcagtccaagctttggaaaaccttcacctcatcttaaaccgaactcaaatatatttatttttttaccataccaacttctctcccatctctaggtggctcagtccatggccactccctgcccccagcctggctggacagcaaggaatccacagcccacacgtgagctccctcctcacccccaggcagggaagcccctcctgccagtccctgtcccctttcagcccaccagtccctctctgctgccggtgatgggaggcctttctagacctggctctttctctcccgtctcagtggcttctctgaggtgctgtacacgcgcgttaacctgttcccttctctatccttccccgtggtactgagctcacgtggactcccagtgcgaaggggcccatgggttgggctgcaggcctggccgtgagcgggggctgcctgcacgctcccctagcctactcttgtgtttaggggatggtgggaacatatcccagtgcccttgcctcataatagatgtggtgactctcccggtagaccctagcaagggtcctccatggtggtgagggactcaggagaattgtagggattgggggaccctgcctgcctggcttgagaacagccctgctgcccttttgagccgagattttgaagtggatgcccgtcttgccagaaatgctgttctcaccagaatgccccctccccttgcccttactggacttggccctgcctgatgccaagcaaagacccttccccagaggcctaccccccatatgtcctcagagaggctgagtgtcccctccaggcagtcatgggccctgaggcccctcctgcctggccctgctccccagtggggaggtgactgtgtttcccagagtgtgagccgctctcctccccctaaaaagctgactcactgtgagtgaccttgggcaagttcccaaacctccttgtgcctcagtttccccatctggaaaaaatggggccacctcttgccagcagtagcagggctgcccacgcccctttctccccatgccccatccagcacttgggcgactcatgcctctgcctcagtgggcctgtgggagcctactggagcccagcacttactccccctgagcagcgagcctgcgtctgtctcagctgtccagcgctgagggccagggtcttgtgctgtggggctgggggatgccctcttttctatatttatttcatagaaagtctcctgcgggagcggaaatgcagtccggcctagggctcccagcccttgactgtcctcctgtgagggcctgaagctgggccagggcccgtcgcagcggagccccctctcagcagcccaccgggtccctccaggctgctgcccgtgcgtggtctttctcctccttttcaaagcaatagccgccgggtctgcaaagccctgtcagacagactgggcccttccaaggtcaagccatgtgtctgatgacattcctggtgaagcaaaggagaggaggatgggtcagccctcactgggtgtcacacactgagagaagtcctattgtaaagaaacggaaaaagtcacaaaaaagtttgtataaagacatatttttgtactacatggggactcttcctgcatgtcagcaataaaacttcctgatctggaaccactgtggaaaaa

SEQ ID NO: 72818 - DNA, 3582 bp, Homo sapiens
gccagtacggcccacgagaaagagcttagaacatcagttacttttatatgaagaaaaatacaggaacaggctggagttctgtgtttttgagtccattatggaagggtaaaggctacactcctaagagctgagaatgaagcggagagcatcagacagaggagctggggaaacgtcggccagggccaaggctctaggaagtgggatttctggaaataatgcaaagagagctggaccattcatccttggtccccgtctgggcaactcaccggtgccaagcatagtgcagtgtttggcgaggaaagatggcacggatgacttctatcagctgaagatcctgaccctggaggagaggggggaccaaggcatagagagccaggaagagcggcagggcaagatgctgctgcacaccgagtactcactgctgtctctcctgcacacgcaggatggcgtggtgcaccaccacggcctcttccaggaccgcacctgtgaaatcgttgaggacacagaatccagccggatggttaagaagatgaagaagcgcatctgcctcgtcctggactgcctctgtgctcatgacttcagcgataagaccgctgacctcatcaacctgcagcactacgtcatcaaggagaagaggctcagcgagagggagactgtggtaatcttctacgacgtggtccgcgtggtggaggccctgcaccagaaaaatatcgtgcacagagacctgaagctggggaacatggtgctcaacaagaggacacatcggataaccatcaccaacttctgcctcgggaagcatctggtgagcgagggggacctgctgaaggaccagagagggagccctgcctacatcagtcccgacgtgctcagcggccggccgtaccgtggcaagcccagtgacatgtgggccctgggcgtggtgctcttcaccatgctgtatggccagttccccttctacgacagcatcccgcaggagctcttccgcaagatcaaggctgccgagtataccattcctgaggatggacgggtttctgagaacaccgtgtgtctcatccggaagctgctggtccttgacccccagcagcgcctggccgccgccgacgtcctggaggccctcagtgccatcattgcatcatggcagtccctgtcatctctgagtgggcctttgcaagtggttcctgacattgatgaccaaatgagcaatgcggatagctcccaggaggcgaaggtgacggaggagtgctcccagtacgagtttgagaactacatgcgtcagcagctgctgctggccgaggagaagagctccatccatgacgcccggagctgggtacccaagcggcagttcggcagcgcaccaccggtgcgacggctgggccacgacgcacagcccatgacctccttggacacggccatcctggcgcagcgctacctgcggaaataacagcctcagccggggccaccagcactgctgccacttcttccagccccagccaaaggcgtggctgtcagggctgggccctgtagtgctggactctcccgggccacaatagggacagggcagggacagggacagcccaggtcacacgtggggtcagcagaggtaccacgaagctaccttttgggatgattgctcgattgtttggtttttaaatctgagaagcctagataactaatctgcttttaatcacgatgttttaatctacctctgtctctttaaccatgctgtctctggactgagcaagagggaggagggagcctgctcaccccactccagggccttccccagcggccaccaactgacctggggcgctgctccccacagtccaaataagctgaaagtgcagctcgctgcaggccccagagcgagcttcccctcctccctgctctcccaggcccctgccacagcctctttccgtccctctctttctgatccaggcccctcagtccaagctttggaaaaccttcacctcatcttaaaccgaactcaaatatatttatttttttaccataccaacttctctcccatctctaggtggctcagtccatggccactccctgcccccagcctggctggacagcaaggaatccacagcccacacgtgagctccctcctcacccccaggcagggaagcccctcctgccagtccctgtcccctttcagcccaccagtccctctctgctgccggtgatgggaggcctttctagacctggctctttctctcccgtctcagtggcttctctgaggtgctgtacacgcgcgttaacctgttcccttctctatccttccccgtggtactgagctcacgtggactcccagtgcgaaggggcccatgggttgggctgcaggcctggccgtgagcgggggctgcctgcacgctcccctagcctactcttgtgtttaggggatggtgggaacatatcccagtgcccttgcctcataatagatgtggtgactctcccggtagaccctagcaagggtcctccatggtggtgagggactcaggagaattgtagggattgggggaccctgcctgcctggcttgagaacagccctgctgcccttttgagccgagattttgaagtggatgcccgtcttgccagaaatgctgttctcaccagaatgccccctccccttgcccttactggacttggccctgcctgatgccaagcaaagacccttccccagaggcctaccccccatatgtcctcagagaggctgagtgtcccctccaggcagtcatgggccctgaggcccctcctgcctggccctgctccccagtggggaggtgactgtgtttcccagagtgtgagccgctctcctccccctaaaaagctgactcactgtgagtgaccttgggcaagttcccaaacctccttgtgcctcagtttccccatctggaaaaaatggggccacctcttgccagcagtagcagggctgcccacgcccctttctccccatgccccatccagcacttgggcgactcatgcctctgcctcagtgggcctgtgggagcctactggagcccagcacttactccccctgagcagcgagcctgcgtctgtctcagctgtccagcgctgagggccagggtcttgtgctgtggggctgggggatgccctcttttctatatttatttcatagaaagtctcctgcgggagcggaaatgcagtccggcctagggctcccagcccttgactgtcctcctgtgagggcctgaagctgggccagggcccgtcgcagcggagccccctctcagcagcccaccgggtccctccaggctgctgcccgtgcgtggtctttctcctccttttcaaagcaatagccgccgggtctgcaaagccctgtcagacagactgggcccttccaaggtcaagccatgtgtctgatgacattcctggtgaagcaaaggagaggaggatgggtcagccctcactgggtgtcacacactgagagaagtcctattgtaaagaaacggaaaaagtcacaaaaaagtttgtataaagacatatttttgtactacatggggactcttcctgcatgtcagcaataaaacttcctgatctggaaccactgtggaaaaa

SEQ ID NO: 72819 - DNA, 3823 bp, Homo sapiens
agtactatctctctctgtctctgtggtatctcttggggcctgtatgcattagcatctgcacggagcccagttttctcctctctgaatgtaactggccacttggtggtggtgtgttagctccccgcctctgtaccctgtatatgctgccttacaggatgtccacctttagcatctaatttatccctagtcaaggagctgtggttgtttgtcacttggagccttggatgctcccctggtagctaggaggagttggaggcagcagcggcagctgtgtgatgcatcccaagtccacggcccgcaggctgggttagcataaggaaactcgctgacttactcagtgagaaggggtctttctgtcttgtctagagctgagaatgaagcggagagcatcagacagaggagctggggaaacgtcggccagggccaaggctctaggaagtgggatttctggaaataatgcaaagagagctggaccattcatccttggtccccgtctgggcaactcaccggtgccaagcatagtgcagtgtttggcgaggaaagatggcacggatgacttctatcagctgaagatcctgaccctggaggagaggggggaccaaggcatagagagccaggaagagcggcagggcaagatgctgctgcacaccgagtactcactgctgtctctcctgcacacgcaggatggcgtggtgcaccaccacggcctcttccaggaccgcacctgtgaaatcgttgaggacacagaatccagccggatggttaagaagatgaagaagcgcatctgcctcgtcctggactgcctctgtgctcatgacttcagcgataagaccgctgacctcatcaacctgcagcactacgtcatcaaggagaagaggctcagcgagagggagactgtggtaatcttctacgacgtggtccgcgtggtggaggccctgcaccagaaaaatatcgtgcacagagacctgaagctggggaacatggtgctcaacaagaggacacatcggataaccatcaccaacttctgcctcgggaagcatctggtgagcgagggggacctgctgaaggaccagagagggagccctgcctacatcagtcccgacgtgctcagcggccggccgtaccgtggcaagcccagtgacatgtgggccctgggcgtggtgctcttcaccatgctgtatggccagttccccttctacgacagcatcccgcaggagctcttccgcaagatcaaggctgccgagtataccattcctgaggatggacgggtttctgagaacaccgtgtgtctcatccggaagctgctggtccttgacccccagcagcgcctggccgccgccgacgtcctggaggccctcagtgccatcattgcatcatggcagtccctgtcatctctgagtgggcctttgcaagtggttcctgacattgatgaccaaatgagcaatgcggatagctcccaggaggcgaaggtgacggaggagtgctcccagtacgagtttgagaactacatgcgtcagcagctgctgctggccgaggagaagagctccatccatgacgcccggagctgggtacccaagcggcagttcggcagcgcaccaccggtgcgacggctgggccacgacgcacagcccatgacctccttggacacggccatcctggcgcagcgctacctgcggaaataacagcctcagccggggccaccagcactgctgccacttcttccagccccagccaaaggcgtggctgtcagggctgggccctgtagtgctggactctcccgggccacaatagggacagggcagggacagggacagcccaggtcacacgtggggtcagcagaggtaccacgaagctaccttttgggatgattgctcgattgtttggtttttaaatctgagaagcctagataactaatctgcttttaatcacgatgttttaatctacctctgtctctttaaccatgctgtctctggactgagcaagagggaggagggagcctgctcaccccactccagggccttccccagcggccaccaactgacctggggcgctgctccccacagtccaaataagctgaaagtgcagctcgctgcaggccccagagcgagcttcccctcctccctgctctcccaggcccctgccacagcctctttccgtccctctctttctgatccaggcccctcagtccaagctttggaaaaccttcacctcatcttaaaccgaactcaaatatatttatttttttaccataccaacttctctcccatctctaggtggctcagtccatggccactccctgcccccagcctggctggacagcaaggaatccacagcccacacgtgagctccctcctcacccccaggcagggaagcccctcctgccagtccctgtcccctttcagcccaccagtccctctctgctgccggtgatgggaggcctttctagacctggctctttctctcccgtctcagtggcttctctgaggtgctgtacacgcgcgttaacctgttcccttctctatccttccccgtggtactgagctcacgtggactcccagtgcgaaggggcccatgggttgggctgcaggcctggccgtgagcgggggctgcctgcacgctcccctagcctactcttgtgtttaggggatggtgggaacatatcccagtgcccttgcctcataatagatgtggtgactctcccggtagaccctagcaagggtcctccatggtggtgagggactcaggagaattgtagggattgggggaccctgcctgcctggcttgagaacagccctgctgcccttttgagccgagattttgaagtggatgcccgtcttgccagaaatgctgttctcaccagaatgccccctccccttgcccttactggacttggccctgcctgatgccaagcaaagacccttccccagaggcctaccccccatatgtcctcagagaggctgagtgtcccctccaggcagtcatgggccctgaggcccctcctgcctggccctgctccccagtggggaggtgactgtgtttcccagagtgtgagccgctctcctccccctaaaaagctgactcactgtgagtgaccttgggcaagttcccaaacctccttgtgcctcagtttccccatctggaaaaaatggggccacctcttgccagcagtagcagggctgcccacgcccctttctccccatgccccatccagcacttgggcgactcatgcctctgcctcagtgggcctgtgggagcctactggagcccagcacttactccccctgagcagcgagcctgcgtctgtctcagctgtccagcgctgagggccagggtcttgtgctgtggggctgggggatgccctcttttctatatttatttcatagaaagtctcctgcgggagcggaaatgcagtccggcctagggctcccagcccttgactgtcctcctgtgagggcctgaagctgggccagggcccgtcgcagcggagccccctctcagcagcccaccgggtccctccaggctgctgcccgtgcgtggtctttctcctccttttcaaagcaatagccgccgggtctgcaaagccctgtcagacagactgggcccttccaaggtcaagccatgtgtctgatgacattcctggtgaagcaaaggagaggaggatgggtcagccctcactgggtgtcacacactgagagaagtcctattgtaaagaaacggaaaaagtcacaaaaaagtttgtataaagacatatttttgtactacatggggactcttcctgcatgtcagcaataaaacttcctgatctggaaccactgtggaaaaa

SEQ ID NO: 72820 - DNA, 5602 bp, Homo sapiens
  misc_feature (2068)..(2068): n is a, c, g, or t
  misc_feature (2207)..(2207): n is a, c, g, or t
  misc_feature (2230)..(2230): n is a, c, g, or t
  misc_feature (2377)..(2377): n is a, c, g, or t
ataaatccccctttttgtgtctcagggcagacagaggttctggctgccttttacttgagtcatgggcgctccagagtggcagggtagtgtggtacagagagactcactgctccgtgtgtgtcctctggcacaccctccgctctggggccccactctcacctcgttcagttgacctgaaggagctccagcccactccagccccttcccacccatcatgccaggctataactccactggagcagtaggcggaccagctggaggccttctcagcagagcagagagctctcaaggagcagacagggggaggtgttggcaaggcagctgcaacaacaagttcaccccgctttggattttaaaaggatcgaaattcgaaatcctcttctggggttatgtgaggtgctgtggggtctttttccttcctcctttctttttggtaggcaagcaacataccaagttcctagaaaaggagaaaaacactgtggcagcccagagggccatagctaaagcgtgactcactcagagccgatcctactgacacacgtcccctccctccgtcccactctgccattgccccctcctgtcaggaccagactagggggtctgggactcccggggagccatgcaccccccacttgggtggtggtggcagggcaggggagtgttgccaaacctcaggaggacttggagctgcccgtgccacttcctgtggagagactccagtgcgcctgccgctcagccctgcagagcctcagctgtgcctgcccgtgccctggcagagggtgggaaagtcccaccagcagtgttgagttgaaagctcagccacactggcatgtgctctccggggcctgttgtcacaccatggcacctctcccctaccgcctccaagacagagtcttttcctaccaggtgtgccaaccatcggagatgagaggacaccagcttctactatttgccaggcattgggctaagtgccctccatgagattatcttatcttgctgaatcctaacccagttctggagtttggtgctgggatttcactgttgtacgcatgaggaaattgaggtttagcaagagattcacagagcaaggaagtggcagagccaggactaggaacctggctcccaaacccaccgtactttctcctgagctgtcctcctctcagcgtcttgagcctcagagacccacaggatgcatttgcagcttccgcggccatctctgaccaggggagaaaacccacagtgcctctgctctgtgggaaccttctggacaagaggcccgagcagccccatattcagggcagcggcactggagcttcagagctagagcagcccactccttgacgtgcaagtgaccctttgcagtgacccttcacctgtgcgatcaggctctagccgcctgcgggccaccagtcagactcctatggcagctgacagggcggacctgtataggcgctggagttggcgtttccgtggggaatccagaggacgggctggcctttgttttgcatcgagccctttgccagcagaattccccgagatcaccgagggctctcagagccgcctggatgcggctcccggggaaatccgccagcagccacacatgccctctgcctctgagagctgattgtagggagaggcagcccaaggcccccatggagctctccttcctgttgtcctcccagcttctccccctagcttctccacccagccagccgacacaggagcagggcagttgggtagagaggcatccttcctcactgcctgccccagtgggccaggaaacctttcccaggcctcttagacagggcctgcccaccctcccagcccccagtgtggtgtaaggtgtaagggtcctctcggggcacttccttttgtccacatgtgagttttctccaaaggatcagagcccaaagctgccctgccccacgcctttcagagggagggtctgtgatgttctagccagggcagagtcacaagtacgaggtaagggatgagtcagctttgatggaacagaaggaaaagtcattcggggcctggggccctgcccagggacacatctgggcatgangcagctgtcagttgtgtgtgcagctctggggccctgcagacctggtcttggatcctgctcttctgctcaccagctgcatgaccttggccaagtcctttcacttccctgtgcctttgttgtatcatctgaaacaggaccntgagaaaatccccctcattggcnactgtcagtttcttcctctgcagtggttgtggggccaagtgagaactgacatattccgtggttcggaggtggctcggggccagcccttgggtcaccttccaaggtggagtcactcacctctgctggacttccttttcctcatgtgtnaatgaggaaattgaactaaatctcaggtcactcccagtctagaatattacgtgaggctgtttttgagaaatctctgaaagttgttctaagccctaagctgtaccccgagattcagcccgggcagcaggtccagggatggcctgtgcaacactcagatacctgggagagaagccgatccctgctgggacagctcggctggtggccagaaaagtctggggcctgattcctctgctctgctccctggagagggggtcggggcagctgcttcaccctctgacgagaagcctacctcctactgttcaggattgggtgttggcccagtgaggtgtgtcctgcctgcgtgtcttgtgcctgttgctatagacactgaggtttgttcactctgtctcccactcctaggacacatcggataaccatcaccaacttctgcctcgggaagcatctggtgagcgagggggacctgctgaaggaccagagagggagccctgcctacatcagtcccgacgtgctcagcggccggccgtaccgtggcaagcccagtgacatgtgggccctgggcgtggtgctcttcaccatgctgtatggccagttccccttctacgacagcatcccgcaggagctcttccgcaagatcaaggctgccgagtataccattcctgaggatggacgggtttctgagaacaccgtgtgtctcatccggaagctgctggtccttgacccccagcagcgcctggccgccgccgacgtcctggaggccctcagtgccatcattgcatcatggcagtccctgtcatctctgagtgggcctttgcaagtggttcctgacattgatgaccaaatgagcaatgcggatagctcccaggaggcgaaggtgacggaggagtgctcccagtacgagtttgagaactacatgcgtcagcagctgctgctggccgaggagaagagctccatccatgacgcccggagctgggtacccaagcggcagttcggcagcgcaccaccggtgcgacggctgggccacgacgcacagcccatgacctccttggacacggccatcctggcgcagcgctacctgcggaaataacagcctcagccggggccaccagcactgctgccacttcttccagccccagccaaaggcgtggctgtcagggctgggccctgtagtgctggactctcccgggccacaatagggacagggcagggacagggacagcccaggtcacacgtggggtcagcagaggtaccacgaagctaccttttgggatgattgctcgattgtttggtttttaaatctgagaagcctagataactaatctgcttttaatcacgatgttttaatctacctctgtctctttaaccatgctgtctctggactgagcaagagggaggagggagcctgctcaccccactccagggccttccccagcggccaccaactgacctggggcgctgctccccacagtccaaataagctgaaagtgcagctcgctgcaggccccagagcgagcttcccctcctccctgctctcccaggcccctgccacagcctctttccgtccctctctttctgatccaggcccctcagtccaagctttggaaaaccttcacctcatcttaaaccgaactcaaatatatttatttttttaccataccaacttctctcccatctctaggtggctcagtccatggccactccctgcccccagcctggctggacagcaaggaatccacagcccacacgtgagctccctcctcacccccaggcagggaagcccctcctgccagtccctgtcccctttcagcccaccagtccctctctgctgccggtgatgggaggcctttctagacctggctctttctctcccgtctcagtggcttctctgaggtgctgtacacgcgcgttaacctgttcccttctctatccttccccgtggtactgagctcacgtggactcccagtgcgaaggggcccatgggttgggctgcaggcctggccgtgagcgggggctgcctgcacgctcccctagcctactcttgtgtttaggggatggtgggaacatatcccagtgcccttgcctcataatagatgtggtgactctcccggtagaccctagcaagggtcctccatggtggtgagggactcaggagaattgtagggattgggggaccctgcctgcctggcttgagaacagccctgctgcccttttgagccgagattttgaagtggatgcccgtcttgccagaaatgctgttctcaccagaatgccccctccccttgcccttactggacttggccctgcctgatgccaagcaaagacccttccccagaggcctaccccccatatgtcctcagagaggctgagtgtcccctccaggcagtcatgggccctgaggcccctcctgcctggccctgctccccagtggggaggtgactgtgtttcccagagtgtgagccgctctcctccccctaaaaagctgactcactgtgagtgaccttgggcaagttcccaaacctccttgtgcctcagtttccccatctggaaaaaatggggccacctcttgccagcagtagcagggctgcccacgcccctttctccccatgccccatccagcacttgggcgactcatgcctctgcctcagtgggcctgtgggagcctactggagcccagcacttactccccctgagcagcgagcctgcgtctgtctcagctgtccagcgctgagggccagggtcttgtgctgtggggctgggggatgccctcttttctatatttatttcatagaaagtctcctgcgggagcggaaatgcagtccggcctagggctcccagcccttgactgtcctcctgtgagggcctgaagctgggccagggcccgtcgcagcggagccccctctcagcagcccaccgggtccctccaggctgctgcccgtgcgtggtctttctcctccttttcaaagcaatagccgccgggtctgcaaagccctgtcagacagactgggcccttccaaggtcaagccatgtgtctgatgacattcctggtgaagcaaaggagaggaggatgggtcagccctcactgggtgtcacacactgagagaagtcctattgtaaagaaacggaaaaagtcacaaaaaagtttgtataaagacatatttttgtactacatggggactcttcctgcatgtcagcaataaaacttcctgatctggaaccactgtggaaaaa

SEQ ID NO: 72821 - DNA, 2342 bp, Homo sapiens
  misc_feature (18)..(18): n is a, c, g, or t
  misc_feature (24)..(24): n is a, c, g, or t
  misc_feature (33)..(33): n is a, c, g, or t
cgtagaggggcacagcantgtctngagtcgagnagaggtggcggcgccgcagccatggagggaggcggcggcggcggcggcggcggctcgggtggctgcgctgggaggcggcggtgagaggctcgcacgcctccagcccggccccggccccccgggagggagagccgagcagccccggctctgcgctacctgcggaaataacagcctcagccggggccaccagcactgctgccacttcttccagccccagccaaaggcgtggctgtcagggctgggccctgtagtgctggactctcccgggccacaatagggacagggcagggacagggacagcccaggtcacacgtggggtcagcagaggtaccacgaagctaccttttgggatgattgctcgattgtttggtttttaaatctgagaagcctagataactaatctgcttttaatcacgatgttttaatctacctctgtctctttaaccatgctgtctctggactgagcaagagggaggagggagcctgctcaccccactccagggccttccccagcggccaccaactgacctggggcgctgctccccacagtccaaataagctgaaagtgcagctcgctgcaggccccagagcgagcttcccctcctccctgctctcccaggcccctgccacagcctctttccgtccctctctttctgatccaggcccctcagtccaagctttggaaaaccttcacctcatcttaaaccgaactcaaatatatttatttttttaccataccaacttctctcccatctctaggtggctcagtccatggccactccctgcccccagcctggctggacagcaaggaatccacagcccacacgtgagctccctcctcacccccaggcagggaagcccctcctgccagtccctgtcccctttcagcccaccagtccctctctgctgccggtgatgggaggcctttctagacctggctctttctctcccgtctcagtggcttctctgaggtgctgtacacgcgcgttaacctgttcccttctctatccttccccgtggtactgagctcacgtggactcccagtgcgaaggggcccatgggttgggctgcaggcctggccgtgagcgggggctgcctgcacgctcccctagcctactcttgtgtttaggggatggtgggaacatatcccagtgcccttgcctcataatagatgtggtgactctcccggtagaccctagcaagggtcctccatggtggtgagggactcaggagaattgtagggattgggggaccctgcctgcctggcttgagaacagccctgctgcccttttgagccgagattttgaagtggatgcccgtcttgccagaaatgctgttctcaccagaatgccccctccccttgcccttactggacttggccctgcctgatgccaagcaaagacccttccccagaggcctaccccccatatgtcctcagagaggctgagtgtcccctccaggcagtcatgggccctgaggcccctcctgcctggccctgctccccagtggggaggtgactgtgtttcccagagtgtgagccgctctcctccccctaaaaagctgactcactgtgagtgaccttgggcaagttcccaaacctccttgtgcctcagtttccccatctggaaaaaatggggccacctcttgccagcagtagcagggctgcccacgcccctttctccccatgccccatccagcacttgggcgactcatgcctctgcctcagtgggcctgtgggagcctactggagcccagcacttactccccctgagcagcgagcctgcgtctgtctcagctgtccagcgctgagggccagggtcttgtgctgtggggctgggggatgccctcttttctatatttatttcatagaaagtctcctgcgggagcggaaatgcagtccggcctagggctcccagcccttgactgtcctcctgtgagggcctgaagctgggccagggcccgtcgcagcggagccccctctcagcagcccaccgggtccctccaggctgctgcccgtgcgtggtctttctcctccttttcaaagcaatagccgccgggtctgcaaagccctgtcagacagactgggcccttccaaggtcaagccatgtgtctgatgacattcctggtgaagcaaaggagaggaggatgggtcagccctcactgggtgtcacacactgagagaagtcctattgtaaagaaacggaaaaagtcacaaaaaagtttgtataaagacatatttttgtactacatggggactcttcctgcatgtcagcaataaaacttcctgatctggaaccactgtggaaaaa

SEQ ID NO: 72822 - DNA, 2626 bp, Homo sapiens
  misc_feature (18)..(18): n is a, c, g, or t
  misc_feature (24)..(24): n is a, c, g, or t
  misc_feature (33)..(33): n is a, c, g, or t
cgtagaggggcacagcantgtctngagtcgagnagaggtggcggcgccgcagccatggagggaggcggcggcggcggcggcggcggctcgggtggctgcgctgggaggcggcggtgagaggctcgcacgcctccagcccggccccggccccccgggagggagagccgagcagccccggctctgggctacggactatgggcgaatagctctgaccacccggcgaagagctgagaatgaagcggagagcatcagacagaggagctggggaaacgtcggccagggccaaggctctaggaagtgggatttctggaaataatgcaaagagagctggaccattcatccttggtccccgtctgggcaactcaccggtgccaagcatagtgcagtgtttggcgaggaaagatggcacggatgacttctatcagctgaagatcctgaccctggaggagaggggggaccaaggcatagagagccaggaagagcggcagggcaagatgctgctgcacaccgagtactcactgctgtctctcctgcacacgcaggatggcgtggtgcaccaccacggcctcttccaggaccgcacctgtgaaatcgttgaggacacagaatccagccggatggttaagaagatgaagaagcgcatctgcctcgtcctggactgcctctgtgctcatgacttcagcgataagaccgctgacctcatcaacctgcagcactacgtcatcaaggagaagaggctcagcgagagggagactgtggtaatcttctacgacgtggtccgcgtggtggaggccctgcaccagaaaaatatcgtgcacagagacctgaagctggggaacatggtgctcaacaagaggacacatcggataaccatcaccaacttctgcctcgggaagcatctggtgagcgagggggacctgctgaaggaccagagagggagccctgcctacatcagtcccgacgtgctcagcggccggccgtaccgtggcaagcccagtgacatgtgggccctgggcgtggtgctcttcaccatgctgtatggccagttccccttctacgacagcatcccgcaggagctcttccgcaagatcaaggctgccgagtataccattcctgaggatggacgggtttctgagaacaccgtgtgtctcatccggaagctgctggtccttgacccccagcagcgcctggccgccgccgacgtcctggaggccctcagtgccatcattgcatcatggcagtccctgtcatctctgagtgggcctttgcaagtggttcctgacattgatgaccaaatgagcaatgcggatagctcccaggaggcgaaggtgacggaggagtgctcccagtacgagtttgagaactacatgcgtcagcagctgctgctggccgaggagaagagctccatccatgacgcccggagctgggtacccaagcggcagttcggcagcgcaccaccggtgcgacggctgggccacgacgcacagcccatgacctccttggacacggccatcctggcgcagcgctacctgcggaaataacagcctcagccggggccaccagcactgctgccacttcttccagccccagccaaaggcgtggctgtcagggctgggccctgtagtgctggactctcccgggccacaatagggacagggcagggacagggacagcccaggtcacacgtggggtcagcagaggtaccacgaagctaccttttgggatgattgctcgattgtttggtttttaaatctgagaagcctagataactaatctgcttttaatcacgatgttttaatctacctctgtctctttaaccatgctgtctctggactgagcaagagggaggagggagcctgctcaccccactccagggccttccccagcggccaccaactgacctggggcgctgctccccacagtccaaataagctgaaagtgcagctcgctgcaggccccagagcgagcttcccctcctccctgctctcccaggcccctgccacagcctctttccgtccctctctttctgatccaggcccctcagtccaagctttggaaaaccttcacctcatcttaaaccgaactcaaatatatttatttttttaccataccaacttctctcccatctctaggtggctcagtccatggccactccctgcccccagcctggctggacagcaaggaatccacagcccacacgtgagctccctcctcacccccaggcagggaagcccctcctgccagtccctgtcccctttcagcccaccagtccctctctgctgccggtgatgggaggcctttctagacctggctctttctctcccgtctcagtggcttctctgaggctcctccttttcaaagcaatagccgccgggtctgcaaagccctgtcagacagactgggcccttccaaggtcaagccatgtgtctgatgacattcctggtgaagcaaaggagaggaggatgggtcagccctcactgggtgtcacacactgagagaagtcctattgtaaagaaacggaaaaagtcacaaaaaagtttgtataaagacatatttttgtactacatggggactcttcctgcatgtcagcaataaaacttcctgatctggaaccactgtggaaaaa

SEQ ID NO: 72823 - DNA, 734 bp, Homo sapiens
ctctttatcctgtcccccctgtttcctttctctcccatttgggctcccccaattttccctattggccacccttttcggtggtcgacctctagtgcctctgcctcagtgggcctgtgggtagcctactggagcccagcacttactccccctgagcagtcgtagccctgcgttcttgtctccatgccttgttcccccaagtgccggccctgggtaaggtgggtccccaaaggggttcctttgtgtctgctgtgcggctctgtgggggatgccctcttttctatatttatttcatagaaagtctcctgcgggagcggaaatgcagtccggcctagggctcccagcccttgactgtcctcctgtgagggcctgaagctgggccagggcccgtcgcagcggagccccctctcagcagcccaccgggtccctccaggctgctgcccgtgcgtggtctttctcctccttttcaaagcaatagccgccgggtctgcaaagccctgtcagacagactgggcccttccaaggtcaagccatgtgtctgatgacattcctggtgaagcaaaggagaggaggatgggtcagccctcactgggtgtcacacactgagagaagtcctattgtaaagaaacggaaaaagtcacaaaaaagtttgtataaagacatatttttgtactacatggggactcttcctgcatgtcagcaataaaacttcctgatctggaaccactgtggaaaaa

SEQ ID NO: 72824 - DNA, 258 bp, Homo sapiens
ccagggccgccgaccctggcaatgactgtcaccagctggagggaaggtatccgttcactcatggagtatctgctgggcctggcagtgggctgcagtggttttatatatatgtttatacatttgtttttccttgtgaaatttttagttgtggtggaatttttctggtggaggggggcagacattaagcatataaacacaaataaatacatagttacaaaatctggaaagtactatggaggaaaattacagaccaccatg

SEQ ID NO: 72825 - DNA, 2481 bp, Homo sapiens
  misc_feature (18)..(18): n is a, c, g, or t
  misc_feature (24)..(24): n is a, c, g, or t
  misc_feature (33)..(33): n is a, c, g, or t
cgtagaggggcacagcantgtctngagtcgagnagaggtggcggcgccgcagccatggagggaggcggcggcggcggcggcggcggctcgggtggctgcgctgggaggcggcggtgagaggctcgcacgcctccagcccggccccggccccccgggagggagagccgagcagccccggctctgggctacggactatgggcgaatagctctgaccacccggcgaagagctgagaatgaagcggagagcatcagacagaggagctggggaaacgtcggccagggccaaggctctaggaagtgggatttctggaaataatgcaaagagagctggaccattcatccttggtccccgtctgggcaactcaccggtgccaagcatagtgcagtgtttggcgaggaaagatggcacggatgacttctatcagctgaagatcctgaccctggaggagaggggggaccaaggcatagagagccaggaagagcggcagggcaagatgctgctgcacaccgagtactcactgctgtctctcctgcacacgcaggatggcgtggtgcaccaccacggcctcttccaggaccgcacctgtgaaatcgttgaggacacagaatccagccggatggttaagaagatgaagaagcgcatctgcctcgtcctggactgcctctgtgctcatgacttcagcgataagaccgctgacctcatcaacctgcagcactacgtcatcaaggagaagaggctcagcgagagggagactgtggtaatcttctacgacgtggtccgcgtggtggaggccctgcaccagaaaaatatcgtgcacagagacctgaagctggggaacatggtgctcaacaagaggacacatcggataaccatcaccaacttctgcctcgggaagcatctggtgagcgagggggacctgctgaaggaccagagagggagccctgcctacatcagtcccgacgtgctcagcggccggccgtaccgtggcaagcccagtgacatgtgggccctgggcgtggtgctcttcaccatgctgtatggccagttccccttctacgacagcatcccgcaggagctcttccgcaagatcaaggctgccgagtataccattcctgaggatggacgggtttctgagaacaccgtgtgtctcatccggaagctgctggtccttgacccccagcagcgcctggccgccgccgacgtcctggaggccctcagtgccatcattgcatcatggcagtccctgtcatctctgagtgggcctttgcaagtggttcctgacattgatgaccaaatgagcaatgcggatagctcccaggaggcgaaggtgacggaggagtgctcccagtacgagtttgagaactacatgcgtcagcagctgctgctggccgaggagaagagctccatccatgacgcccggagctgggtacccaagcggcagttcggcagcgcaccaccggtgcgacggctgggccacgacgcacagcccatgacctccttggacacggccatcctggcgcagcgctacctgcggaaataacagcctcagccggggccaccagcactgctgccacttcttccagccccagccaaaggcgtggctgtcagggctgggccctgtagtgctggactctcccgggccacaatagggacagggcagggacagggacagcccaggtcacacgtggggtcagcagaggtaccacgaagctaccttttgggatgattgctcgattgtttggtttttaaatctgagaagcctagataactaatctgcttttaatcacgatgttttaatctacctctgtctctttaaccatgctgtctctggactgagcaagagggaggagggagcctgctcaccccactccagggccttccccagcggccaccaactgacctggggcgctgctccccacagtccaaataagctgaaagtgcagctcgctgcaggccccagagcgagcttcccctcctccctgctctcccaggcccctgccacagcctctttccgtccctctctttctgatccaggcccctcagtccaagctttggaaaaccttcacctcatcttaaaccgaactcaaatatatttatttttttaccataccaacttctctcccatctctaggtggctcagtccatggccactccctgcccccagcctggctggacagcaaggaatccacagcccacacgtgagctccctcctcacccccaggcagggaagcccctcctgccagtccctgtcccctttcagcccaccagtccctctctgctgccggtgatgggaggcctttctagacctggctctttctctcccgtctcagtggcttctctgaggactgagagaagtcctattgtaaagaaacggaaaaagtcacaaaaaagtttgtataaagacatatttttgtactacatggggactcttcctgcatgtcagcaataaaacttcctgatctggaaccactgtggaaaaa

SEQ ID NO: 72826 - DNA, 1492 bp, Homo sapiens
  misc_feature (18)..(18): n is a, c, g, or t
  misc_feature (24)..(24): n is a, c, g, or t
  misc_feature (33)..(33): n is a, c, g, or t
cgtagaggggcacagcantgtctngagtcgagnagaggtggcggcgccgcagccatggagggaggcggcggcggcggcggcggcggctcgggtggctgcgctgggaggcggcggtgagaggctcgcacgcctccagcccggccccggccccccgggagggagagccgagcagccccggctctgggctacggactatgggcgaatagctctgaccacccggcgaagagctgagaatgaagcggagagcatcagacagaggagctggggaaacgtcggccagggccaaggctctaggaagtgggatttctggaaataatgcaaagagagctggaccattcatccttggtccccgtctgggcaactcaccggtgccaagcatagtgcagtgtttggcgaggaaagatggcacggatgacttctatcagctgaagatcctgaccctggaggagaggggggaccaaggcatagagagccaggaagagcggcagggcaagatgctgctgcacaccgagtactcactgctgtctctcctgcacacgcaggatggcgtggtgcaccaccacggcctcttccaggaccgcacctgtgaaatcgttgaggacacagaatccagccggatggttaagaagatgaagaagcgcatctgcctcgtcctggactgcctctgtgctcatgacttcagcgataagaccgctgacctcatcaacctgcagcactacgtcatcaaggagaagaggctcagcgagagggagactgtggtaatcttctacgacgtggtccgcgtggtggaggccctgcaccagaaaaatatcgtgcacagagacctgaagctggggaacatggtgctcaacaagaggacacatcggataaccatcaccaacttctgcctcgggaagcatctggtgagcgagggggacctgctgaaggaccagagagggagccctgcctacatcagtcccgacgtgctcagcggccggccgtaccgtggcaagcccagtgacatgtgggccctgggcgtggtgctcttcaccatgctgtatggccagttccccttctacgacagcatcccgcaggagctcttccgcaagatcaaggctgccgagtataccattcctgatgctgtacacgcgcgttaacctgttcccttctctatccttccccgtggtactgagctcacgtggactcccagctgctgcccgtgcgtggtctttctcctccttttcaaagcaatagccgccgggtctgcaaagccctgtcagacagactgggcccttccaaggtcaagccatgtgtctgatgacattcctggtgaagcaaaggagaggaggatgggtcagccctcactgggtgtcacacactgagagaagtcctattgtaaagaaacggaaaaagtcacaaaaaagtttgtataaagacatatttttgtactacatggggactcttcctgcatgtcagcaataaaacttcctgatctggaaccactgtggaaaaa

SEQ ID NO: 72827 - DNA, 1349 bp, Homo sapiens
taaagatagggcagatagccccaacacactaccctgcacacagaaaataatcattggtcttcactagtgaaataagcagtgggttgctaagggccaacttgcctgaacaggctacacaagaacctcagagcccaacccattgtgaagaaacatgggttacttctgaggttctagaattcccagaagctctgcttcagcactggaagcttttgctcgcagtttgcttcatagctctgtgaagaagctgtggcccacactggggtcccctcttttcctaaatccagatgaacaggtttctcttgctaatgagtctttatctgcttggatctgccagaggaacatcaagtcagcctaatgagctttctggctccatagatcatcaaacttcagttcagcaacttccaggtgagttcttttcacttgaaaacccttctgatgctgaggctttatatgagacttcttcaggcctgaacactttaagtgagcatggttccagtgagcatggttcaagcaagcacactgtggccgagcacacttctggagaacatgctgagagtgagcatgcttcaggtgagcccgctgcgactgaacatgctgaaggtgagcatactgtaggtgagcagccttcaggagaacagccttcaggtgaacacctctccggagaacagcctttgagtgagcttgagtcaggtgaacagccttcagatgaacagccttcaggtgaacatggctccggtgaacagccttctggtgagcaggcctcgggtgaacagccttcaggtgagcacgcttcaggggaacaggcttcaggtgcaccaatttcaagcacatctacaggcacaatattaaattgctacacatgtgcttatatgaatgatcaaggaaaatgtcttcgtggagagggaacctgcatcactcagaattcccagcagtgcatgttaaagaagatctttgaaggtggaaaactccaattcatggttcaagggtgtgagaacatgtgcccatctatgaacctcttctcccatggaacgaggatgcaaattatatgctgtcgaaatcaatctttctgcaataagatctagaagcctgggcccttgcttgttttgactcaggcagtaaaaagcctccatcactctatttggctcattttatatttagttccttccccagtcaacaactgaccacatctgcctctgcctgagcattaggatgctcaaacatcctatctttcttcttctattcatgcttttatccattcttctctgtcctgtcttccctgctccaactctttctctcaatattcctgatttttttttcaataaatttcacatggttaaagcaaacaggct

SEQ ID NO: 72828 - DNA, 1064 bp, Homo sapiens
taaagatagggcagatagccccaacacactaccctgcacacagaaaataatcattggtcttcactagtgaaataagcagtgggttgctaagggccaacttgcctgaacaggctacacaagaacctcagagcccaacccattgtgaagaaacatgggttacttctgaggttctagaattcccagaagctctgcttcagcactggaagcttttgctcgcagtttgcttcatagctctgtgaagaagctgtggcccacactggggtcccctcttttcctaaatccagatgaacaggtttctcttgctaatgagtctttatctgcttggatctgccagaggaacatcaagtcagcctaatgagctttctggctccatagatcatcaaacttcagttcagcaacttccaggtgaacagccttcagatgaacagccttcaggtgaacatggctccggtgaacagccttctggtgagcaggcctcgggtgaacagccttcaggtgagcacgcttcaggggaacaggcttcaggtgcaccaatttcaagcacatctacaggcacaatattaaattgctacacatgtgcttatatgaatgatcaaggaaaatgtcttcgtggagagggaacctgcatcactcagaattcccagcagtgcatgttaaagaagatctttgaaggtggaaaactccaattcatggttcaagggtgtgagaacatgtgcccatctatgaacctcttctcccatggaacgaggatgcaaattatatgctgtcgaaatcaatctttctgcaataagatctagaagcctgggcccttgcttgttttgactcaggcagtaaaaagcctccatcactctatttggctcattttatatttagttccttccccagtcaacaactgaccacatctgcctctgcctgagcattaggatgctcaaacatcctatctttcttcttctattcatgcttttatccattcttctctgtcctgtcttccctgctccaactctttctctcaatattcctgatttttttttcaataaatttcacatggttaaagcaaacaggct

SEQ ID NO: 72829 - DNA, 1139 bp, Homo sapiens
taaagatagggcagatagccccaacacactaccctgcacacagaaaataatcattggtcttcactagtgaaataagcagtgggttgctaagggccaacttgcctgaacaggctacacaagaacctcagagcccaacccattgtgaagaaacatgggttacttctgaggttctagaattcccagaagctctgcttcagcactggaagcttttgctcgcagtttgcttcatagctctgtgaagaagctgtggcccacactggggtcccctcttttcctaaatccagatgaacaggtttctcttgctaatgagtctttatctgcttggatctgccagaggaacatcaagtcagcctaatgagctttctggctccatagatcatcaaacttcagttcagcaacttccaggtgagcagccttcaggagaacagccttcaggtgaacacctctccggagaacagcctttgagtgagcttgagtcaggtgaacagccttcagatgaacagccttcaggtgaacatggctccggtgaacagccttctggtgagcaggcctcgggtgaacagccttcaggtgagcacgcttcaggggaacaggcttcaggtgcaccaatttcaagcacatctacaggcacaatattaaattgctacacatgtgcttatatgaatgatcaaggaaaatgtcttcgtggagagggaacctgcatcactcagaattcccagcagtgcatgttaaagaagatctttgaaggtggaaaactccaattcatggttcaagggtgtgagaacatgtgcccatctatgaacctcttctcccatggaacgaggatgcaaattatatgctgtcgaaatcaatctttctgcaataagatctagaagcctgggcccttgcttgttttgactcaggcagtaaaaagcctccatcactctatttggctcattttatatttagttccttccccagtcaacaactgaccacatctgcctctgcctgagcattaggatgctcaaacatcctatctttcttcttctattcatgcttttatccattcttctctgtcctgtcttccctgctccaactctttctctcaatattcctgatttttttttcaataaatttcacatggttaaagcaaacaggct

SEQ ID NO: 72830 - DNA, 1292 bp, Homo sapiens
taaagatagggcagatagccccaacacactaccctgcacacagaaaataatcattggtcttcactagtgaaataagcagtgggttgctaagggccaacttgcctgaacaggctacacaagaacctcagagcccaacccattgtgaagaaacatgggttacttctgaggttctagaattcccagaagctctgcttcagcactggaagcttttgctcgcagtttgcttcatagctctgtgaagaagctgtggcccacactggggtcccctcttttcctaaatccagatgaacaggtttctcttgctaatgagtctttatctgcttggatctgccagaggaacatcaagtcagcctaatgagctttctggctccatagatcatcaaacttcagttcagcaacttccaggtgagttcttttcacttgaaaacccttctgatgctgaggctttatatgagacttcttcaggcctgaacactttaagtgagcatggttccagtgagcatggttcaagcaagcacactgtggccgagcacacttctggagaacatgctgagagtgagcatgcttcaggtgagcccgctgcgactgaacatgctgaaggtgagcatactgtaggtgagcagccttcaggagaacagccttcaggtgaacacctctccggagaacagcctttgagtgagcttgagtcaggtgaacagccttcagatgaacagccttcaggtgaacatggctccggtgaacagccttctggtgagcaggcctcgggtgaacagccttcaggcacaatattaaattgctacacatgtgcttatatgaatgatcaaggaaaatgtcttcgtggagagggaacctgcatcactcagaattcccagcagtgcatgttaaagaagatctttgaaggtggaaaactccaattcatggttcaagggtgtgagaacatgtgcccatctatgaacctcttctcccatggaacgaggatgcaaattatatgctgtcgaaatcaatctttctgcaataagatctagaagcctgggcccttgcttgttttgactcaggcagtaaaaagcctccatcactctatttggctcattttatatttagttccttccccagtcaacaactgaccacatctgcctctgcctgagcattaggatgctcaaacatcctatctttcttcttctattcatgcttttatccattcttctctgtcctgtcttccctgctccaactctttctctcaatattcctgatttttttttcaataaatttcacatggttaaagcaaacaggct

SEQ ID NO: 72831 - DNA, 1184 bp, Homo sapiens
taaagatagggcagatagccccaacacactaccctgcacacagaaaataatcattggtcttcactagtgaaataagcagtgggttgctaagggccaacttgcctgaacaggctacacaagaacctcagagcccaacccattgtgaagaaacatgggttacttctgaggttctagaattcccagaagctctgcttcagcactggaagcttttgctcgcagtttgcttcatagctctgtgaagaagctgtggcccacactggggtcccctcttttcctaaatccagatgaacaggtttctcttgctaatgagtctttatctgcttggatctgccagaggaacatcaagtcagcctaatgagctttctggctccatagatcatcaaacttcagttcagcaacttccaggtgagcccgctgcgactgaacatgctgaaggtgagcatactgtaggtgagcagccttcaggagaacagccttcaggtgaacacctctccggagaacagcctttgagtgagcttgagtcaggtgaacagccttcagatgaacagccttcaggtgaacatggctccggtgaacagccttctggtgagcaggcctcgggtgaacagccttcaggtgagcacgcttcaggggaacaggcttcaggtgcaccaatttcaagcacatctacaggcacaatattaaattgctacacatgtgcttatatgaatgatcaaggaaaatgtcttcgtggagagggaacctgcatcactcagaattcccagcagtgcatgttaaagaagatctttgaaggtggaaaactccaattcatggttcaagggtgtgagaacatgtgcccatctatgaacctcttctcccatggaacgaggatgcaaattatatgctgtcgaaatcaatctttctgcaataagatctagaagcctgggcccttgcttgttttgactcaggcagtaaaaagcctccatcactctatttggctcattttatatttagttccttccccagtcaacaactgaccacatctgcctctgcctgagcattaggatgctcaaacatcctatctttcttcttctattcatgcttttatccattcttctctgtcctgtcttccctgctccaactctttctctcaatattcctgatttttttttcaataaatttcacatggttaaagcaaacaggct

SEQ ID NO: 72832 - DNA, 999 bp, Homo sapiens
taaagatagggcagatagccccaacacactaccctgcacacagaaaataatcattggtcttcactagtgaaataagcagtgggttgctaagggccaacttgcctgaacaggctacacaagaacctcagagcccaacccattgtgaagaaacatgggttacttctgaggttctagaattcccagaagctctgcttcagcactggaagcttttgctcgcagtttgcttcatagctctgtgaagaagctgtggcccacactggggtcccctcttttcctaaatccagatgaacaggtttctcttgctaatgagtctttatctgcttggatctgccagaggaacatcaagtcagcctaatgagctttctggctccatagatcatcaaacttcagttcagcaacttccagcaggcctcgggtgaacagccttcaggtgagcacgcttcaggggaacaggcttcaggtgcaccaatttcaagcacatctacaggcacaatattaaattgctacacatgtgcttatatgaatgatcaaggaaaatgtcttcgtggagagggaacctgcatcactcagaattcccagcagtgcatgttaaagaagatctttgaaggtggaaaactccaattcatggttcaagggtgtgagaacatgtgcccatctatgaacctcttctcccatggaacgaggatgcaaattatatgctgtcgaaatcaatctttctgcaataagatctagaagcctgggcccttgcttgttttgactcaggcagtaaaaagcctccatcactctatttggctcattttatatttagttccttccccagtcaacaactgaccacatctgcctctgcctgagcattaggatgctcaaacatcctatctttcttcttctattcatgcttttatccattcttctctgtcctgtcttccctgctccaactctttctctcaatattcctgatttttttttcaataaatttcacatggttaaagcaaacaggct

SEQ ID NO: 72833 - DNA, 917 bp, Homo sapiens
taaagatagggcagatagccccaacacactaccctgcacacagaaaataatcattggtcttcactagtgaaataagcagtgggttgctaagggccaacttgcctgaacaggctacacaagaacctcagagcccaacccattgtgaagaaacatgggttacttctgaggttctagaattcccagaagctctgcttcagcactggaagcttttgctcgcagtttgcttcatagctctgtgaagaagctgtggcccacactggggtcccctcttttcctaaatccagatgaacaggtttctcttgctaatgagtctttatctgcttggatctgccagaggaacatcaagtcagcctaatgagctttctggctccatagatcatcaaacttcagttcagcaacttccaggcacaatattaaattgctacacatgtgcttatatgaatgatcaaggaaaatgtcttcgtggagagggaacctgcatcactcagaattcccagcagtgcatgttaaagaagatctttgaaggtggaaaactccaattcatggttcaagggtgtgagaacatgtgcccatctatgaacctcttctcccatggaacgaggatgcaaattatatgctgtcgaaatcaatctttctgcaataagatctagaagcctgggcccttgcttgttttgactcaggcagtaaaaagcctccatcactctatttggctcattttatatttagttccttccccagtcaacaactgaccacatctgcctctgcctgagcattaggatgctcaaacatcctatctttcttcttctattcatgcttttatccattcttctctgtcctgtcttccctgctccaactctttctctcaatattcctgatttttttttcaataaatttcacatggttaaagcaaacaggct

SEQ ID NO: 72834 - DNA, 1019 bp, Homo sapiens
taaagatagggcagatagccccaacacactaccctgcacacagaaaataatcattggtcttcactagtgaaataagcagtgggttgctaagggccaacttgcctgaacaggctacacaagaacctcagagcccaacccattgtgaagaaacatgggttacttctgaggttctagaattcccagaagctctgcttcagcactggaagcttttgctcgcagtttgcttcatagctctgtgaagaagctgtggcccacactggggtcccctcttttcctaaatccagatgaacaggtttctcttgctaatgagtctttatctgcttggatctgccagaggaacatcaagtcagcctaatgagctttctggctccatagatcatcaaacttcagttcagcaacttccaggtgagcagccttcaggagaacagccttcaggtgaacacctctccggagaacagcctttgagtgagcttgagtcaggtgaacagccttcagatgaacagccttcaggtgaacatggctccggtgaacagccttctggtgagcaggcctcgggtgaacagccttcaggtgagcacgcttcaggggaacaggcttcaggtgcaccaatttcaagcacatctacaggtggaaaactccaattcatggttcaagggtgtgagaacatgtgcccatctatgaacctcttctcccatggaacgaggatgcaaattatatgctgtcgaaatcaatctttctgcaataagatctagaagcctgggcccttgcttgttttgactcaggcagtaaaaagcctccatcactctatttggctcattttatatttagttccttccccagtcaacaactgaccacatctgcctctgcctgagcattaggatgctcaaacatcctatctttcttcttctattcatgcttttatccattcttctctgtcctgtcttccctgctccaactctttctctcaatattcctgatttttttttcaataaatttcacatggttaaagcaaacaggct

SEQ ID NO: 72835 - DNA, 797 bp, Homo sapiens
taaagatagggcagatagccccaacacactaccctgcacacagaaaataatcattggtcttcactagtgaaataagcagtgggttgctaagggccaacttgcctgaacaggctacacaagaacctcagagcccaacccattgtgaagaaacatgggttacttctgaggttctagaattcccagaagctctgcttcagcactggaagcttttgctcgcagtttgcttcatagctctgtgaagaagctgtggcccacactggggtcccctcttttcctaaatccagatgaacaggtttctcttgctaatgagtctttatctgcttggatctgccagaggaacatcaagtcagcctaatgagctttctggctccatagatcatcaaacttcagttcagcaacttccaggtggaaaactccaattcatggttcaagggtgtgagaacatgtgcccatctatgaacctcttctcccatggaacgaggatgcaaattatatgctgtcgaaatcaatctttctgcaataagatctagaagcctgggcccttgcttgttttgactcaggcagtaaaaagcctccatcactctatttggctcattttatatttagttccttccccagtcaacaactgaccacatctgcctctgcctgagcattaggatgctcaaacatcctatctttcttcttctattcatgcttttatccattcttctctgtcctgtcttccctgctccaactctttctctcaatattcctgatttttttttcaataaatttcacatggttaaagcaaacaggct

SEQ ID NO: 72836 - DNA, 761 bp, Homo sapiens
taaagatagggcagatagccccaacacactaccctgcacacagaaaataatcattggtcttcactagtgaaataagcagtgggttgctaagggccaacttgcctgaacaggctacacaagaacctcagagcccaacccattgtgaagaaacatgggttacttctgaggttctagaattcccagaagctctgcttcagcactggaagcttttgctcgcagtttgcttcatagctctgtgaagaagctgtggcccacactggggtcccctcttttcctaaatccagatgaacaggtttctcttgctaatgagtctttatctgcttggatctgccagaggtgagtgtttgatctaggcttcaggtaaatacaaaaggggtctcccttaagacatttcaggccttgaagaaggaagaccagtctctcagtcacccaaaccaatctgagtcagaatcaagagcagctaaacaagtccaactcggagagctcctgaaccagttgatttctctagtcatagctttacagtcagagggtcccactggcttggcacagtctggtttctacttattttagccactcaacatttatacctgatgctgcatgagatgaaaaagtaggcttaggggttctgtagaagcccaatgaaggtttgtcccaccaattaaatgtgagggatccttgtgtggttaatgtgccaaggaaagatgggagatgggaagatgtgatgtgttcagaaaacaacctcagaacacgacagagcctca

SEQ ID NO: 72837 - DNA, 858 bp, Homo sapiens
tatgatgtgcaagcaaagaggttaaaaaagtcctgagaaaaggatgcagaatttgatgagtagatctctatgacttttgagagaggtttcggcatagtagggtcatgattcaaactgtgaggggccaaggtgaggaggataggcagactctgggaaggctgtaaggaaaggaaggatagtgctaggggagtagcacgattaagagaaagtattttaaatttggggtaacctgagcatccttgtaaaccaaaaaaggagtccatagaaacggactgacaatataagaaaggagtgggcaactgatggggggcaagttcccagaggaagcaaatagaagagaaagagaagggataatggacaagtggaggtcttgaccatcctgcatggagacactgagcatcacagataaaggctaaggttggaggacgaagctttctgctcactagtctgtctctgctcctttcaggtggaaaactccaattcatggttcaagggtgtgagaacatgtgcccatctatgaacctcttctcccatggaacgaggatgcaaattatatgctgtcgaaatcaatctttctgcaataagatctagaagcctgggcccttgcttgttttgactcaggcagtaaaaagcctccatcactctatttggctcattttatatttagttccttccccagtcaacaactgaccacatctgcctctgcctgagcattaggatgctcaaacatcctatctttcttcttctattcatgcttttatccattcttctctgtcctgtcttccctgctccaactctttctctcaatattcctgatttttttttcaataaatttcacatggttaaagcaaacaggct

SEQ ID NO: 72838 - DNA, 387 bp, Homo sapiens
tgtcacttaaacgtgttttcttctttggtgctcagaattccagctacagcggtgacagcagattctctactttgtcatcatccagggaggagaagttggttggtttccatttaaatctttcacattctcttcagaaaccgcagattttgtagcatgcaatcttgtgtgtgtggattcagctctacttttctctttcggtgtctgtttgacggatttttgtttgggtagctgtgttattgacgtgaaaagcagcagttaacatgagctccttcattcagatgtactccagtgtgctgcgtttgaccacaccagctcgaatgtgaattgtggcattcagctggctgcaatgaaaggacgtgtttttgtgtatattttctaattagaatt

SEQ ID NO: 72839 - DNA, 358 bp, Homo sapiens
gatagaagtgggagtgaggagacagcaattgattcaaggaaactctgagaaaaaataaaaagaaacttcacttactatctccaaatgttattttgctacctaaggaatgtagacaccatgcatccaaactcccgcctgtcatcggtggatgaacaatacatttttcagcattgacagtaaacaactattcaacttttgcttcattcctctcactaaagagaaggttcattaccttatgaagtagtctagttgtgactgatacctctgttgtgagttctttggttgagcttctttgtatcagtaacaaaaggaagcatcattcagtctttctttgtaacttaatgtaagtctcttttgt

SEQ ID NO: 72840 - DNA, 249 bp, Homo sapiens
  misc_feature (209)..(210): n is a, c, g, or t
  misc_feature (218)..(220): n is a, c, g, or t
gctcaaatgctcctcccacctgggtgtcccaaagtgctggtattacaggtatgagccaccacacctggcagagatcactttttaccaagatacgcaatttactggagacaagctacccacatggagataactggcatcacagggctttgttttgttttgtttttgagacaggttccggctctgtcacccaggctggaggagcatttganntcaggagnnngagactatcctaaaacaaacaaacaaaca

SEQ ID NO: 72841 - DNA, 838 bp, Homo sapiens
gaagggcgtgtcggcccagcacaagtcctgagccccccaagaccggcgatgcccactggaccaaaaaggatgcaggatccacccagagactcagcaccaaacccaacacacgcacgccaccacagcaactgtgacagcggggggccctgcagaggcgaggggggagcgagtggggacagacaagggggacacgtcccgagctcctgtggccggtcctgggatgcgcttgtcgccccgggtggcacgtgtccacacacacacacagacacacacacacacacacacacgagggacttcggaaaactgtgtcttagggatcgggggtgggggtggggatttttttttcattatctttcctcttttgagtcttctctgccttttcttttcctctctatctctttactttcttccttttttaaaaaaatataataaaagacaagttattttaaaaagacataaaatgccatccgtggggggtgtggccggcgtggccacctcggggcccctcacgtgatctcctcggtccgtggttttctgtggattctctgtccggtccgtctcttcattgccgcctccggagtccactgcagaggggcagagtgaatgccggcggccaagtggcctccgggacaggtcctggagccctgctggactcagggtgggtggaggctgtgcctgtggacggccggggtggccaggacggccaagggctgggaggcacgtcccccagcccagcccccatgtacactgtagtcgttctattgtacagaaaaaaatatttctatatttgcaatgtttgctgtaaaatgagaaagaaaaaaagactatgtctactaaa

SEQ ID NO: 72842 - DNA, 5999 bp, Homo sapiens
  misc_feature (3494)..(3494): n is a, c, g, or t
ccggcggcgcctgagcccagccgaggatggagaaccggcctgggtccttccagtacgtccctgtgcagctgcaagggggggcaccctggggcttcacccttaaggggggtctggaacactgtgagccgctcacagtgtctaagattgaagatggaggcaaggcagctttgtcccagaagatgaggactggtgatgagctggtgaatatcaatggcactccattatatggctcccgccaagaggccctcattctcatcaaaggctccttccggattctcaagctgattgtcaggaggaggaacgcccctgtcagtaggccgcactcatggcatgtggccaagctgctggagggatgccctgaagcagccaccaccatgcatttcccttctgaagccttcagcttgtcctggcattctggctgcaacacaagtgacgtgtgtgtgcagtggtgtccactctcccggcattgcagcaccgagaaaagcagctccattggcagcatggagagcctggagcaaccaggccaagccacctatgagagccatctgttgcctattgaccagaacatgtaccctaaccagcgtgactcagcctacagctccttctcggccagctcaaatgcttctgactgtgccctttccctcaggccagaggagccagcctctacagactgcatcatgcaaggcccagggccaactaaggcccccagtggccggcctaatgtggctgagacctcaggaggtagtcggcgcaccaatgggggccacctgacccccagctctcagatgtcatcccgtccacaggagggataccagtcagggcccgccaaagcagtcaggggcccaccacaacctccagtgaggcgggacagccttcaggcctccagagcccaactcctcaatggagagcagcgcagggcatctgagcctgtggtccccttgccacagaaggagaaactgagcttagagcctgtgctacccgcaaggaaccctaataggttctgttgcctcagtgggcatgaccaagtgacaagtgagggccatcagaactgtgagttcagtcagcctcctgaatccagccaacagggctctgagcatctactgatgcaggcctcaaccaaagctgttggatccccaaaagcctgtgacagagcttccagcgtggattccaacccactcaatgaggcttctgcagagctagctaaggcttcttttggcagacctccacatctcataggacccacagggcatcgccatagtgcccctgaacagctgctggcatcccacctgcagcatgtgcaccttgataccaggggcagcaaagggatggagctcccacccgtacaggatgggcaccagtggactctgtcccctttgcacagcagccacaaagggaagaaaagtccatgcccccctacaggaggaacccatgaccagtccagcaaagaaagaaagaccagacaagtggatgacaggtctttagttttgggacaccagagccaaagcagtcccccacatggagaggctgatggacacccctcagaaaaaggtttcctggacccaaacagaacaagcagagcagccagtgaattggccaaccagcaaccctctgcctctggctcccttgttcaacaagccacggactgttcttcaaccactaaagcagctagtggcacagaggcaggtgaagaaggggacagcgagcccaaggagtgcagccggatgggtggtaggcgaagtggagggacccggggccgctcgatccaaaaccggcggaagagtgagcgttttgctaccaatctgcgtaatgaaattcagaggaggaaggcccagctccagaaaagcaagggtcccttgtcacagctgtgtgacactaaggagccagtggaagagacccaggagcccccagaaagtcctccactcactgcctctaacacatctcttctatcttcatgtaaaaaacctcccagccccagagacaagctcttcaacaaaagcatgatgctcagagctaggtcttccgagtgcctcagccaagcccctgagagccatgaatctaggacaggcttagagggacgaataagccctggccagaggcctggccagtcctctttgggcctgaacacctggtggaaagcacctgacccatcctcctcagaccctgagaaagcacatgctcactgtggagtccgtggaggtcattggagatggtctccagagcataattcacagccacttgtggcagcagccatggaaggcccttccaacccaggtgacaacaaggaattgaaggcttctactgctcaagctggggaggatgccatcctcttgccttttgcagacagaagaaagttctttgaagagagtagcaaatccttatctacatctcatttgccaggtttaaccactcatagcaacaagacttttacccagagaccaaaacctatagaccaaaacttccagccaatgagctccagctgtagggaattgaggcgccatcccatggaccaatcatatcattccgcagaccaaccatatcatgccacagaccaatcatatcattccatgtcaccccttcagtcagaaactcccacttactcagaatgttttgcaagcaaaggtctagaaaattccatgtgttgtaagccactacactgtggtgattttgattaccacaggacctgctcttactcctgcagtgttcaaggagctctagtccatgatccttgcatttattgttctggggaaatctgccctgccttgctaaagagaaatatgatgccaaattgctacaactgccggtgccaccaccaccaatgcattcggtgttcagtttgctatcataatcctcagcacagtgccctcgaggacagcagcttggcacctggcaacacttggaaacccaggaagctgacagtgcaggaatttcctggggacaaatggaatccaataacaggaaacaggaagaccagccagtcagggagggaaatggctcattccaagactagcttttcatgggcaacccctttccatccttgccttgagaacccagcactggacttgtcaagctaccgagcaatttcttctcttgacctccttggagacttcaaacatgctttgaaaaaatcagaggaaacttcagtttatgaggaggggagctcccttgcctccatgccccacccactgcgcagccgtgccttctcagagagtcacatcagcttggcgccccaaagcacccgggcctgggggcagcataggagggagctctttagcaaaggtgatgagacccagtcggatcttctcggagccaggaagaaggcctttcctcctcctcgccctcctcctcccaactgggagaagtacaggctctttcgtgcagcccagcagcagaagcagcaacagcagcagcagaagcaacaggaggaggaggaggaggaggaagaagaagaagaagaggaagaggaagaggaggaggaggaggcagaggaggaggangaggagctgccaccccagtatttcagttcagaaacctctggttcctgtgctctcaatcctgaggaggtcctagagcagccacaacccctcagctttggccacctggagggctcgagacagggttcacaaagtgtcccagcagagcaagaatcctttgcactccattccagtgatttcttgcctccaataaggggtcacttgggatctcaacctgagcaggctcagcccccttgctactatggcattggtgggctttggaggacatcgggacaggaagccactgaatccgccaaacaagagtttcagcacttttcgcctccttcaggggccccaggaatccctacctcttactcagcttattacaatatttctgtggccaaggcagagctgctgaacaaactgaaagaccaacctgagatggcagagattggcctaggagaggaggaagttgaccatgaactggctcaaaaaaagatacagcttatcgaaagcatcagcagaaaactttctgtcttgcgggaggcccagcgagggctgctagaggacatcaatgccaattctgcccttggggaggaggtggaggccaacttaaaagccgtctgcaaatccaatgaatttgaaaagtaccacttgtttgttggggacctggacaaagtggtcaacctgttgctgtcactctctggacgactggcccgggtggagaatgctctgaacagcatcgattcagaggccaaccaggagaagttggtactgatagagaagaagcagcagctgacggggcagttggcagatgccaaggagctgaaggagcacgtggaccgccgggagaagttggtgtttggcatggtctcccgctacctgcctcaggaccagctccaagattaccagcactttgtcaagatgaaatctgctctcatcattgaacagcgagagctggaggagaagatcaagctcggggaagagcaactcaaatgtctcagggagagtctactcctggggcccagcaatttctaattctaccagcactctgccacagcatccctgcccagccatgtgggaagtgctttcaatcttctttgttagcagtttctcagcaagtagatagcaattagcagtttgttccagccctctaccctggatgtctctcactaccccttccctagcagtggtcctaaccagctaggagaccctggggaagccacaagcttctacccaagggagctgcagcaaggtgtgatcttagaaccacactctccttcccacagttgccaagggcaagtacttgctgcacagagaaccaaggaagtgccttcattctgctttgtactaggacaccaaagacatcaagtactcatcacccacccatatcatcaacagcctctaaaggctcagagggaatctgccttgcagctctactctgccccagggcttgtggccagccatttctcacagagagctggctgccttgagggcattcacctggcaccagtttcagggcctcacccaagctttgcaggggaaagcacagagggaggaattacactgaaaaaaatgcaagcaaaggttgagtacccccaggtgccccttaggaaggaaccaggtttaaataggctctacccttacctttcccagcagcaagttcaggggaagaggcctactcttagccctggctagtgtgaccctcttcctgtcctaagactttggtcctaccacctcttgtttcatctttcctttacattgctgggggttaccgcaggtgcctaccccagggcttcaccatatgggccattaatagctctactaaaactgacttctagatgtaggtttcattattgggggagggggttcttattgttatattttaaatggccttttgattttatttatttttatgttttgattatttttttcttttttaactaataaggcgagaagagggaagttggagagggaaaagttagcccagaaggaaagcattttctgcagatcagcctgaatccaccgtggctaggcatattcttgctcttctcgtgttgctcacaactacctgcctggatgaatttaggaaagttgcaggatacaaggttaaaacacaagatcaaatgaacaatccgaaaatgttattaagaaaacagttccggccgggcatggtggctcacgcctgaaatcccagcactttgggaggccgaggcaggtggatcacgaggtcaggagatcaagaccatcctggctaacacggtgaaaccctatctctactaaaaatacaaaaaattagccaggtgtggtggcacgcaccagtagtcccagctactcgggaggctgaggcaggagaattgcttgaacctggaaggcagagattgcagtgagctgagaccacaccactgcactccatcctgggcaacagagtgagactttgtctcaaaaagaaagaaagaaagaaagaaagaaagaaagaaaagaaagaaagaaagaaagaaagaaaacagttccatttacaatagcatc

SEQ ID NO: 72843 - DNA, 629 bp, Homo sapiens
aattttaactagatttccaggagattcatgaacatattacagcatgggaagtactgacttgttgaaaacatattcagtacatggtaaccattattatagtcctgatctactcaattcattttttccttatcccaggcatattcttgctcttctcgtgttgctcacaactacctgcctggatgaatttaggaaagttgcaggatacaaggttaaaacacaagatcaaatgaacaatccgaaaatgttattaagaaaacagttccggccgggcatggtggctcacgcctgaaatcccagcactttgggaggccgaggcaggtggatcacgaggtcaggagatcaagaccatcctggctaacacggtgaaaccctatctctactaaaaatacaaaaaattagccaggtgtggtggcacgcaccagtagtcccagctactcgggaggctgaggcaggagaattgcttgaacctggaaggcagagattgcagtgagctgagaccacaccactgcactccatcctgggcaacagagtgagactttgtctcaaaaagaaagaaagaaagaaagaaagaaagaaagaaaagaaagaaagaaagaaagaaagaaaacagttccatttacaatagcatc

SEQ ID NO: 72844 - DNA, 438 bp, Homo sapiens
ccggcggcgcctgagcccagccgaggatggagaaccggcctgggtccttccagtacgtccctgtgcagctgcaagggggggcaccctggggcttcacccttaaggggggtctggaacactgtgagccgctcacagtgtctaagattgaagatggaggcaaggcagctttgtcccagaagatgaggactggtgatgagctggtgaatatcaatggcactccattatatggctcccgccaagaggccctcattctcatcaaaggctccttccggattctcaagctgattgtcaggagactaagtttgctggcccctggtataaagcattctccaaaaagaagaccttgaggctctctctaaagcttaaaaagactgaaagagaaccatcgtagtctacaagtgagaatgaataaaaaaatcacagaatatttaagccaac

SEQ ID NO: 72845 - DNA, 5945 bp, Homo sapiens
  misc_feature (3440)..(3440): n is a, c, g, or t
ccggcggcgcctgagcccagccgaggatggagaaccggcctgggtccttccagtacgtccctgtgcagctgcaagggggggcaccctggggcttcacccttaaggggggtctggaacactgtgagccgctcacagtgtctaagattgaagatggaggcaaggcagctttgtcccagaagatgaggactggtgatgagctggtgaatatcaatggcactccattatatggctcccgccaagaggccctcattctcatcaaaggctccttccggattctcaagctgattgtcaggaggaggaacgcccctgtcagtaggccgcactcatggcatgtggccaagctgctggagggatgccctgaagcagccaccaccatgcatttcccttctgaagccttcagcttgtcctggcattctggctgcaacacaagtgacgtgtgtgtgcagtggtgtccactctcccggcattgcagcaccgagaaaagcagctccattggcagcatggagagcctggagcaaccaggccaagccacctatgagagccatctgttgcctattgaccagaacatgtaccctaaccagcgtgactcagcctacagctccttctcggccagctcaaatgcttctgactgtgccctttccctcaggccagaggagccagcctctacagactgcatcatgcaaggcccagggccaactaaggcccccagtggccggcctaatgtggctgagacctcaggaggtagtcggcgcaccaatgggggccacctgacccccagctctcagatgtcatcccgtccacaggagggataccagtcagggcccgccaaagcagtcaggggcccaccacaacctccagtgaggcgggacagccttcaggcctccagagcccaactcctcaatggagagcagcgcagggcatctgagcctgtggtccccttgccacagaaggagaaactgagcttagagcctgtgctacccgcaaggaaccctaataggttctgttgcctcagtgggcatgaccaagtgacaagtgagggccatcagaactgtgagttcagtcagcctcctgaatccagccaacagggctctgagcatctactgatgcaggcctcaaccaaagctgttggatccccaaaagcctgtgacagagcttccagcggcagacctccacatctcataggacccacagggcatcgccatagtgcccctgaacagctgctggcatcccacctgcagcatgtgcaccttgataccaggggcagcaaagggatggagctcccacccgtacaggatgggcaccagtggactctgtcccctttgcacagcagccacaaagggaagaaaagtccatgcccccctacaggaggaacccatgaccagtccagcaaagaaagaaagaccagacaagtggatgacaggtctttagttttgggacaccagagccaaagcagtcccccacatggagaggctgatggacacccctcagaaaaaggtttcctggacccaaacagaacaagcagagcagccagtgaattggccaaccagcaaccctctgcctctggctcccttgttcaacaagccacggactgttcttcaaccactaaagcagctagtggcacagaggcaggtgaagaaggggacagcgagcccaaggagtgcagccggatgggtggtaggcgaagtggagggacccggggccgctcgatccaaaaccggcggaagagtgagcgttttgctaccaatctgcgtaatgaaattcagaggaggaaggcccagctccagaaaagcaagggtcccttgtcacagctgtgtgacactaaggagccagtggaagagacccaggagcccccagaaagtcctccactcactgcctctaacacatctcttctatcttcatgtaaaaaacctcccagccccagagacaagctcttcaacaaaagcatgatgctcagagctaggtcttccgagtgcctcagccaagcccctgagagccatgaatctaggacaggcttagagggacgaataagccctggccagaggcctggccagtcctctttgggcctgaacacctggtggaaagcacctgacccatcctcctcagaccctgagaaagcacatgctcactgtggagtccgtggaggtcattggagatggtctccagagcataattcacagccacttgtggcagcagccatggaaggcccttccaacccaggtgacaacaaggaattgaaggcttctactgctcaagctggggaggatgccatcctcttgccttttgcagacagaagaaagttctttgaagagagtagcaaatccttatctacatctcatttgccaggtttaaccactcatagcaacaagacttttacccagagaccaaaacctatagaccaaaacttccagccaatgagctccagctgtagggaattgaggcgccatcccatggaccaatcatatcattccgcagaccaaccatatcatgccacagaccaatcatatcattccatgtcaccccttcagtcagaaactcccacttactcagaatgttttgcaagcaaaggtctagaaaattccatgtgttgtaagccactacactgtggtgattttgattaccacaggacctgctcttactcctgcagtgttcaaggagctctagtccatgatccttgcatttattgttctggggaaatctgccctgccttgctaaagagaaatatgatgccaaattgctacaactgccggtgccaccaccaccaatgcattcggtgttcagtttgctatcataatcctcagcacagtgccctcgaggacagcagcttggcacctggcaacacttggaaacccaggaagctgacagtgcaggaatttcctggggacaaatggaatccaataacaggaaacaggaagaccagccagtcagggagggaaatggctcattccaagactagcttttcatgggcaacccctttccatccttgccttgagaacccagcactggacttgtcaagctaccgagcaatttcttctcttgacctccttggagacttcaaacatgctttgaaaaaatcagaggaaacttcagtttatgaggaggggagctcccttgcctccatgccccacccactgcgcagccgtgccttctcagagagtcacatcagcttggcgccccaaagcacccgggcctgggggcagcataggagggagctctttagcaaaggtgatgagacccagtcggatcttctcggagccaggaagaaggcctttcctcctcctcgccctcctcctcccaactgggagaagtacaggctctttcgtgcagcccagcagcagaagcagcaacagcagcagcagaagcaacaggaggaggaggaggaggaggaagaagaagaagaagaggaagaggaagaggaggaggaggaggcagaggaggaggangaggagctgccaccccagtatttcagttcagaaacctctggttcctgtgctctcaatcctgaggaggtcctagagcagccacaacccctcagctttggccacctggagggctcgagacagggttcacaaagtgtcccagcagagcaagaatcctttgcactccattccagtgatttcttgcctccaataaggggtcacttgggatctcaacctgagcaggctcagcccccttgctactatggcattggtgggctttggaggacatcgggacaggaagccactgaatccgccaaacaagagtttcagcacttttcgcctccttcaggggccccaggaatccctacctcttactcagcttattacaatatttctgtggccaaggcagagctgctgaacaaactgaaagaccaacctgagatggcagagattggcctaggagaggaggaagttgaccatgaactggctcaaaaaaagatacagcttatcgaaagcatcagcagaaaactttctgtcttgcgggaggcccagcgagggctgctagaggacatcaatgccaattctgcccttggggaggaggtggaggccaacttaaaagccgtctgcaaatccaatgaatttgaaaagtaccacttgtttgttggggacctggacaaagtggtcaacctgttgctgtcactctctggacgactggcccgggtggagaatgctctgaacagcatcgattcagaggccaaccaggagaagttggtactgatagagaagaagcagcagctgacggggcagttggcagatgccaaggagctgaaggagcacgtggaccgccgggagaagttggtgtttggcatggtctcccgctacctgcctcaggaccagctccaagattaccagcactttgtcaagatgaaatctgctctcatcattgaacagcgagagctggaggagaagatcaagctcggggaagagcaactcaaatgtctcagggagagtctactcctggggcccagcaatttctaattctaccagcactctgccacagcatccctgcccagccatgtgggaagtgctttcaatcttctttgttagcagtttctcagcaagtagatagcaattagcagtttgttccagccctctaccctggatgtctctcactaccccttccctagcagtggtcctaaccagctaggagaccctggggaagccacaagcttctacccaagggagctgcagcaaggtgtgatcttagaaccacactctccttcccacagttgccaagggcaagtacttgctgcacagagaaccaaggaagtgccttcattctgctttgtactaggacaccaaagacatcaagtactcatcacccacccatatcatcaacagcctctaaaggctcagagggaatctgccttgcagctctactctgccccagggcttgtggccagccatttctcacagagagctggctgccttgagggcattcacctggcaccagtttcagggcctcacccaagctttgcaggggaaagcacagagggaggaattacactgaaaaaaatgcaagcaaaggttgagtacccccaggtgccccttaggaaggaaccaggtttaaataggctctacccttacctttcccagcagcaagttcaggggaagaggcctactcttagccctggctagtgtgaccctcttcctgtcctaagactttggtcctaccacctcttgtttcatctttcctttacattgctgggggttaccgcaggtgcctaccccagggcttcaccatatgggccattaatagctctactaaaactgacttctagatgtaggtttcattattgggggagggggttcttattgttatattttaaatggccttttgattttatttatttttatgttttgattatttttttcttttttaactaataaggcgagaagagggaagttggagagggaaaagttagcccagaaggaaagcattttctgcagatcagcctgaatccaccgtggctaggcatattcttgctcttctcgtgttgctcacaactacctgcctggatgaatttaggaaagttgcaggatacaaggttaaaacacaagatcaaatgaacaatccgaaaatgttattaagaaaacagttccggccgggcatggtggctcacgcctgaaatcccagcactttgggaggccgaggcaggtggatcacgaggtcaggagatcaagaccatcctggctaacacggtgaaaccctatctctactaaaaatacaaaaaattagccaggtgtggtggcacgcaccagtagtcccagctactcgggaggctgaggcaggagaattgcttgaacctggaaggcagagattgcagtgagctgagaccacaccactgcactccatcctgggcaacagagtgagactttgtctcaaaaagaaagaaagaaagaaagaaagaaagaaagaaaagaaagaaagaaagaaagaaagaaaacagttccatttacaatagcatc

SEQ ID NO: 72846 - DNA, 6080 bp, Homo sapiens
  misc_feature (33)..(33): n is a, c, g, or t
  misc_feature (3575)..(3575): n is a, c, g, or t
ctttcatccttccctttgccaccagggtgctgnctggttcctggagcagcgtcttcactcctatccagctcttgacactggctttcgttccctaaggctgtggccatatctaggtccatccaggctgatggtcataccttgccttcagtgctactccttcctgttcttagaactggaacctgactgtgcctgagccccttggatcacactcagcatcttgggctgatggtccctcgccccagaaggtcttaactggagggcagatgggtcccagctaagggaggacgctggctggagggtttgtcaacgagagtctgagctagccggataccccgctctctcccaagccatctctccaccctgggcaacttccatggaggaacgcccctgtcagtaggccgcactcatggcatgtggccaagctgctggagggatgccctgaagcagccaccaccatgcatttcccttctgaagccttcagcttgtcctggcattctggctgcaacacaagtgacgtgtgtgtgcagtggtgtccactctcccggcattgcagcaccgagaaaagcagctccattggcagcatggagagcctggagcaaccaggccaagccacctatgagagccatctgttgcctattgaccagaacatgtaccctaaccagcgtgactcagcctacagctccttctcggccagctcaaatgcttctgactgtgccctttccctcaggccagaggagccagcctctacagactgcatcatgcaaggcccagggccaactaaggcccccagtggccggcctaatgtggctgagacctcaggaggtagtcggcgcaccaatgggggccacctgacccccagctctcagatgtcatcccgtccacaggagggataccagtcagggcccgccaaagcagtcaggggcccaccacaacctccagtgaggcgggacagccttcaggcctccagagcccaactcctcaatggagagcagcgcagggcatctgagcctgtggtccccttgccacagaaggagaaactgagcttagagcctgtgctacccgcaaggaaccctaataggttctgttgcctcagtgggcatgaccaagtgacaagtgagggccatcagaactgtgagttcagtcagcctcctgaatccagccaacagggctctgagcatctactgatgcaggcctcaaccaaagctgttggatccccaaaagcctgtgacagagcttccagcgtggattccaacccactcaatgaggcttctgcagagctagctaaggcttcttttggcagacctccacatctcataggacccacagggcatcgccatagtgcccctgaacagctgctggcatcccacctgcagcatgtgcaccttgataccaggggcagcaaagggatggagctcccacccgtacaggatgggcaccagtggactctgtcccctttgcacagcagccacaaagggaagaaaagtccatgcccccctacaggaggaacccatgaccagtccagcaaagaaagaaagaccagacaagtggatgacaggtctttagttttgggacaccagagccaaagcagtcccccacatggagaggctgatggacacccctcagaaaaaggtttcctggacccaaacagaacaagcagagcagccagtgaattggccaaccagcaaccctctgcctctggctcccttgttcaacaagccacggactgttcttcaaccactaaagcagctagtggcacagaggcaggtgaagaaggggacagcgagcccaaggagtgcagccggatgggtggtaggcgaagtggagggacccggggccgctcgatccaaaaccggcggaagagtgagcgttttgctaccaatctgcgtaatgaaattcagaggaggaaggcccagctccagaaaagcaagggtcccttgtcacagctgtgtgacactaaggagccagtggaagagacccaggagcccccagaaagtcctccactcactgcctctaacacatctcttctatcttcatgtaaaaaacctcccagccccagagacaagctcttcaacaaaagcatgatgctcagagctaggtcttccgagtgcctcagccaagcccctgagagccatgaatctaggacaggcttagagggacgaataagccctggccagaggcctggccagtcctctttgggcctgaacacctggtggaaagcacctgacccatcctcctcagaccctgagaaagcacatgctcactgtggagtccgtggaggtcattggagatggtctccagagcataattcacagccacttgtggcagcagccatggaaggcccttccaacccaggtgacaacaaggaattgaaggcttctactgctcaagctggggaggatgccatcctcttgccttttgcagacagaagaaagttctttgaagagagtagcaaatccttatctacatctcatttgccaggtttaaccactcatagcaacaagacttttacccagagaccaaaacctatagaccaaaacttccagccaatgagctccagctgtagggaattgaggcgccatcccatggaccaatcatatcattccgcagaccaaccatatcatgccacagaccaatcatatcattccatgtcaccccttcagtcagaaactcccacttactcagaatgttttgcaagcaaaggtctagaaaattccatgtgttgtaagccactacactgtggtgattttgattaccacaggacctgctcttactcctgcagtgttcaaggagctctagtccatgatccttgcatttattgttctggggaaatctgccctgccttgctaaagagaaatatgatgccaaattgctacaactgccggtgccaccaccaccaatgcattcggtgttcagtttgctatcataatcctcagcacagtgccctcgaggacagcagcttggcacctggcaacacttggaaacccaggaagctgacagtgcaggaatttcctggggacaaatggaatccaataacaggaaacaggaagaccagccagtcagggagggaaatggctcattccaagactagcttttcatgggcaacccctttccatccttgccttgagaacccagcactggacttgtcaagctaccgagcaatttcttctcttgacctccttggagacttcaaacatgctttgaaaaaatcagaggaaacttcagtttatgaggaggggagctcccttgcctccatgccccacccactgcgcagccgtgccttctcagagagtcacatcagcttggcgccccaaagcacccgggcctgggggcagcataggagggagctctttagcaaaggtgatgagacccagtcggatcttctcggagccaggaagaaggcctttcctcctcctcgccctcctcctcccaactgggagaagtacaggctctttcgtgcagcccagcagcagaagcagcaacagcagcagcagaagcaacaggaggaggaggaggaggaggaagaagaagaagaagaggaagaggaagaggaggaggaggaggcagaggaggaggangaggagctgccaccccagtatttcagttcagaaacctctggttcctgtgctctcaatcctgaggaggtcctagagcagccacaacccctcagctttggccacctggagggctcgagacagggttcacaaagtgtcccagcagagcaagaatcctttgcactccattccagtgatttcttgcctccaataaggggtcacttgggatctcaacctgagcaggctcagcccccttgctactatggcattggtgggctttggaggacatcgggacaggaagccactgaatccgccaaacaagagtttcagcacttttcgcctccttcaggggccccaggaatccctacctcttactcagcttattacaatatttctgtggccaaggcagagctgctgaacaaactgaaagaccaacctgagatggcagagattggcctaggagaggaggaagttgaccatgaactggctcaaaaaaagatacagcttatcgaaagcatcagcagaaaactttctgtcttgcgggaggcccagcgagggctgctagaggacatcaatgccaattctgcccttggggaggaggtggaggccaacttaaaagccgtctgcaaatccaatgaatttgaaaagtaccacttgtttgttggggacctggacaaagtggtcaacctgttgctgtcactctctggacgactggcccgggtggagaatgctctgaacagcatcgattcagaggccaaccaggagaagttggtactgatagagaagaagcagcagctgacggggcagttggcagatgccaaggagctgaaggagcacgtggaccgccgggagaagttggtgtttggcatggtctcccgctacctgcctcaggaccagctccaagattaccagcactttgtcaagatgaaatctgctctcatcattgaacagcgagagctggaggagaagatcaagctcggggaagagcaactcaaatgtctcagggagagtctactcctggggcccagcaatttctaattctaccagcactctgccacagcatccctgcccagccatgtgggaagtgctttcaatcttctttgttagcagtttctcagcaagtagatagcaattagcagtttgttccagccctctaccctggatgtctctcactaccccttccctagcagtggtcctaaccagctaggagaccctggggaagccacaagcttctacccaagggagctgcagcaaggtgtgatcttagaaccacactctccttcccacagttgccaagggcaagtacttgctgcacagagaaccaaggaagtgccttcattctgctttgtactaggacaccaaagacatcaagtactcatcacccacccatatcatcaacagcctctaaaggctcagagggaatctgccttgcagctctactctgccccagggcttgtggccagccatttctcacagagagctggctgccttgagggcattcacctggcaccagtttcagggcctcacccaagctttgcaggggaaagcacagagggaggaattacactgaaaaaaatgcaagcaaaggttgagtacccccaggtgccccttaggaaggaaccaggtttaaataggctctacccttacctttcccagcagcaagttcaggggaagaggcctactcttagccctggctagtgtgaccctcttcctgtcctaagactttggtcctaccacctcttgtttcatctttcctttacattgctgggggttaccgcaggtgcctaccccagggcttcaccatatgggccattaatagctctactaaaactgacttctagatgtaggtttcattattgggggagggggttcttattgttatattttaaatggccttttgattttatttatttttatgttttgattatttttttcttttttaactaataaggcgagaagagggaagttggagagggaaaagttagcccagaaggaaagcattttctgcagatcagcctgaatccaccgtggctaggcatattcttgctcttctcgtgttgctcacaactacctgcctggatgaatttaggaaagttgcaggatacaaggttaaaacacaagatcaaatgaacaatccgaaaatgttattaagaaaacagttccggccgggcatggtggctcacgcctgaaatcccagcactttgggaggccgaggcaggtggatcacgaggtcaggagatcaagaccatcctggctaacacggtgaaaccctatctctactaaaaatacaaaaaattagccaggtgtggtggcacgcaccagtagtcccagctactcgggaggctgaggcaggagaattgcttgaacctggaaggcagagattgcagtgagctgagaccacaccactgcactccatcctgggcaacagagtgagactttgtctcaaaaagaaagaaagaaagaaagaaagaaagaaagaaaagaaagaaagaaagaaagaaagaaaacagttccatttacaatagcatc

SEQ ID NO: 72847 - DNA, 306 bp, Homo sapiens
aaatcaatgaacttgggaaggaaaactacttgctacataatccagaaaattttactaaattatttgaactaagcatgactctccaaactgtggacatattttctcaagggattctatgtattatggcttcaaggtacttttgtgtgtacctcaaaatggctgaaggcattttaacagtgcatctgagagtgtcttacttacatattatttgtacactattttatctatatctttggacattttatatttctgtgtaagtaaaacttccatgaaaatttcatttgtcaccatattttcgttatgcag

SEQ ID NO: 72848 - DNA, 1107 bp, Homo sapiens
attagagtctgtgcttcacttccgttccagcctcagcggcagctggatcgctcgacggagtgcctctggtagttggccaagacgccgaatatcaaaatcttcagcggcagctcccaccaggacttatcccagaaaattgctgaccgcctgggcctggagctaggcaaggtggtgactaagaaattcagcaaccaggagacctgcgtggaaattgatgagagtgtgcgtggagaggatgtctacatcgttcagagtggttgtggcgaaatcaacgacagtctaatggagcttttgatcatgattaatgcctgcaagattgcttcagctagccgagttactgcagtcatcccatgcttcccttatgcccgacaggataagaaggataagagccggtccccaatctctgccaagcttgttgcaaatatgctctctatagcaggtgcggatcatatcatcaccatggacctacatgcttctcaaattcagggcttttttgatatcccagtagacaacttgtatgcagagccaactgtcctgaagtggataagggagaatatccctgagtggaagaactgcattattgtctcgccagatgctggtggagctaaaagagtgacctccattgcagaccagttgaatgtggactttgctttgattcataaagaacggaagaaggccaatgaagtggactgcatagtgctagtgggagatgtgaatgatcgtgtggctatccttgtagatgacatggcagacacttgtgttacaatctgcctcgcagctgacaaacttctctcagctggagcaaccagagtttatgctatcttgactcatggaatcttttctggcccagccatttctcgcatcaacactgcatgctttgaagcagtggtagtcaccaataccatacctcaagatgagaagatgaagcattgctccaaaatacgagtaattgacatctccatgatccttgcagaagccataaggagaactcataatggggaatctgtttcctacctgttcagccatgttcctttataacagaataacttctaggttatgctattttaaaataaaataagattaataaaaacaaaccttgcctttatt

SEQ ID NO: 72849 - DNA, 381 bp, Homo sapiens
caacattgtacaattagcttaggttctagaccataataggtgctcaacatttgtgaaatgaatgaatgattgaatagttcaatttaaaaagcagtgaaggggcagggtgtggtggctcaggcctgtaatcccagcacttttggaggccgaggtgggcggatcacctgaagtcagaagtccaagaccagcctgaccaacatggagaaaccccatctctactaaaaatacaaaattagctgggcgtggtggtgcatgactgtaatcctagctactcaggaggctgaggcaggagaattgcttgaacctgggaggcggaggttgcagtgagccgaaattgcaccattgcactccagcctggcaacaaaagtgaaactctgtctc

SEQ ID NO: 72850 - DNA, 584 bp, Homo sapiens
tgctatgctgcccagacaggtcttgaactcctggcctcaagtgatcttctcctcttagcccccaaagacctaggattacaggcatgggctaccatgcctgtctcctgtggtgggtttatatctctgtgttcctttcctgccattttagtggttattgagactgtgtgaagttgcatgctttcatgcaatcactggcttgaacaagaaaccttttttctggggcatttctaattgcttggatatatgcaagtaaacttcttatttagcttatcacatttaatgtgttgacaatgatgggtacaaaatggaacccaataagaaaatcaccgaagtgtttccagtaaaaatgcacaaggatatgctctgacttggatcccattctttcattcaatgtctgtttactgggcacacactgatgctaccccgtgaagtggctgaggcagtgcacatggtaggcatggcccctgccttcctgaagctcatgctatgggaaagccatggtgtagaattatcaagtaagacaggtccagatagtgagaagtacctgtgtggaggacgaggtgccaccttatgaagaggcctgg

SEQ ID NO: 72851 - DNA, 527 bp, Homo sapiens
gctcaaagcaggcctccatcgttttgaatagtatacaaaaaacaacaaggggagctctgtgaagttagaaaaactaccctaattcacctcattctaaaagttgaggaaaactaatttcacataaaaacaataacaggaataacaaggtcaaatcccgtacagtgttacaagaaaaacgagatgcggaaaagaacagcatccctagagacgatgaaatcaagccagaaatatacacctataagacaagtcgaaaattgtaaccttgtatttcaaaatgagctaaaaacaataagatggtataagacatgaaagaaaaacgatcagcattagtaaaactaagaaatgaagctcaggaaaagaattagaaataaaagaaaattatttcagaaatggagactaaagtaggaggaacataaacaacggataatatgttaagaaaaatagaagatgaaaaaaatttaaaaagtgagtcaacctttggacaagagtctgtgaagaaaaccagagcaagggaacagaaaaaatac

SEQ ID NO: 72852 - DNA, 414 bp, Homo sapiens
ctcctaaacaccagtcatctgacatacactgcagatctaaaatgggcctacgtgttctgcccttccttgcctacctgttgagcttgcaccgcttctgtgagtctccccccacccacaagagatccttcttccttcgcgctccactaacccgacataaatgtttatcatataaagttttccgttgcactcttgtgtttatgtctcctggcttcttcaccaagctgtgtgacagctgggccctgtcgcctccttcctcgtatatgcagcgactatcgcagagccgcttaatctttgttgaaggcagctgcggttcagccctgagggccacgggacggacgccactcattcagccctaccgggggcgctgtggcagccggcattggttgccgtgccctccgcttgtctcgctcagct

SEQ ID NO: 72853 - DNA, 414 bp, Homo sapiens
gttcaataatatctattattaaaattaatctcactgttccttttttcctttttaatatggcttctagagaatttaaaattatatatgtgactcacgtatagtacaacactgtaaatctataccatttgatatatacacatatgaccgatgatcattatactactaacaatattataaactaaaacataaactccctctgaattgctacaaaatcttaattaacaagttccaaatcaatgtccacagtagcgctgtagtaactggaaggtctagggcaaatttagtgctgagactgtggcacaaaaacatgtaccttacatcttagcctagaactgcaccttgaggaatttccttagtgggaagtgggttctggtctctctaaaaataatcccactgttcataaaatacttcttt

SEQ ID NO: 72854 - DNA, 427 bp, Homo sapiens
gaaaaatatcaccggtactgtgatagggattacattgagtctataactcactctgggtagtacagacattcaaacaatattaattcttccattccagagcatgggatatctttcatttttttttgtcacctttaatttctttcattggtgtcttatagttttctttgtagagatattttacttctttgttctttagttacatttattcctaggtattttattttttgtagctattgtaaatgagattgatttatttctttttcaggctgattgctgttagcatatagaaacactcctgatttttgcatgctgattttgtgtcctatgattttactaaattcatttgtcggttctaagagtttttggtggagtctttgggcttttctaaatttaagatcatgttgtttgcaaacaaggataacttgac

SEQ ID NO: 72855 - DNA, 249 bp, Homo sapiens
cacctgctgggacatgcgagtgctggtgtctggaaggagggccgggctgtgctgagctctggggggccggtccccacagctcccccgacagggcccccggggcctcctctataaatcaggggtccgtgctcccagcccgcttcgaggggtttctgcttggcgtgtgggttctaagtgcgagctgctgtgtgtggaggctcctgagcaccgggtgcccctcgcgcgtgtgggtcccggggcagcccagct

SEQ ID NO: 72856 - DNA, 248 bp, Homo sapiens
tctgaattctatctcactttattatttcagtgataccaaaagacatcaatgtcacagtagtgatatacttatgtattagttatggaaattccacaggagttcaaggtcattatcactataattattttcctgactaaagccataaaggtgatttaggcaattattgtcatcttagctagtcctgttttatagcttatattcagcagacagctgtatgggaaggtaaatatgttgacaatgtccacaaa

SEQ ID NO: 72857 - DNA, 487 bp, Homo sapiens
attccatgtttattagtctattcaaaagcttttagaaatctgcacagccaagtggcactgaatccagaagcatgaaaggagctgcacaacttttcctcgtaagatttacacaagcagcacgggaaatctgaggcccagacatttccttatcaacagaatactccggtggattttcaagcaggctgttcagcagaggtttcgagcaggagcccaggtgtgggaagagcggagtgtgggagtcctcgtgtgaccctctgggggtggtgatggaactgactgtatggtctgcaaaacctaaaatatttactgtcaggtgcttatgtgtcctgtcctgagcccgtttcctctcttgtaaaatggagcaatgctgcttgatgaaatcagtcaagttgtggttggattcttatatgtaataaacctgcacattgtgcacatataccctaaaacttaaagtatgataaaaataaaaaaaattgttgcaaatctg

SEQ ID NO: 72858 - DNA, 94 bp, Homo sapiens
gatacccctgtcttacacccttcctccctgtgcctcaatcacaggagtcttggtatgtcttgtcaaaagcatcatgctctttctcacctatcct

SEQ ID NO: 72859 - DNA, 1061 bp, Homo sapiens
  misc_feature (18)..(18): n is a, c, g, or t
  misc_feature (880)..(880): n is a, c, g, or t
ccgggagtgcccgttgtntgcctggagacatgcctgtgggagaagaggctgcccccacctgctaccatcatcccagcatgggtgcggtggggggcaggggagacagagtaaaaatcgcagaggacatggggcagaaagatggaaggaacctgggccctcgatggctctgagtgagtcagtcctgcagtgccccgtccccatttttctgtggcctgggaaagtcaaatttcctcatcctttgtagttggccattgtgttatttggagatggaagagcattctgaaacaagccactataatgaaaatccaggtcgtagcaacttgccgtgcacggctttggcttggcatggacttacagtgacatctttgagatgcacttgtccggggtgcaggtatatttgagagtgtgaggaggacatatgtcctctaagctctgttttctaaaggcagcagaattccatttgccaagccagatgtccctcaatacgttagatcccaccaataaaacattaagcaattacaatggttaatattcactaaagtataattagaagctggcgtaaattgtgaatgaaattggcgggttccatacgttacagtgaaataccaaatctttttttagttgtgtatgtgtatctcagtgagtctgtcaactcagatgagtgaatcttacctcctctgtggatagaaacgagctcaatttcaactcagttcactataattttaaatgtttaagaacatcttgccagttgttctatcatgttaaagttactgaaatctggctgggtggagtggctcatgcctgtaatcccaggactttgggaggctgaggcgggtggattgcttgagcccaggagttcaagaccagcctgggcaacatngtgagaccctctctacaaaaaaaatccaaaagtagctgggcatcatggtgacgcacacctgtgttcccagctactcaggaggctgaggtgggaggatcacttgaagccgggaggtcgaaggtgcagggagccatgatcgtgacactgcattccagcctgggtgacagaacgagaccctgtc

SEQ ID NO: 72860 - DNA, 1515 bp, Homo sapiens
  misc_feature (1)..(1): n is a, c, g, or t
  misc_feature (170)..(170): n is a, c, g, or t
  misc_feature (559)..(559): n is a, c, g, or t
ngctactcgggaggctgagtcaggagaatggtgtgaacctgggaggcagagcttgcagtgagccgagatcgcgccactgcactccagcctgggcgacagagcaaggctctgtctcaaaaaaaaaaaaaaaaagaaaaagaaaaagaacagggcagggagtttccgtggcnctgaactctataaggctaatgacacaggtcaatagctgaggtgatgaacaatggactcgagatctcagtgaggtcaaagaactgctggataattgagctggacaggttggccaggtcttcccctggaaaggtacacctggctgggagtagacaaacacagggtggggtggaaaaggcaggagaaggaaaggctgagaagtgttagtggcagtatctgccacacccttaccctggtcttctgatcgctccatctgccgcccagcagcctcaaatccaggtctctgggtcctgggtggacctctagttgggagctgataagagaaggaggataggctgggcacggtgcctcatgccggtaatcccagcactttgggaggctgaggcgggcngatcactagaggtcaggagtttgataccagcctggccaacatggtgaagccccatcacatggtgaagccccatcacaccacttcactccagcctgggtgacagagtgaaactccatctcaaaaaaaaaaaaaaaaaaaaaaaatgaggttaaaccacataggggtcttattaggaggcaagggcaagatttggaggtggagagaagaactaccaccactatcactaacatctggtttttgtttttttttttttaccgggagtgcattaggagctgccaatggggctggggcatagaggtgagtgcagattgagggagaggggctccacagaacagccacaaagggaggatgacagtgggatgacacacagcaggcagcaacatggagagtgatccgcaatcaatctcactactcagaagtgaggagctttgctctccaaaaggagtgttagctgggaccagcgccagccctattggtgagagggcagggcttgatttccctcagccatagtccctttatgtctctgcacatttgcccacacagtctccaagacctaggatgcccacccccaatccctatccctccctgcccttcctttgcagatgcggatctccccttggtcattcaaggcactgctcaggcatcttatgcaagaaggcttcccaggttgcgaaggtgactcagacgcctcctttgggactccaacacccttccccggcagagcccctgcctgtctgcctccgtggtgtcaggttttgtgccctctactcactagattgtggacacagaaagcgctggtgctgtcaaaaccacttctgggttgccgggcgcggtggctcacacctataatcccagcactttgggaggccaagatgggcggattgcttgagcccaggagttcaagactaatctggcctacatggtgagaccctgtctctataaaaaatgcaaaaatt

SEQ ID NO: 72861 - DNA, 637 bp, Homo sapiens
aataagagctctgaagataaaaaaccttggtctccacaacctttatcgtaacccagacaatcctttctattcattccaggtctctacaataataacttaactctttcaattaattgcccatcagaaaatcgttgaatccatctgtgacctggacaccttccacctgcatccatggagttgtgtcacctttctggaccaaaccactggacaccttacatgtatcgattggcaacatgtacacctccacacactgctaaatgacaaagccgaattttgaaatacgatactgtgaggtgtttggagaagagaactgaaatgacgtcatggaggtggcaggggatcatcttgcccttttcttattttctgcctgtaacttctgtccccctaaaatgcataaaatccagctagaacccaaccaccttatgcagcagttcttaggacctcatggggctgtgtcatcaatcaaagtcctcatatttggctcagaataaatctcatcaactaatttacaaatttgacatgtgttgacaagtctgtcttaccgttctttaataagggccgtgtataatgttttctttagcaagtgtggcaaaattaaaccttagaaataaagagaaaaagaactcattatagaaaa

SEQ ID NO: 72862 - DNA, 446 bp, Homo sapiens
tttaggcaggagttagaacagttcagcttgggccatgttaagtttcagatgaaacatctgagaaaagatactgagataatttcttagtgaagtctggagttcaaaggagtatctggtttggatatatacattgggcattgccaacatccataaatggtgttcaagccatgagattggcttgagatcaccacgagggtaagtgtgacggaaatgctcaaggcttgagagctttctgatgtgttccaccatgaagaaactggggagatgtggaagaacctccaaaagagactgagaaggagaggccagtaaagtagaaggagtgctgggcagggatgttctggaagccaggtgagaaaatgtcgcaaggaggtagtgatcacctgcgtcacgtggtactagtgggtcaagtaagttgagggccaagacttagccactggatttagcga

SEQ ID NO: 72863 - DNA, 342 bp, Homo sapiens
gcggccgcctactactactactgctcgaattcaagcttctaacgatgtacgggcccatgttgatgcccagggtcactcttgctacccgctgggcccccaaacccccgctgcctctcttccttccccccatcccccacctggttttgactaatcctgcttccctctctgggcctggctgccgggatctggggtccctaagtccctctctttaaagaacttctgcgggtcagactctgaagccgagttgctgtgggcgtgcccggaagcagagcgccacactcgctgcttaagctcccccagctctttccagaaaacattaaactcagaattgtgttttcagca

SEQ ID NO: 72864 - DNA, 616 bp, Homo sapiens
aaacaaaaacgtctggctaggtacgaggctgggtggtttaatcggccgaggagctgcgtcgcctctggaccatgccgagagggctgaagaacaacatgaaaaatacaggcccagtcaggaccaggggctccctgcttcccggtgcttgcgctgctgtgaccccggtacctccatgtacccggcgaccgccgtgccccagatcaacatcactatcttgaaaggggagaagggtgaccgcggagatcgaggcctccaagggaaatatggcaaaacaggctcagcaggggccaggggccacactggacccaaagggcagaagggctccatgggggcccctggggagcggtgcaagagccactacgccgccttttcggtgggccggaagaagcccatgcacagcaaccactactaccagacggtgatcttcgacacggagttcgtgaacctctacgaccacttcaacatgttcaccggcaagttctactgctacgtgcccggcctctacttcttcagcctcaacgtgcacacctggaaccagaaggagacctacctgcatatactgcaatcgagcaaggaagaaaatgagaaacagaaacgcgacaaagaggacaaccag

SEQ ID NO: 72865 - DNA, 456 bp, Homo sapiens
cggggcacacacggttaatcctccgcggctgctgtttggacgaaaagcgctgggggtgttggaggctcctcgctgctcacatctggctgggcttcgctccttgcgcgtctgtcccactttctccctctcttcctttactttcgagaaaccgcgcttccgcttctggtcgcagagacctcggagaccgcgccggggagacggaggtgctgtgggtgggggggacctgtggctgctcgtaccgccccccaccctcctcttctgcactgccgtcctccggaagaccttttcccctgctctgtttccttcaccgagtctgtgcatcgccccggacctggccgggaggaggcttggccggcgggagatgctctaggggcggcgcgggaggagcggccggcgggacggaggtaggtggccgggccgggggacccagcgctgccccgccccatcctcgtggct

SEQ ID NO: 72866 - DNA, 443 bp, Homo sapiens
cggggcacacacggttaatcctccgcggctgctgtttggacgaaaagcgctgggggtgttggaggctcctcgctgctcacatctggctgggcttcgctccttgcgcgtctgtcccactttctccctctcttcctttactttcgagaaaccgcgcttccgcttctggtcgcagagacctcggagaccgcgccggggagacggaggtgctgtgggtgggggggacctgtggctgctcgtaccgccccccaccctcctcttctgcactgccgtcctccggaagaccttttcccctgctctgtttccctctctttaaagaacttctgcgggtcagactctgaagccgagttgctgtgggcgtgcccggaagcagagcgccacactcgctgcttaagctcccccagctctttccagaaaacattaaactcagaattgtgttttcagca

SEQ ID NO: 72867 - DNA, 2964 bp, Homo sapiens
cggggcacacacggttaatcctccgcggctgctgtttggacgaaaagcgctgggggtgttggaggctcctcgctgctcacatctggctgggcttcgctccttgcgcgtctgtcccactttctccctctcttcctttactttcgagaaaccgcgcttccgcttctggtcgcagagacctcggagaccgcgccggggagacggaggtgctgtgggtgggggggacctgtggctgctcgtaccgccccccaccctcctcttctgcactgccgtcctccggaagaccttttcccctgctctgtttccttcaccgagtctgtgcatcgccccggacctggccgggaggaggcttggccggcgggagatgctctaggggcggcgcgggaggagcggccggcgggacggagggcccggcaggaagatgggctcccgtggacagggactcttgctggcgtactgcctgctccttgcctttgcctctggcctggtcctgagtcgtgtgccccatgtccagggggaacagcaggagtgggaggggactgaggagctgccgtcgcctccggaccatgccgagagggctgaagaacaacatgaaaaatacaggcccagtcaggaccaggggctccctgcttcccggtgcttgcgctgctgtgaccccggtacctccatgtacccggcgaccgccgtgccccagatcaacatcactatcttgaaaggggagaagggtgaccgcggagatcgaggcctccaagggaaatatggcaaaacaggctcagcaggggccaggggccacactggacccaaagggcagaagggctccatgggggcccctggggagcggtgcaagagccactacgccgccttttcggtgggccggaagaagcccatgcacagcaaccactactaccagacggtgatcttcgacacggagttcgtgaacctctacgaccacttcaacatgttcaccggcaagttctactgctacgtgcccggcctctacttcttcagcctcaacgtgcacacctggaaccagaaggagacctacctgcacatcatgaagaacgaggaggaggtggtgatcttgttcgcgcaggtgggcgaccgcagcatcatgcaaagccagagcctgatgctggagctgcgagagcaggaccaggtgtgggtacgcctctacaagggcgaacgtgagaacgccatcttcagcgaggagctggacacctacatcaccttcagtggctacctggtcaagcacgccaccgagccctagctggccggccacctcctttcctctcgccaccttccacccctgcgctgtgctgaccccaccgcctcttccccgatccctggactccgactccctggctttggcattcagtgagacgccctgcacacacagaaagccaaagcgatcggtgctcccagatcccgcagcctctggagagagctgacggcagatgaaatcaccagggcggggcacccgcgagaaccctctgggaccttccgcggccctctctgcacacatcctcaagtgaccccgcacggcgagacgcgggtggcggcagggcgtcccagggtgcggcaccgcggctccagtccttggaaataattaggcaaattctaaaggtctcaaaaggagcaaagtaaaccgtggaggacaaagaaaagggttgttatttttgtctttccagccagcctgctggctcccaagagagaggccttttcagttgagactctgcttaagagaagatccaaagttaaagctctggggtcaggggaggggccgggggcaggaaactacctctggcttaattcttttaagccacgtaggaactttcttgagggataggtggaccctgacatccctgtggccttgcccaagggctctgctggtctttctgagtcacagctgcgaggtgatgggggctggggccccaggcgtcagcctcccagagggacagctgagccccctgccttggctccaggttggtagaagcagccgaagggctcctgacagtggccagggacccctgggtcccccaggcctgcagatgtttctatgaggggcagagctcctggtacatccatgtgtggctctgctccacccctgtgccaccccagagccctggggggtggtctccatgcctgccaccctggcatcggctttctgtgccgcctcccacacaaatcagccccagaaggccccggggccttggcttctgttttttataaaacacctcaagcagcactgcagtctcccatctcctcgtgggctaagcatcaccgcttccacgtgtgttgtgttggttggcagcaaggctgatccagaccccttctgcccccactgccctcatccaggcctctgaccagtagcctgagaggggctttttctaggcttcagagcaggggagagctggaaggggctagaaagctcccgcttgtctgtttctcaggctcctgtgagcctcagtcctgagaccagagtcaagaggaagtacacgtcccaatcacccgtgtcaggattcactctcaggagctgggtggcaggagaggcaatagcccctgtggcaattgcaggaccagctggagcagggttgcggtgtctccacggtgctctcgccctgcccatggccaccccagactctgatctccaggaaccccatagcccctctccacctcaccccatgttgatgcccagggtcactcttgctacccgctgggcccccaaacccccgctgcctctcttccttccccccatcccccacctggttttgactaatcctgcttccctctctgggcctggctgccgggatctggggtccctaagtccctctctttaaagaacttctgcgggtcagactctgaagccgagttgctgtgggcgtgcccggaagcagagcgccacactcgctgcttaagctcccccagctctttccagaaaacattaaactcagaattgtgttttcagca

SEQ ID NO: 72868 - DNA, 2602 bp, Homo sapiens
gcctgggcaaaaatttacactgagtcccactcttcgctccagggcccggcaggaagatgggctcccgtggacagggactcttgctggcgtactgcctgctccttgcctttgcctctggcctggtcctgagtcgtgtgccccatgtccagggggaacagcaggagtgggaggggactgaggagctgccgtcgcctccggaccatgccgagagggctgaagaacaacatgaaaaatacaggcccagtcaggaccaggggctccctgcttcccggtgcttgcgctgctgtgaccccggtacctccatgtacccggcgaccgccgtgccccagatcaacatcactatcttgaaaggggagaagggtgaccgcggagatcgaggcctccaagggaaatatggcaaaacaggctcagcaggggccaggggccacactggacccaaagggcagaagggctccatgggggcccctggggagcggtgcaagagccactacgccgccttttcggtgggccggaagaagcccatgcacagcaaccactactaccagacggtgatcttcgacacggagttcgtgaacctctacgaccacttcaacatgttcaccggcaagttctactgctacgtgcccggcctctacttcttcagcctcaacgtgcacacctggaaccagaaggagacctacctgcacatcatgaagaacgaggaggaggtggtgatcttgttcgcgcaggtgggcgaccgcagcatcatgcaaagccagagcctgatgctggagctgcgagagcaggaccaggtgtgggtacgcctctacaagggcgaacgtgagaacgccatcttcagcgaggagctggacacctacatcaccttcagtggctacctggtcaagcacgccaccgagccctagctggccggccacctcctttcctctcgccaccttccacccctgcgctgtgctgaccccaccgcctcttccccgatccctggactccgactccctggctttggcattcagtgagacgccctgcacacacagaaagccaaagcgatcggtgctcccagatcccgcagcctctggagagagctgacggcagatgaaatcaccagggcggggcacccgcgagaaccctctgggaccttccgcggccctctctgcacacatcctcaagtgaccccgcacggcgagacgcgggtggcggcagggcgtcccagggtgcggcaccgcggctccagtccttggaaataattaggcaaattctaaaggtctcaaaaggagcaaagtaaaccgtggaggacaaagaaaagggttgttatttttgtctttccagccagcctgctggctcccaagagagaggccttttcagttgagactctgcttaagagaagatccaaagttaaagctctggggtcaggggaggggccgggggcaggaaactacctctggcttaattcttttaagccacgtaggaactttcttgagggataggtggaccctgacatccctgtggccttgcccaagggctctgctggtctttctgagtcacagctgcgaggtgatgggggctggggccccaggcgtcagcctcccagagggacagctgagccccctgccttggctccaggttggtagaagcagccgaagggctcctgacagtggccagggacccctgggtcccccaggcctgcagatgtttctatgaggggcagagctcctggtacatccatgtgtggctctgctccacccctgtgccaccccagagccctggggggtggtctccatgcctgccaccctggcatcggctttctgtgccgcctcccacacaaatcagccccagaaggccccggggccttggcttctgttttttataaaacacctcaagcagcactgcagtctcccatctcctcgtgggctaagcatcaccgcttccacgtgtgttgtgttggttggcagcaaggctgatccagaccccttctgcccccactgccctcatccaggcctctgaccagtagcctgagaggggctttttctaggcttcagagcaggggagagctggaaggggctagaaagctcccgcttgtctgtttctcaggctcctgtgagcctcagtcctgagaccagagtcaagaggaagtacacgtcccaatcacccgtgtcaggattcactctcaggagctgggtggcaggagaggcaatagcccctgtggcaattgcaggaccagctggagcagggttgcggtgtctccacggtgctctcgccctgcccatggccaccccagactctgatctccaggaaccccatagcccctctccacctcaccccatgttgatgcccagggtcactcttgctacccgctgggcccccaaacccccgctgcctctcttccttccccccatcccccacctggttttgactaatcctgcttccctctctgggcctggctgccgggatctggggtccctaagtccctctctttaaagaacttctgcgggtcagactctgaagccgagttgctgtgggcgtgcccggaagcagagcgccacactcgctgcttaagctcccccagctctttccagaaaacattaaactcagaattgtgttttcagca

SEQ ID NO: 72869 - DNA, 2593 bp, Homo sapiens
cggggcacacacggttaatcctccgcggctgctgtttggacgaaaagcgctgggggtgttggaggctcctcgctgctcacatctggctgggcttcgctccttgcgcgtctgtcccactttctccctctcttcctttactttcgagaaaccgcgcttccgcttctggtcgcagagacctcggagaccgcgccggggagacggaggtgctgtgggtgggggggacctgtggctgctcgtaccgccccccaccctcctcttctgcactgccgtcctccggaagaccttttcccctgctctgtttccttcaccgagtctgtgcatcgccccggacctggccgggaggaggcttggccggcgggagatgctctaggggcggcgcgggaggagcggccggcgggacggagggcccggcaggaagatgggctcccgtggacagggactcttgctggcgtactgcctgctccttgcctttgcctctggcctggtcctgagtcgtgtgccccatgtccagggggaacagcaggagtgggaggggactgaggagctgccgtcgcctccggaccatgccgagagggctgaagaacaacatgaaaaatacaggcccagtcaggaccaggggctccctgcttcccggtgcttgcgctgctgtgaccccggtacctccatgtacccggcgaccgccgtgccccagatcaacatcactatcttgaaaggggagaagggtgaccgcggagatcgaggcctccaagggaaatatggcaaaacaggctcagcaggggccaggggccacactggacccaaagggcagaagggctccatgggggcccctggggagcggtgcaagagccactacgccgccttttcggtgggccggaagaagcccatgcacagcaaccactactaccagacggtgatcttcgacacggagttcgtgaacctctacgaccacttcaacatgttcaccggcaagttctactgctacgtgcccggcctctacttcttcagcctcaacgtgcacacctggaaccagaaggagacctacctgcacatcatgaagaacgaggaggaggtggtgatcttgttcgcgcaggtgggcgaccgcagcatcatgcaaagccagagcctgatgctggagctgcgagagcaggaccaggtgtgggtacgcctctacaagggcgaacgtgagaacgccatcttcagcgaggagctggacacctacatcaccttcagtggctacctggtcaagcacgccaccgagccctagctggccggccacctcctttcctctcgccaccttccacccctgcgctgtgctgaccccaccgcctcttccccgatccctggactccgactccctggctttggcattcagtgagacgccctgcacacacagaaagccaaagcgatcggtgctcccagatcccgcagcctctggagagagctgacggcagatgaaatcaccagggcggggcacccgcgagaaccctctgggaccttccgcggccggctctgctggtctttctgagtcacagctgcgaggtgatgggggctggggccccaggcgtcagcctcccagagggacagctgagccccctgccttggctccaggttggtagaagcagccgaagggctcctgacagtggccagggacccctgggtcccccaggcctgcagatgtttctatgaggggcagagctcctggtacatccatgtgtggctctgctccacccctgtgccaccccagagccctggggggtggtctccatgcctgccaccctggcatcggctttctgtgccgcctcccacacaaatcagccccagaaggccccggggccttggcttctgttttttataaaacacctcaagcagcactgcagtctcccatctcctcgtgggctaagcatcaccgcttccacgtgtgttgtgttggttggcagcaaggctgatccagaccccttctgcccccactgccctcatccaggcctctgaccagtagcctgagaggggctttttctaggcttcagagcaggggagagctggaaggggctagaaagctcccgcttgtctgtttctcaggctcctgtgagcctcagtcctgagaccagagtcaagaggaagtacacgtcccaatcacccgtgtcaggattcactctcaggagctgggtggcaggagaggcaatagcccctgtggcaattgcaggaccagctggagcagggttgcggtgtctccacggtgctctcgccctgcccatggccaccccagactctgatctccaggaaccccatagcccctctccacctcaccccatgttgatgcccagggtcactcttgctacccgctgggcccccaaacccccgctgcctctcttccttccccccatcccccacctggttttgactaatcctgcttccctctctgggcctggctgccgggatctggggtccctaagtccctctctttaaagaacttctgcgggtcagactctgaagccgagttgctgtgggcgtgcccggaagcagagcgccacactcgctgcttaagctcccccagctctttccagaaaacattaaactcagaattgtgttttcagca

SEQ ID NO: 72870 - DNA, 2910 bp, Homo sapiens
cggggcacacacggttaatcctccgcggctgctgtttggacgaaaagcgctgggggtgttggaggctcctcgctgctcacatctggctgggcttcgctccttgcgcgtctgtcccactttctccctctcttcctttactttcgagaaaccgcgcttccgcttctggtcgcagagacctcggagaccgcgccggggagacggaggtgctgtgggtgggggggacctgtggctgctcgtaccgccccccaccctcctcttctgcactgccgtcctccggaagaccttttcccctgctctgtttccttcaccgagtctgtgcatcgccccggacctggccgggaggaggcttggccggcgggagatgctctaggggcggcgcgggaggagcggccggcgggacggagggcccggcaggaagatgggctcccgtggacagggactcttgctggcgtactgcctgctccttgcctttgcctctggcctggtcctgagtcgtgtgccccatgtccagggggaacagcaggagtgggaggggactgaggagctgccgtcgcctccggaccatgccgagagggctgaagaacaacatgaaaaatacaggcccagtcaggaccaggggctccctgcttcccggtgcttgcgctgctgtgaccccggtacctccatgtacccggcgaccgccgtgccccagatcaacatcactatcttgaaaggggagaagggtgaccgcggagatcgaggcctccaagggaaatatggcaaaacaggctcagcaggggccaggggccacactggacccaaagggcagaagggctccatgggggcccctggggagcggtgcaagagccactacgccgccttttcggtgggccggaagaagcccatgcacagcaaccactactaccagacggtgatcttcgacacggagttcgtgaacctctacgaccacttcaacatgttcaccggcaagttctactgctacgtgcccggcctctacttcttcagcctcaacgtgcacacctggaaccagaaggagacctacctgcacatcatgaagaacgaggaggaggtggtgatcttgttcgcgcaggtgggcgaccgcagcatcatgcaaagccagagcctgatgctggagctgcgagagcaggaccaggtgtgggtacgcctctacaagggcgaacgtgagaacgccatcttcagcgaggagctggacacctacatcaccttcagtggctacctggtcaagcacgccaccgagccctagctggccggccacctcctttcctctcgccaccttccacccctgcgctgtgctgaccccaccgcctcttccccgatccctggactccgactccctggctttggcattcagtgagacgccctgcacacacagaaagccaaagcgatcggtgctcccagatcccgcagcctctggagagagctgacggcagatgaaatcaccagggcggggcacccgcgagaaccctctgggaccttccgcggccctctctgcacacatcctcaagtgaccccgcacggcgagacgcgggtggcggcagggcgtcccagggtgcggcaccgcggctccagtccttggaaataattaggcaaattctaaaggtctcaaaaggagcaaagtaaaccgtggaggacaaagaaaagggttgttatttttgtctttccagccagcctgctggctcccaagagagaggccttttcagttgagactctgcttaagagaagatccaaagttaaagctctggggtcaggggaggggccgggggcaggaaactacctctggcttaattcttttaagccacgtaggaactttcttgagggataggtggaccctgacatccctgtggccttgcccaagggctctgctggtctttctgagtcacagctgcgaggtgatgggggctggggccccaggcgtcagcctcccagagggacagctgagccccctgccttggctccaggttggtagaagcagccgaagggctcctgacagtggccagggacccctgggtcccccaggcctgcagatgtttctatgaggggcagagctcctggtacatccatgtgtggctctgctccacccctgtgccaccccagagccctggggggtggtctccatgcctgccaccctggcatcggctttctgtgccgcctcccacacaaatcagccccagaaggccccggggccttggcttctgttttttatcgcttccacgtgtgttgtgttggttggcagcaaggctgatccagaccccttctgcccccactgccctcatccaggcctctgaccagtagcctgagaggggctttttctaggcttcagagcaggggagagctggaaggggctagaaagctcccgcttgtctgtttctcaggctcctgtgagcctcagtcctgagaccagagtcaagaggaagtacacgtcccaatcacccgtgtcaggattcactctcaggagctgggtggcaggagaggcaatagcccctgtggcaattgcaggaccagctggagcagggttgcggtgtctccacggtgctctcgccctgcccatggccaccccagactctgatctccaggaaccccatagcccctctccacctcaccccatgttgatgcccagggtcactcttgctacccgctgggcccccaaacccccgctgcctctcttccttccccccatcccccacctggttttgactaatcctgcttccctctctgggcctggctgccgggatctggggtccctaagtccctctctttaaagaacttctgcgggtcagactctgaagccgagttgctgtgggcgtgcccggaagcagagcgccacactcgctgcttaagctcccccagctctttccagaaaacattaaactcagaattgtgttttcagca

SEQ ID NO: 72871 - DNA, 2866 bp, Homo sapiens
cggggcacacacggttaatcctccgcggctgctgtttggacgaaaagcgctgggggtgttggaggctcctcgctgctcacatctggctgggcttcgctccttgcgcgtctgtcccactttctccctctcttcctttactttcgagaaaccgcgcttccgcttctggtcgcagagacctcggagaccgcgccggggagacggaggtgctgtgggtgggggggacctgtggctgctcgtaccgccccccaccctcctcttctgcactgccgtcctccggaagaccttttcccctgctctgtttccttcaccgagtctgtgcatcgccccggacctggccgggaggaggcttggccggcgggagatgctctaggggcggcgcgggaggagcggccggcgggacggagggcccggcaggaagatgggctcccgtggacagggactcttgctggcgtactgcctgctccttgcctttgcctctggcctggtcctgagtcgtgtgccccatgtccagggggaacagcaggagtgggaggggactgaggagctgccgtcgcctccggaccatgccgagagggctgaagaacaacatgaaaaatacaggcccagtcaggaccaggggctccctgcttcccggtgcttgcgctgctgtgaccccggtacctccatgtacccggcgaccgccgtgccccagatcaacatcactatcttgaaaggggagaagggtgaccgcggagatcgaggcctccaagggaaatatggcaaaacaggctcagcaggggccaggggccacactggacccaaagggcagaagggctccatgggggcccctggggagcggtgcaagagccactacgccgccttttcggtgggccggaagaagcccatgcacagcaaccactactaccagacggtgatcttcgacacggagttcgtgaacctctacgaccacttcaacatgttcaccggcaagttctactgctacgtgcccggcctctacttcttcagcctcaacgtgcacacctggaaccagaaggagacctacctgcacatcatgaagaacgaggaggaggtggtgatcttgttcgcgcaggtgggcgaccgcagcatcatgcaaagccagagcctgatgctggagctgcgagagcaggaccaggtgtgggtacgcctctacaagggcgaacgtgagaacgccatcttcagcgaggagctggacacctacatcaccttcagtggctacctggtcaagcacgccaccgagccctagctggccggccacctcctttcctctcgccaccttccacccctgcgctgtgctgaccccaccgcctcttccccgatccctggactccgactccctggctttggcattcagtgagacgccctgcacacacagaaagccaaagcgatcggtgctcccagatcccgcagcctctggagagagctgacggcagatgaaatcaccagggcggggcacccgcgagaaccctctgggaccttccgcggccctctctgcacacatcctcaagtgaccccgcacggcgagacgcgggtggcggcagggcgtcccagggtgcggcaccgcggctccagtccttggaaataattaggcaaattctaaaggtctcaaaaggagcaaagtaaaccgtggaggacaaagaaaagggttgttatttttgtctttccagccagcctgctggctcccaagagagaggccttttcagttgagactctgcttaagagaagatccaaagttaaagctctggggtcaggggaggggccgggggcaggaaactacctctggcttaattcttttaagccacgtaggaactttcttgagggataggtggaccctgacatccctgtggccttgcccaagggctctgctggtctttctgagtcacagctgcgaggtgatgggggctggggccccaggcgtcagcctcccagagggacagctgagccccctgccttggctccaggttggtagaagcagccgaagggctcctgacagtggccagggacccctgggtcccccaggcctgcagatgtttctatgaggggcagagctcctggtacatccatgtgtggctctgctccacccctgtgccttggcttctgttttttataaaacacctcaagcagcactgcagtctcccatctcctcgtgggctaagcatcaccgcttccacgtgtgttgtgttggttggcagcaaggctgatccagaccccttctgcccccactgccctcatccaggcctctgaccagtagcctgagaggggctttttctaggcttcagagcaggggagagctggaaggggctagaaagctcccgcttgtctgtttctcaggctcctgtgagcctcagtcctgagaccagagtcaagaggaagtacacgtcccaatcacccgtgtcaggattcactctcaggagctgggtggcaggagaggcaatagcccctgtggcaattgcaggaccagctggagcagggttgcggtgtctccacggtgctctcgccctgcccatggccaccccagactctgatctccaggaaccccatagcccctctccacctcaccccatgttgatgcccagggtcactcttgctacccgctgggcccccaaacccccgctgcctctcttccttccccccatcccccacctggttttgactaatcctgcttccctctctgggcctggctgccgggatctggggtccctaagtccctctctttaaagaacttctgcgggtcagactctgaagccgagttgctgtgggcgtgcccggaagcagagcgccacactcgctgcttaagctcccccagctctttccagaaaacattaaactcagaattgtgttttcagca

SEQ ID NO: 72872 - DNA, 1827 bp, Homo sapiens
ggctttccagaaggaaaaaaaaattattgcttctgggcgaaaatagaaccatccttgaggttgagtctgtttgcttggccattttgggaatcacaatacctctgtgccaggctgggacgccgcccgtggcagggggctgggggcaggagtgaagcttctgccaggtcagggctgtgctgaccccaccgcctcttccccgatccctggactccgactccctggctttggcattcagtgagacgccctgcacacacagaaagccaaagcgatcggtgctcccagatcccgcagcctctggagagagctgacggcagatgaaatcaccagggcggggcacccgcgagaaccctctgggaccttccgcggccctctctgcacacatcctcaagtgaccccgcacggcgagacgcgggtggcggcagggcgtcccagggtgcggcaccgcggctccagtccttggaaataattaggcaaattctaaaggtctcaaaaggagcaaagtaaaccgtggaggacaaagaaaagggttgttatttttgtctttccagccagcctgctggctcccaagagagaggccttttcagttgagactctgcttaagagaagatccaaagttaaagctctggggtcaggggaggggccgggggcaggaaactacctctggcttaattcttttaagccacgtaggaactttcttgagggataggtggaccctgacatccctgtggccttgcccaagggctctgctggtctttctgagtcacagctgcgaggtgatgggggctggggccccaggcgtcagcctcccagagggacagctgagccccctgccttggctccaggttggtagaagcagccgaagggctcctgacagtggccagggacccctgggtcccccaggcctgcagatgtttctatgaggggcagagctcctggtacatccatgtgtggctctgctccacccctgtgccaccccagagccctggggggtggtctccatgcctgccaccctggcatcggctttctgtgccgcctcccacacaaatcagccccagaaggccccggggccttggcttctgttttttataaaacacctcaagcagcactgcagtctcccatctcctcgtgggctaagcatcaccgcttccacgtgtgttgtgttggttggcagcaaggctgatccagaccccttctgcccccactgccctcatccaggcctctgaccagtagcctgagaggggctttttctaggcttcagagcaggggagagctggaaggggctagaaagctcccgcttgtctgtttctcaggctcctgtgagcctcagtcctgagaccagagtcaagaggaagtacacgtcccaatcacccgtgtcaggattcactctcaggagctgggtggcaggagaggcaatagcccctgtggcaattgcaggaccagctggagcagggttgcggtgtctccacggtgctctcgccctgcccatggccaccccagactctgatctccaggaaccccatagcccctctccacctcaccccatgttgatgcccagggtcactcttgctacccgctgggcccccaaacccccgctgcctctcttccttccccccatcccccacctggttttgactaatcctgcttccctctctgggcctggctgccgggatctggggtccctaagtccctctctttaaagaacttctgcgggtcagactctgaagccgagttgctgtgggcgtgcccggaagcagagcgccacactcgctgcttaagctcccccagctctttccagaaaacattaaactcagaattgtgttttcagca

SEQ ID NO: 72873 - DNA, 1645 bp, Homo sapiens
gccaccttccacccctgcgctgtgctgaccccagggctcagcaccaggctgaccccaccgcctcttccccgatccctggactccgactccctggctttggcattcagtgagacgccctgcacacacagaaagccaaagcgatcggtgctcccagatcccgcagcctctggagagagctgacggcagatgaaatcaccagggcggggcacccgcgagaaccctctgggaccttccgcggccctctctgcacacatcctcaagtgaccccgcacggcgagacgcgggtggcggcagggcgtcccagggtgcggcaccgcggctccagtccttggaaataattaggcaaattctaaaggtctcaaaaggagcaaagtaaaccgtggaggacagaggccttttcagttgagactctgcttaagagaagatccaaagttaaagctctggggtcaggggaggggccgggggcaggaaactacctctggcttaattcttttaagccacgtaggaactttcttgagggataggtggaccctgacatccctgtggccttgcccaagggctctgctggtctttctgagtcacagctgcgaggtgatgggggctggggccccaggcgtcagcctcccagagggacagctgagccccctgccttggctccaggttggtagaagcagccgaagggctcctgacagtggccagggacccctgggtcccccaggcctgcagatgtttctatgaggggcagagctcctggtacatccatgtgtggctctgctccacccctgtgccaccccagagccctggggggtggtctccatgcctgccaccctggcatcggctttctgtgccgcctcccacacaaatcagccccagaaggccccggggccttggcttctgttttttataaaacacctcaagcagcactgcagtctcccatctcctcgtgggctaagcatcaccgcttccacgtgtgttgtgttggttggcagcaaggctgatccagaccccttctgcccccactgccctcatccaggcctctgaccagtagcctgagaggggctttttctaggcttcagagcaggggagagctggaaggggctagaaagctcccgcttgtctgtttctcaggctcctgtgagcctcagtcctgagaccagagtcaagaggaagtacacgtcccaatcacccgtgtcaggattcactctcaggagctgggtggcaggagaggcaatagcccctgtggcaattgcaggaccagctggagcagggttgcggtgtctccacggtgctctcgccctgcccatggccaccccagactctgatctccaggaaccccatagcccctctccacctcaccccatgttgatgcccagggtcactcttgctacccgctgggcccccaaacccccgctgcctctcttccttccccccatcccccacctggttttgactaatcctgcttccctctctgggcctggctgccgggatctggggtccctaagtccctctctttaaagaacttctgcgggtcagactctgaagccgagttgctgtgggcgtgcccggaagcagagcgccacactcgctgcttaagctcccccagctctttccagaaaacattaaactcagaattgtgttttcagca

SEQ ID NO: 72874 - DNA, 1276 bp, Homo sapiens
cgaaaaggcggcgtagtggctcttgcaccgctccccaggggcccccatggagcccttctgccctttgggtccagtgtggcccctggccccaaagggcaggaaactacctctggcttaattcttttaagccacgtaggaactttcttgagggataggtggaccctgacatccctgtggccttgcccaagggctctgctggtctttctgagtcacagctgcgaggtgatgggggctggggccccaggcgtcagcctcccagagggacagctgagccccctgccttggctccaggttggtagaagcagccgaagggctcctgacagtggccagggacccctgggtcccccaggcctgcagatgtttctatgaggggcagagctcctggtacatccatgtgtggctctgctccacccctgtgccaccccagagccctggggggtggtctccatgcctgccaccctggcatcggctttctgtgccgcctcccacacaaatcagccccagaaggccccggggccttggcttctgttttttataaaacacctcaagcagcactgcagtctcccatctcctcgtgggctaagcatcaccgcttccacgtgtgttgtgttggttggcagcaaggctgatccagaccccttctgcccccactgccctcatccaggcctctgaccagtagcctgagaggggctttttctaggcttcagagcaggggagagctggaaggggctagaaagctcccgcttgtctgtttctcaggctcctgtgagcctcagtcctgagaccagagtcaagaggaagtacacgtcccaatcacccgtgtcaggattcactctcaggagctgggtggcaggagaggcaatagcccctgtggcaattgcaggaccagctggagcagggttgcggtgtctccacggtgctctcgccctgcccatggccaccccagactctgatctccaggaaccccatagcccctctccacctcaccccatgttgatgcccagggtcactcttgctacccgctgggcccccaaacccccgctgcctctcttccttccccccatcccccacctggttttgactaatcctgcttccctctctgggcctggctgccgggatctggggtccctaagtccctctctttaaagaacttctgcgggtcagactctgaagccgagttgctgtgggcgtgcccggaagcagagcgccacactcgctgcttaagctcccccagctctttccagaaaacattaaactcagaattgtgttttcagca

SEQ ID NO: 72875 - DNA, 2906 bp, Homo sapiens
cggggcacacacggttaatcctccgcggctgctgtttggacgaaaagcgctgggggtgttggaggctcctcgctgctcacatctggctgggcttcgctccttgcgcgtctgtcccactttctccctctcttcctttactttcgagaaaccgcgcttccgcttctggtcgcagagacctcggagaccgcgccggggagacggaggtgctgtgggtgggggggacctgtggctgctcgtaccgccccccaccctcctcttctgcactgccgtcctccggaagaccttttcccctgctctgtttccttcaccgagtctgtgcatcgccccggacctggccgggaggaggcttggccggcgggagatgctctaggggcggcgcgggaggagcggccggcgggacggagggcccggcaggaagatgggctcccgtggacagggactcttgctggcgtactgcctgctccttgcctttgcctctggcctggtcctgagtcgtgtgccccatgtccagggggaacagcaggagtgggaggggactgaggagctgccgtcgcctccggaccatgccgagagggctgaagaacaacatgaaaaatacaggcccagtcaggaccaggggctccctgcttcccggtgcttgcgctgctgtgaccccggtacctccatgtacccggcgaccgccgtgccccagatcaacatcactatcttgaaaggggagaagggtgaccgcggagatcgaggcctccaagggaaatatggcaaaacaggctcagcaggggccaggggccacactggacccaaagggcagaagggctccatgggggcccctggggagcggtgcaagagccactacgccgccttttcggtgggccggaagaagcccatgcacagcaaccactactaccagacggtgatcttcgacacggagttcgtgaacctctacgaccacttcaacatgttcaccggcaagttctactgctacgtgcccggcctctacttcttcagcctcaacgtgcacacctggaaccagaaggagacctacctgcacatcatgaagaacgaggaggaggtggtgatcttgttcgcgcaggtgggcgaccgcagcatcatgcaaagccagagcctgatgctggagctgcgagagcaggaccaggtgtgggtacgcctctacaagggcgaacgtgagaacgccatcttcagcgaggagctggacacctacatcaccttcagtggctacctggtcaagcacgccaccgagccctagctggccggccacctcctttcctctcgccaccttccacccctgcgctgtgctgaccccaccgcctcttccccgatccctggactccgactccctggctttggcattcagtgagacgccctgcacacacagaaagccaaagcgatcggtgctcccagatcccgcagcctctggagagagctgacggcagatgaaatcaccagggcggggcacccgcgagaaccctctgggaccttccgcggccctctctgcacacatcctcaagtgaccccgcacggcgagacgcgggtggcggcagggcgtcccagggtgcggcaccgcggctccagtccttggaaataattaggcaaattctaaaggtctcaaaaggagcaaagtaaaccgtggaggacaaagaaaagggttgttatttttgtctttccagccagcctgctggctcccaagagagaggccttttcagttgagactctgcttaagagaagatccaaagttaaagctctggggtcaggggaggggccgggggcaggaaactacctctggcttaattcttttaagccacgtaggaactttcttgagggataggtggaccctgacatccctgtggccttgcccaagggctctgctggtctttctgagtcacagctgcgaggtgatgggggctggggccccaggcgtcagcctcccagagggacagctgagccccctgccttggctccaggttggtagaagcagccgaagggctcctgacagtggccagggacccctgggtcccccaggcctgcagatgtttctatgaggggcagagctcctggtacatccatgtgtggctctgctccacccctgtgccaccccagagccctggggggtggtctccatgcctgccaccctggcatcggctttctgtgccgcctcccacacaaatcagccccagaaggccccggggccttggcttctgttttttataaaacacctcaagcagcactgcagtctcccatctcctcgtgggctaagcatcaccgcttccacgtgtgttgtgttggttggcagcaaggctgatccagaccccttctgcccccactgccctcatccaggcctctgaccagtagcctgagaggggctttttctaggcttcagagcaggggagagctggaaggggctagaaagctcccgcttgtctgtttctcaggctcctgtgagcctcagtcctgagaccagagtcaagaggaagtacacgtcccaatcacccgtgtcaggattcactctcaggagctgggtggcaggagaggcaatagcccctgtggcaattgcaggaccaactctgatctccaggaaccccatagcccctctccacctcaccccatgttgatgcccagggtcactcttgctacccgctgggcccccaaacccccgctgcctctcttccttccccccatcccccacctggttttgactaatcctgcttccctctctgggcctggctgccgggatctggggtccctaagtccctctctttaaagaacttctgcgggtcagactctgaagccgagttgctgtgggcgtgcccggaagcagagcgccacactcgctgcttaagctcccccagctctttccagaaaacattaaactcagaattgtgttttcagca

SEQ ID NO: 72876 - DNA, 1059 bp, Homo sapiens
ggagagccgaaagctatcggctaggtacgaggcctgggtggtcctgacatccctgtggccttgcccaagggctctgctggtctttctgagtcacagctgcgaggtgatgggggctggggccccaggcgtcagcctcccagagggacagctgagccccctgccttggctccaggttggtagaagcagccgaagggctcctgacagtggccagggacccctgggtcccccaggcctgcagatgtttctatgaggggcagagctcctggtacatccatgtgtggctctgctccacccctgtgccttggcttctgttttttataaaacacctcaagcagcactgcagtctcccatctcctcgtgggctaagcatcaccgcttccacgtgtgttgtgttggttggcagcaaggctgatccagaccccttctgcccccactgccctcatccaggcctctgaccagtagcctgagaggggctttttctaggcttcagagcaggggagagctggaaggggctagaaagctcccgcttgtctgtttctcaggctcctgtgagcctcagtcctgagaccagagtcaagaggaagtacacgtcccaatcacccgtgtcaggattcactctcaggagctgggtggcaggagaggcaatagcccctgtggcaattgcaggaccagctggagcagggttgcggtgtctccacggtgctctcgccctgcccatggccaccccagactctgatctccaggaaccccatagcccctctccacctcaccccatgttgatgcccagggtcactcttgctacccgctgggcccccaaacccccgctgcctctcttccttccccccatcccccacctggttttgactaatcctgcttccctctctgggcctggctgccgggatctggggtccctaagtccctctctttaaagaacttctgcgggtcagactctgaagccgagttgctgtgggcgtgcccggaagcagagcgccacactcgctgcttaagctcccccagctctttccagaaaacattaaactcagaattgtgttttcagca

SEQ ID NO: 72877 - DNA, 2693 bp, Homo sapiens
cggggcacacacggttaatcctccgcggctgctgtttggacgaaaagcgctgggggtgttggaggctcctcgctgctcacatctggctgggcttcgctccttgcgcgtctgtcccactttctccctctcttcctttactttcgagaaaccgcgcttccgcttctggtcgcagagacctcggagaccgcgccggggagacggaggtgctgtgggtgggggggacctgtggctgctcgtaccgccccccaccctcctcttctgcactgccgtcctccggaagaccttttcccctgctctgtttccttcaccgagtctgtgcatcgccccggacctggccgggaggaggcttggccggcgggagatgctctaggggcggcgcgggaggagcggccggcgggacggagggcccggcaggaagatgggctcccgtggacagggactcttgctggcgtactgcctgctccttgcctttgcctctggcctggtcctgagtcgtgtgccccatgtccagggggaacagcaggagtgggaggggactgaggagctgccgtcgcctccggaccatgccgagagggctgaagaacaacatgaaaaatacaggcccagtcaggaccaggggctccctgcttcccggtgcttgcgctgctgtgaccccggtacctccatgtacccggcgaccgccgtgccccagatcaacatcactatcttgaaaggggagaagggtgaccgcggagatcgaggcctccaagggaaatatggcaaaacaggctcagcaggggccaggggccacactggacccaaagggcagaagggctccatgggggcccctggggagcggtgcaagagccactacgccgccttttcggtgggccggaagaagcccatgcacagcaaccactactaccagacggtgatcttcgacacggagttcgtgaacctctacgaccacttcaacatgttcaccggcaagttctactgctacgtgcccggcctctacttcttcagcctcaacgtgcacacctggaaccagaaggagacctacctgcacatcatgaagaacgaggaggaggtggtgatcttgttcgcgcaggtgggcgaccgcagcatcatgcaaagccagagcctgatgctggagctgcgagagcaggaccaggtgtgggtacgcctctacaagggcgaacgtgagaacgccatcttcagcgaggagctggacacctacatcaccttcagtggctacctggtcaagcacgccaccgagccctagctggccggccacctcctttcctctcgccaccttccacccctgcgctgtgctgaccccaccgcctcttccccgatccctggactccgactccctggctttggcattcagtgagacgccctgcacacacagaaagccaaagcgatcggtgctcccagatcccgcagcctctggagagagctgacggcagatgaaatcaccagggcggggcacccgcgagaaccctctgggaccttccgcggccctctctgcacacatcctcaagtgaccccgcacggcgagacgcgggtggcggcagggcgtcccagggtgcggcaccgcggctccagtccttggaaataattaggcaaattctaaaggtctcaaaaggagcaaagtaaaccgtggaggacaaagaaaagggttgttatttttgtctttccagccagcctgctggctcccaagagagaggccttttcagttgagactctgcttaagagaagatccaaagttaaagctctggggtcaggggaggggccgggggcaggaaactacctctggcttaattcttttaagccacgtaggaactttcttgagggataggtggaccctgacatccctgtggccttgcccaagggctctgctggtctttctgagtcacagctgcgaggtgatgggggctggggccccaggcgtcagcctcccagagggacagctgagccccctgccttggctccaggttggtagaagcagccgaagggctcctgacagtggccagggacccctgggtcccccaggcctgcagatgtttctatgaggggcagagctcctggtacatccatgtgtggctctgctccacccctgtgccaccccagagccctggggggtggtctccatgcctgccaccctggcatcggctttctgtgccgcctcccacacaaatcagccccagaaggccccggggccttggcttctgttttttataaaacacctcaagcagcactgcagtctcccatctcctcgtgggctaagcatcaccgcttccacgtgtgttgtgttggttggcagcaaggctgatccagaccccttctgcccccactgccctcatccaggcctctgaccagtagcctgagaggggctttttctaggcttcagagcaggggagagctggaaggggctagaaagctcccgcttgtctgtttctcaggctcctgtgagcctcagtcctgagaccagagtcaagaggaagtacacgtccctaatcctgcttccctctctgggcctggctgccgggatctggggtccctaagtccctctctttaaagaacttctgcgggtcagactctgaagccgagttgctgtgggcgtgcccggaagcagagcgccacactcgctgcttaagctcccccagctctttccagaaaacattaaactcagaattgtgttttcagca

SEQ ID NO: 72878 - DNA, 2451 bp, Homo sapiens
cggggcacacacggttaatcctccgcggctgctgtttggacgaaaagcgctgggggtgttggaggctcctcgctgctcacatctggctgggcttcgctccttgcgcgtctgtcccactttctccctctcttcctttactttcgagaaaccgcgcttccgcttctggtcgcagagacctcggagaccgcgccggggagacggaggtgctgtgggtgggggggacctgtggctgctcgtaccgccccccaccctcctcttctgcactgccgtcctccggaagaccttttcccctgctctgtttccttcaccgagtctgtgcatcgccccggacctggccgggaggaggcttggccggcgggagatgctctaggggcggcgcgggaggagcggccggcgggacggagggcccggcaggaagatgggctcccgtggacagggactcttgctggcgtactgcctgctccttgcctttgcctctggcctggtcctgagtcgtgtgccccatgtccagggggaacagcaggagtgggaggggactgaggagctgccgtcgcctccggaccatgccgagagggctgaagaacaacatgaaaaatacaggcccagtcaggaccaggggctccctgcttcccggtgcttgcgctgctgtgaccccggtacctccatgtacccggcgaccgccgtgccccagatcaacatcactatcttgaaaggggagaagggtgaccgcggagatcgaggcctccaagggaaatatggcaaaacaggctcagcaggggccaggggccacactggacccaaagggcagaagggctccatgggggcccctggggagcggtgcaagagccactacgccgccttttcggtgggccggaagaagcccatgcacagcaaccactactaccagacggtgatcttcgacacggagttcgtgaacctctacgaccacttcaacatgttcaccggcaagttctactgctacgtgcccggcctctacttcttcagcctcaacgtgcacacctggaaccagaaggagacctacctgcacatcatgaagaacgaggaggaggtggtgatcttgttcgcgcaggtgggcgaccgcagcatcatgcaaagccagagcctgatgctggagctgcgagagcaggaccaggtgtgggtacgcctctacaagggcgaacgtgagaacgccatcttcagcgaggagctggacacctacatcaccttcagtggctacctggtcaagcacgccaccgagccctagctggccggccacctcctttcctctcgccaccttccacccctgcgctgtgctgaccccaccgcctcttccccgatccctggactccgactccctggctttggcattcagtgagacgccctgcacacacagaaagccaaagcgatcggtgctcccagatcccgcagcctctggagagagctgacggcagatgaaatcaccagggcggggcacccgcgagaaccctctgggaccttccgcggccctctctgcacacatcctcaagtgaccccgcacggcgagacgcgggtggcggcagggcgtcccagggtgcggcaccgcggctccagtccttggaaataattaggcaaattctaaaggtctcaaaaggagcaaagtaaaccgtggaggacaaagaaaagggttgttatttttgtctttccagccagcctgctggctcccaagagagaggccttttcagttgagactctgcttaagagaagatccaaagttaaagctctggggtcaggggaggggccgggggcaggaaactacctctggcttaattcttttaagccacgtaggaactttcttgagggataggtggaccctgacatccctgtggccttgcccaagggctctgctggtctttctgagtcacagctgcgaggtgatgggggctggggccccaggcgtcagcctcccagagggacagctgagccccctgccttggctccaggttggtagaagcagccgaagggctcctgacagtggccagggacccctgggtcccccaggcctgcagatgtttctatgaggggcagagctcctggtacatccatgtgtggctctgctccacccctgtgccaccccagagccctggggggtggtctccatgcctgccaccctggcatcggctttctgtgccgcctcccacacaaatcagccccagaaggccccggggccttggcttctgttttttataaaacacctcaagcagcactgcagtctcccatctcctcgtgggctaagcatcaccgcttccacgtgtgttgtgttggttggcagcaaggctgatccagacccttctgcgggtcagactctgaagccgagttgctgtgggcgtgcccggaagcagagcgccacactcgctgcttaagctcccccagctctttccagaaaacattaaactcagaattgtgttttcagca

SEQ ID NO: 72879 - DNA, 3047 bp, Homo sapiens
  misc_feature (2063)..(2063): n is a, c, g, or t
  misc_feature (2174)..(2175): n is a, c, g, or t
  misc_feature (2189)..(2189): n is a, c, g, or t
  misc_feature (2274)..(2274): n is a, c, g, or t
  misc_feature (2322)..(2322): n is a, c, g, or t
  misc_feature (2334)..(2334): n is a, c, g, or t
  misc_feature (2339)..(2339): n is a, c, g, or t
  misc_feature (2432)..(2432): n is a, c, g, or t
  misc_feature (2435)..(2435): n is a, c, g, or t
  misc_feature (2455)..(2455): n is a, c, g, or t
  misc_feature (2475)..(2475): n is a, c, g, or t
  misc_feature (2477)..(2478): n is a, c, g, or t
  misc_feature (2500)..(2500): n is a, c, g, or t
  misc_feature (2611)..(2612): n is a, c, g, or t
  misc_feature (2697)..(2697): n is a, c, g, or t
  misc_feature (2702)..(2702): n is a, c, g, or t
  misc_feature (2714)..(2715): n is a, c, g, or t
  misc_feature (2833)..(2833): n is a, c, g, or t
  misc_feature (2835)..(2835): n is a, c, g, or t
  misc_feature (2854)..(2854): n is a, c, g, or t
  misc_feature (2915)..(2915): n is a, c, g, or t
  misc_feature (2937)..(2937): n is a, c, g, or t
  misc_feature (2939)..(2939): n is a, c, g, or t
  misc_feature (2968)..(2968): n is a, c, g, or t
cggggcacacacggttaatcctccgcggctgctgtttggacgaaaagcgctgggggtgttggaggctcctcgctgctcacatctggctgggcttcgctccttgcgcgtctgtcccactttctccctctcttcctttactttcgagaaaccgcgcttccgcttctggtcgcagagacctcggagaccgcgccggggagacggaggtgctgtgggtgggggggacctgtggctgctcgtaccgccccccaccctcctcttctgcactgccgtcctccggaagaccttttcccctgctctgtttccttcaccgagtctgtgcatcgccccggacctggccgggaggaggcttggccggcgggagatgctctaggggcggcgcgggaggagcggccggcgggacggagggcccggcaggaagatgggctcccgtggacagggactcttgctggcgtactgcctgctccttgcctttgcctctggcctggtcctgagtcgtgtgccccatgtccagggggaacagcaggagtgggaggggactgaggagctgccgtcgcctccggaccatgccgagagggctgaagaacaacatgaaaaatacaggcccagtcaggaccaggggctccctgcttcccggtgcttgcgctgctgtgaccccggtacctccatgtacccggcgaccgccgtgccccagatcaacatcactatcttgaaaggggagaagggtgaccgcggagatcgaggcctccaagggaaatatggcaaaacaggctcagcaggggccaggggccacactggacccaaagggcagaagggctccatgggggcccctggggagcggtgcaagagccactacgccgccttttcggtgggccggaagaagcccatgcacagcaaccactactaccagacggtgatcttcgacacggagttcgtgaacctctacgaccacttcaacatgttcaccggcaagttctactgctacgtgcccggcctctacttcttcagcctcaacgtgcacacctggaaccagaaggagacctacctgcacatcatgaagaacgaggaggaggtggtgatcttgttcgcgcaggtgggcgaccgcagcatcatgcaaagccagagcctgatgctggagctgcgagagcaggaccaggtgtgggtacgcctctacaagggcgaacgtgagaacgccatcttcagcgaggagctggacacctacatcaccttcagtggctacctggtcaagcacgccaccgagccctagctggccggccacctcctttcctctcgccaccttccacccctgcgctgtgctgaccccaccgcctcttccccgatccctggactccgactccctggctttggcattcagtgagacgccctgcacacacagaaagccaaagcgatcggtgctcccagatcccgcagcctctggagagagctgacggcagatgaaatcaccagggcggggcacccgcgagaaccctctgggaccttccgcggccctctctgcacacatcctcaagtgaccccgcacggcgagacgcgggtggcggcagggcgtcccagggtgcggcaccgcggctccagtccttggaaataattaggcaaattctaaaggtctcaaaaggagcaaagtaaaccgtggaggacaaagaaaagggttgttatttttgtctttccagccagcctgctggctcccaagagagaggccttttcagttgagactctgcttaagagaagatccaaagttaaagctctggggtcaggggaggggccgggggcaggaaactacctctggcttaattcttttaagccacgtaggaactttcttgagggataggtggaccctgacatccctgtggccttgcccaagggctctgctggtctttctgagtcacagctgcgaggtgatgggggctggggccccaggcgtcagcctcccagggagtggcactaggtctggagcctcccatgcgcttgagtctaccacgagttggctatgcatatgcatgcccgatacgtggtcgtccctgatcaaggtgtgccacagggcacacccntgggggtccccccctagaggctcatgcacgcaatgcttgtcgtacttgaagcgtgggcacggaagctctctgcggtacactccagtgttagtcgagtcttccttgggtccnnacccgcgtgctgancctagcctccgaagatgacctctgtgaggtagggctcgcagtcatctcggagtacgcatgatcgaatgctccatgtgaaccaatnctgcagacatgttcactgatgctcgcgctcgcgtacacgcaacaatanaagaatccaagnactcncacagtgaaaagcgctccgcgccctggggcgtgcccttatagagggcttgtactgttcttccatgtcgtaactcatatataacacaggccctncanacgggcaagcacattctgtncaagttacttcgaccaaatncnntcactcaggtagggtgcttaangacaatcgagccaggctatcacagcgattgtagttctgatcgtatcgcgtatagagccatgccagacgagacgtggattgcctaggaaaccccccatttcattgtcgcgcnnccgacgtggccaccttccagttcacaagcgctcttcctagagcacaacgataaagtacattgcatagaagcgcgcgggctgtttntctcncttaaatgcggnncttgcaaggacgacaaggggcccgacgcaacgctagtgcaaatgcgcgagtctagggatagaagacctgcacccgtccgtttgagcatcgctcgtataccatcgtcacaagggggtcntntcgcgttgctcgacacggnctctgtacaagcctgcgcttgaaagtaacactcacgcatgggtcacaagacgaatgacaanagaggaagaccaaacttgctcncncgataagttcaatccgcggatggtctagngcgacattgtcatcctcctgccagaggcagcgctagatgcatgtgcgaatgaacgacgggcgaagtaggtcgcccatgg

SEQ ID NO: 72880 - DNA, 962 bp, Homo sapiens
cggggcacacacggttaatcctccgcggctgctgtttggacgaaaagcgctgggggtgttggaggctcctcgctgctcacatctggctgggcttcgctccttgcgcgtctgtcccactttctccctctcttcctttactttcgagaaaccgcgcttccgcttctggtcgcagagacctcggagaccgcgccggggagacggaggtgctgtgggtgggggggacctgtggctgctcgtaccgccccccaccctcctcttctgcactgccgtcctccggaagaccttttcccctgctctgtttccttcaccgagtctgtgcatcgccccggacctggccgggaggaggcttggccggcgggagatgctctaggggcggcgcgggaggagcggccggcgggacggagggcccggcaggaagatgggctcccgtggacagggactcttgctggcgtactgcctgctccttgcctttgcctctggcctggtcctgagtcgtgtgccccatgtccagggggaacagcaggagtgggaggggactgaggagctgccgtcgcctccggaccatgccgagagggctgaagaacaacatgaaaaatacaggcccagtcaggaccaggggctccctgcttcccggtgcttgcgctgctgtgaccccggtacctccatgtacccggcgaccgccgtgccccagatcaacatcactatcttgaaaggggagaagggtgaccgcggagatcgaggcctccaagggaaatatggcaaaacaggctcagcaggggccaggggccacactggacccaaagggcagaagggctccatgggggcccctggggagcggtgcaagagccactgaaggtgatgtaggtgtccagctcctcgctgaagatggcgttctcacgttcgcccttgtagaggcgtacccacaccttgtcctgctctcgcagctccagcatcaggctctg

SEQ ID NO: 72881 - DNA, 423 bp, Homo sapiens
ctaatccccagtttctgtgagtgtggccttatttggaaatagagtctctgcagatgtaatcaagttaagacaaggtcatcgtgaattaggtgtccaatgattgatgtccttatgagaagagagggagatttgaatacagacacagagacacaaacggagggaagaaggctggtgactgagtcctcgtcccccatctcctatgcctgcacagaggagaactctttgtaaacatcaagtgtcatgaccatcagcccctggaaaacatctggtctgccttcactagaggaccattttcaattactttggggataagaagattggccctgatggaaagtgaattgctcatgagatccagtcaatgaaagaaaaaaagaaaactgtactttagctcaggaactagaataaagtttccaaaaaacacac

SEQ ID NO: 72882 - DNA, 340 bp, Homo sapiens
tcaaggctgcagtgagctatgatcacaccactgtactccagcctgggtaacagaagaataccctgtctcttaaaaaggaaaatcaaataggggaaatgggatatataaataaagaacaatagtgaatgtgtcaggtgagatgacggacttgtaatgtgctgtggggggtcaaatatgaagaaggccttcttcctctggaaaggtcataaagaatgtcacacttgtgttggaacttgtgaagtgggtagaattttatcaagtagaaatgagagaaaggcatgccaagcaaaggatcggcatgaataaggtctactagtttgtggtcctctggctaagaatt

SEQ ID NO: 72883 - DNA, 492 bp, Homo sapiens
tgagctcagagggctccagtgtagagctttacccatggtcttgaacctgagagttctaagcacttgcttgcttttagttttctaaatcattcagagcatttttacccatggcctctaatatggtgtggatctgtgtcctcacccaaatctcgtgtcaaattgtaatccccaatgttggaggtggaggctggtgggaggtgattggatcatgggggcagtttctcatgaatgatttagcaccatctcccttggtcaagacagtgagtgagtgagttatcatgaaatctgtctgtttaaaagtatgtagtgcctccctccacccttcctcctcctctggccatgtaagatgtgctggcttccccttcgttttccaccatgactgtaagtttcttgaagcctccccagaagctgagcatgtgccagtatcatgcttcctgtacagcctgaagaactgtgtgccaattaaacctctttcctttataaattatctcg

SEQ ID NO: 72884 - DNA, 594 bp, Homo sapiens
caggaaatcatttcaaggttggacttgctggcaaaaacctagagtatagtaattttgtactgctgatttaaagatgcgccccatgctttgatatatataaatatggcaaagcttaggcttctagtataaaagctgggactcttggcatgttattacttagagagaagaccagtcgaattttgcatagaagtagacctgtgatacctataggtatggaaaatatgtcataagaagtggttttggattatttcaagtgtctgaataagtatttgattgaaaactctgaaagttctgtgccatggacaggtgtaatattaaaaatatttaatgattagtatggcatgggcacaaatcaagcagaacagatacctaattaatcagaacagcctttagcccttatgccacaccagagcttactagctaaatgtcatccttgaccatggaacatggttaaaatgagctgctggctgggcaaggtagctcatgtctgtaatcccagcactttgggaggtcgaggcaggaggatcgcttgagcccaggagtttgagaccagctaggtaacacagtgagatcccgtctctgttattaaaaaaa

SEQ ID NO: 72885 - DNA, 774 bp, Homo sapiens
gaaaaagatccccaaggatctgttactactgcatttccttcttgctctgtctacagcctaggccaactagtcagggtctggacatgcatctcctaaaggaagaactgtgtagcaccattgatcacaatgtaacatttccatgctgcattaagggtgtctctctctaatcatgattgtacctgtctcttcctgggtaaagggagatttttttttttaatgtgtaaagaattgatgcgagccaggaacatgtctgtagtcccagctacttgggcacacgcctgtagtccaggccactcgagcacacacctgtagtaccagctactctggaggctgaggcaggaggatcacttgagcccaggagattaagactgtagtatactatgatcgtgcctgtggctagccactgtgctccagcctgggcaacaccatcgtaaaaataaataaataaataaataaattggggaggacagcctcactggtatcagacttacaggaccagatagacaagatgggtataaggggagctgaagtctgtgttcatatgaggaagagaagaccaagccctgggactttggctgaattcctccgtggggctggacggcagtgatctcctgttccctatgtgtaaacaaagattccagggcgtggttttgcactcctgttgtactcttttagaggtggaaaagaggtggatactgagatctaagaggaaaggatagtcattcacgttctgagatatgcgctctctctattgtctcgtacacaaagggatag

SEQ ID NO: 72886 - DNA, 1493 bp, Homo sapiens
acctgaccagccaccccatagcccctggctgaagaagaaagagcatcttctctcccactgcaccccttctcctccaagaatagttgcccacattcccaaaatgtggaaagacttttcttttccttccggaacatgttcttcaccaccttttggagatttaaccatagctgccaaagctatgcacccagttggccttagaaaaccacaatgtttacagccctgtcttagggccgcggcttctcttatcttccaccaccttccttgcttgcagggttatcttctcacagggctggaatgcaaatttcagaggcttcttttgaagattccccaagtcaagcaggcaagatgcctagatcttctgttatctttgacatgtaacatcctttttagaggctcagaacacctccttggctgctatctcatgtgttagaatccagtttgtggtgaacctctttggaaggggaccccctctctttaaaccctgttcctctgtcctggtaacattctccttctaggagagcctctcttctgagaaggtaaaggaagggctgggtgagacacacagctatcctaggagccgtaggaagacaaaacttcccttttgttttactcctcactcctctatttttgttttactcacttctttatattttgttttactcctcactcctgtatattttggtttacttactcctctatttcagaaattgaaaaagatccccaaggatctgttactactgcatttccttcttgctctgtctacagcctaggccaactagtcagggtctggacatgcatctcctaaaggaagaactgtgtagcaccattgatcacaatgtaacatttccatgctgcattaagggtgtctctctctaatcatgattgtacctgtctcttcctgggtaaagggagatttttttttttaatgtgtaaagaattgatgcgagccaggaacatgtctgtagtcccagctacttgggcacacgcctgtagtccaggccactcgagcacacacctgtagtaccagctactctggaggctgaggcaggaggatcacttgagcccaggagattaagactgtagtatactatgatcgtgcctgtggctagccactgtgctccagcctgggcaacaccatcgtaaaaataaataaataaataaataaattggggaggacagcctcactggtatcagacttacaggaccagatagacaagatgggtataaggggagctgaagtctgtgttcatatgaggaagagaagaccaagccctgggactttggctgaattcctccgtggggctggacggcagtgatctcctgttccctatgtgtaaacaaagattccagggcgtggttttgcactcctgttgtactcttttagaggtggaacgctctctctattgtctcgtacacaaagggatagtctcttttctggagctgatgtccctgcttggaggttagccccaaaacatggctcttgtattgttcta

SEQ ID NO: 72887 - DNA, 736 bp, Homo sapiens
ttgaagattttttctcataatttatgtattgaagagatgtgagatattatcaattcaaatttcctcttgcactagaggctgggtgacattaagctcaccagctagttagtaaccaagccaggccttgaaactggtctgttcattttaaataataattagcattaattgaaattctcatgtgcagtctggttttctaattttcccaacaaccctaggaggcagttactgtcgttactgcattttgcagacaaggaaactgaggcgtagggacttgtctcaggtcatatagccagtaagaggtgaagctagtgcagtatgtttagtcctcatcctacactaccaattattttccaggcactcaaatttgtaaatgcccggagtatttgggctgttctaataagctgcagttttcagaggcattgtgtaagaatctgaagatttcttatttatctcctattgttgctctatgtaaatataatacaggacatcatcctaaaaagtatctttctttaaaggtgaacaaagggaagataaatacgaaaatgaggaagaaagaaaatcaggagaggataaaatcacaaaaggttagggaaggagaaacttttaaggagaatggagtgtttcatagtgtcaagtaccacagaaaggtcaagtaagatcagagctgaaaatttaccgttggatttggcaattaggaggtgactggtgaccttgacaactgcaatttcagtgtagc

SEQ ID NO: 72888 - DNA, 1623 bp, Homo sapiens
agagtttataaagttcatatataccctagttaaagcacttaagaaaatatggcatgtttgacttttagttcctagagagtttttgtttttgtttttgtttttttttgagacggagtcttgctatgtctcccaggctggagggcagtggcatgatctcggctcactacaacttccacctcccgggttcaagcaattctcctgcctcagcctccagagtagctgggattacaggcgcccaccaccacacccggcagatttttgtatttttggtagagacgcggtttcatcatgtttggccaggctggtctcgaactcctgacctcaggtgatccgcctgccttggcctcccaaagtgttgggattacaggcatgagccactgcgcctggccagctagagagtttttaaagcagagctgagcacacactggatgcgtttgaatgtgtttgtgtagtttgttgtgaaattgttacatttagcaggcagatccagaagcactagtgaactgtcatcttggtggggttggcttaaatttaattgactgtttagattccatttcttaattgattggccagtatgaaaagatgccagtgcaagtaaccatagtatcaaaaaagttaaaaattattcaaagctatagtttatacatcaggtactgccatttactgtaaaccacctgcaagaaagtcaggaacaactaaattcacaagaactgtcctgctaagaagtgtattaaagatttccattttgttttactaattgggaacatcttaatgtttaatatttaaactattggtatcatttttctaatgtataatttgtattactgggatcaagtatgtacagtggtgatgctagtagaagtttaagccttggaaataccactttcatattttcagatgtcatggatttaatgagtaatttatgtttttaaaattcagaatagttaatctctgatctaaaaccatcaatctatgttttttacggtaatcatgtaaatatttcagtaatataaactgtttgaaaaggctgctgcaggtaaactctatactaggatcttggccaaataatttacaattcacagaatattttatttaaggtggtgctttttttttttgtccttaaaacttgatttttcttaactttattcatgatgccaaagtaaatgaggaaaaaaactcaaaaccagttgagtatcattgcagacaaaactaccagtagtccatattgtttaatattaagttgaataaaataaattttatttcagtcagagcctaaatcacattttgattgtctgaatttttgatactatttttaaaatcatgctagtggcggctgggcgtggtggctcacgcctgtaatcccagcattttgggaggccgaagtgggtggatcacgaggtcgggagttcgagaccagcttggccaaaatggtgaaaccccatctgtactaaaaactacaaaaattagctgggcgcggtggcaggtgcctgtaatcccagctacctgggagtctgaggcaggagaattgcttgaaccctggcgacagaggatgcagtgagccaagatggtgccactgtactccagactgggcgacagagtgagactctgtctcaaaaaaaaaaa

SEQ ID NO: 72889 - DNA, 1980 bp, Homo sapiens
tttgttgatactgaggagatgactgggacccacttacataggactatcaaaacttatctgcagcaaattggagttgatatggataaaatacatggccaggcctatgatagcaccactaatttgaagataaaatttaataaaatagcagcagaattcaagaaagaagaaccaagagctttatacatacattgttatgcacactttttggatttatcaataattaggttttgtaaagaagtaaaagaactccgaagtgctctaaaaactctcagttctttgttcaacactatttgtatgtctggggaaatgttggcaaattttcgaaacatttataggctaagtcaaaacaaaacatgcaagaaacatatatcacaatcatgttggacagtccatgatcgtacattactatctgtgattgacagtcttccagagattattgaaacattggaagttatagcaagccattcttcaaatacaagtttcgccgatgaattgagtcatttgctgacattggtttccaaatttgaatttgtcttttgtttgaaattcctgtatcgagtgctgagtgttacaggaattctttccaaagagcttcaaaataaaaccatagacattttttctttgtcttcaaaaatagaagcaattttggaatgtttatcatctgaaagaaatgacgtatactttaaaacaatctgggatggaacagaggaaatatgtcaaaaaataacctgtaaaggttttaaagttgaaaaaccttctcttcagaaaagaagaaaaattcagaaatcagtagatcttggcaattcagataatatgttttttcctacttcaacagaagaacaatataaaattaatatctattaccaaggattagatactatattacaaaatttaaagttatgtttttcggagtttgattattgcaaaataaagcaaatttcagaactgttatttaaatggaatgaaccattaaatgaaacaacagcaaaacatgttcaggaattttataaacttgatgaggacattatcccagaacttagattttatcgacattatgcaaagcttaactttgtcatagatgatagttgcataaacttcgtcagtctcggctgtttgtttattcagcatggtcttcacagtaatattccttgtctctcaaagctattatatattgctttgtcttggccaattacttcagcaagtactgagaactcattttctaccctgcctcgtcttaagacatatttatgtaataccatgggacaagagaagcttactggcccagccctaatggctgttgagcaggagttggtaaataaactaatggagcctgaaagactcaatgaaattgtggaaaagtttatcagtcagatgaaagaaatataatacatgctcatttgaacttacctaaaagacttgtatttccattgggatgttttcatttcaaaattgttcaaaattcaaaagacacagaacgataaacagtgaagtctccttccctcctttagaactcattttctcttcccaaaaagtgttatcttttccttaaatatccctctagaggtatttttcctaagtggtattgtacggtgtatactgttcttcagcttgtcttctctgtgtaacatatttttgagattgtcccatgtcgttacatgaagagtttcttgattcttggtctataattgcagatgttattgtatgaatgtaccataatatatttgagcagtccctgctgacatttttttcctaaccttttgctattataaataatgattcattttataaccttttatataggtcacattgcacatgagtgagttactgtaagctggaaatctaaagttagaattactaggttaagatatgtgcatttttacttttgatagatattggcaagttgccatctataaggattgtgccagtttacagtcccacccacaatgcatgagagtgcctattaaatctttgtaagtgtta

SEQ ID NO: 72890 - DNA, 2544 bp, Homo sapiens
tttgttgatactgaggagatgactgggacccacttacataggactatcaaaacttatctgcagcaaattggagttgatatggataaaatacatggccaggcctatgatagcaccactaatttgaagataaaatttaataaaatagcagcagaattcaagaaagaagaaccaagagctttatacatacattgttatgcacactttttggatttatcaataattaggttttgtaaagaagtaaaagaactccgaagtgctctaaaaactctcagttctttgttcaacactatttgtatgtctggggaaatgttggcaaattttcgaaacatttataggctaagtcaaaacaaaacatgcaagaaacatatatcacaatcatgttggacagtccatgatcgtacattactatctgtgattgacagtcttccagagattattgaaacattggaagttatagcaagccattcttcaaatacaagtttcgccgatgaattgagtcatttgctgacattggtttccaaatttgaatttgtcttttgtttgaaattcctgtatcgagtgctgagtgttacaggaattctttccaaagagcttcaaaataaaaccatagacattttttctttgtcttcaaaaatagaagcaattttggaatgtttatcatctgaaagaaatgacgtatactttaaaacaatctgggatggaacagaggaaatatgtcaaaaaataacctgtaaaggttttaaagttgaaaaaccttctcttcagaaaagaagaaaaattcagaaatcagtagatcttggcaattcagataatatgttttttcctacttcaacagaagaacaatataaaattaatatctattaccaaggattagatactatattacaaaatttaaagttatgtttttcggagtttgattattgcaaaataaagcaaatttcagaactgttatttaaatggaatgaaccattaaatgaaacaacagcaaaacatgttcaggaattttataaacttgatgaggacattatcccagaacttagattttatcgacattatgcaaagcttaactttgtcatagatgatagttgcataaacttcgtcagtctcggctgtttgtttattcagcatggtcttcacagtaatattccttgtctctcaaagctattatatattgctttgtcttggccaattacttcagcaagtactgagaactcattttctaccctgcctcgtcttaagacatatttatgtaataccatgggacaagagaagcttactggcccagccctaatggctgttgagcaggagttggtaaataaactaatggagcctgaaagactcaatgaaattgtggaaaagtttatcagtcagatgaaagaaatataatacatgctcatttgaacttacctaaaagacttgtatttccattgggatgttttcatttcaaaattgttcaaaattcaaaagacacagaacgataaacagtgaagtctccttccctcctttagaactcattttctcttcccaaaaagtgttatcttttccttaaatatccctctagaggtatttttcctaagtggtattgtacggtgtatactgttcttcagcttgtcttctctgtgtaacatatttttgagattgtcccatgtcgttacatgaagagtttcttgattcttggtctataattgcagatgttattgtatgaatgtaccataatatatttgagcagtccctgctgacatttttttcctaaccttttgctattataaataatgattcattttataaccttttatataggtcacattgcacatgagtgagttactgtaagctggaaatctaaagttagaattactaggttaagatatgtgcatttttacttttgatagatattggcaagttgccatctataaggattgtgccagtttacagtcccacccacaatgcatgagagtgcctattaaatctttgtaagtgttatcaaatgttttgatctttcctaatctcttactttaaaaatggcgttttaatctcagtagaattttgtatattcacttaagaataaggttggggactgggcgtggtggttcacacctataatctcagccctttgagggcctacacaggaaggaagatcgcttgaggccacgagttcaagatgaggttggcaacatggtaagacctcatcactacaatttttttttttttaaattagtgaagtgtggtactgcacacccgaagtcccagctacttgggaggctgaggcaggaggattgcttaagcccagaaatttgaggctgcagtgagccatgattgcaccactatgctccagagtctaggcaacagagtgagaccttatctctttaaaacaaacaagaatgaagttaggtatctgtttatttgtttgagccatttgtatttccttttttgtagactgtcctgtttaaacgttaaaatcactgctgtggttttgatttatacatctcagctggatggcacaataaattattaagccatgttatgaaaatataactatatttaagt

SEQ ID NO: 72891 - DNA, 505 bp, Homo sapiens
gaaacagctggagaaaagtgccagagaaatagtctttaaaaaaaaaaaaaaaggccgggcgcggtggctcacgcctgtaatcccagcactttgggaggccgaggcgggcggatcacgaggtcaggagatcgagaccacggtgaaaccccgtctctactaaaaatacaaaaaatcagccgggcacagtggcgggcgcctgtagtcccagctacttgggaggctgaggcaggaggattgcttaagcccagaaatttgaggctgcagtgagccatgattgcaccactatgctccagagtctaggcaacagagtgagaccttatctctttaaaacaaacaagaatgaagttaggtatctgtttatttgtttgagccatttgtatttccttttttgtagactgtcctgtttaaacgttaaaatcactgctgtggttttgatttatacatctcagctggatggcacaataaattattaagccatgttatgaaaatataactatatttaagt

SEQ ID NO: 72892 - DNA, 372 bp, Homo sapiens
ccttgcaaaactgtggtacagaatcacagccaggatatcaacattgatgcaatccgtggatcttagttcagatttccccagttctgcttgttctcgtgtgtgtgtatgtagttctgtacagttgtgccacatgtgtaggtttatgtatccaccatcacattcaagatattttctgtgacagatacttttatatactccttgttctttttatttatttatttttttattttttgagatagagccttgctctgtcgggcgatcttggctcactgcaacctctgcctcccgggttgaagcgattcccctgcctcagcctcctgtgtagcggggaccatagcacccaccaccacgccgagccctatgcagtcttcg

SEQ ID NO: 72893 - DNA, 449 bp, Homo sapiens
aacgttattaatttatgtatttttaaaatataaaacattgtcaattgtagggaacaggcttcactgggatcttttagggaatatcttcagcttgatgaaataattcccgaatagccaagtggtctgacaagatcgagagtaatgaggcccatactttagtacagtcttgaatggccagatggtgctgggcataccccaaccagagatatgtaagtctttatgttgtcaaaatttcccagaaacatgaatttcccactaagattcattaaggaaaactagaatgaaaacaaaaacgttccttgtataatattcattagaaagaaatgaagaaggccgggcatggtggctcacgcctgtaatcccagcactttgagaggccaaggtaggcagatcatgaggtcaggagtttgagaccagcctggccaacatagtgaaatcccgtctctacc

SEQ ID NO: 72894 - DNA, 393 bp, Homo sapiens
taaagaaatttcaagataatacaagccatactgccagagagtaaaaagtgagcaaaaaaagtagatactcagaaatggaagattaaatactacatgttctcacttataagtgggaaccaaatgtgtacatatggacctacagagtgaaataatagacactggggactcggaaaggtgagaaagtgggatggggatgagggatgagaaattacctaataagtacaatgttcactgctcaggtgatggttacactaaagcacagacgtcaccaccacgcagtatatccatataacaaaactgcattgtacccctgtaaatctataaaaattaaaattaaaaataggccaggtgcggtgtctcacacctgtagtcccagcacttcgggagcccaag

SEQ ID NO: 72895 - DNA, 273 bp, Homo sapiens
aaaataataatggtaataataaaaacaaataagacttcacagtgatgctttgaaaaaaatagtcaatatttatgaagcgtatcccacatctagacacctcctggtggaattattgaacctcaagggtaatagggaatctttctgtcctctagggggagagggaaacggagctacttgcccagaaaaattctcaggctggccttggatctttccctcaaggcactcatatgcgggctattcattgagaaaatgcagtggggtggaggcagacat

SEQ ID NO: 72896 - DNA, 181 bp, Homo sapiens
aaaaatagagatgatgaagatatcaagaaattcataaaatgggaggtgaattcagctgctgagcactggggagagagattgaaattgggaagggggaaattttaaagtagaggtttatatcagtcatcatgggacatgctattagaattcaagacacaacaaggaaatcttaggggtccag

SEQ ID NO: 72897 - DNA, 531 bp, Homo sapiens
taaagcagcactatgcctggcatgtaagaaagtgccaactgtcgacagatgatccaaaagatttccttctaagcatctaacactgactgaggtcactgaagaccacactggcaggaatttcagggactgatgacatctccttcccttgtactcatgtttgagagagtaggtctgattcccttactgcaggcccccatgaggtctgatacggttcggctctgtgtccccacgcaaatctcatctctaattgttatccccatgtgtcaagggagggacctggtgggaagtgcttgcatcatggggacggttttcccctatgctgttctcctgatactgaattctcccgagagctgatggttttaaaagtgtaacagttcccccttcacttgcgtgcttgcttgttctctcttgccaccttgtgaagaaggtacctacttcccctttgccttccgccataattgtaagtttcttgaggcctccccagccacacagaactgagtcaattaaacctcttttgtttgtaaaaaagca

SEQ ID NO: 72898 - DNA, 2143 bp, Homo sapiens
agcgggaaggcaggtggcggggcgtctccgagcggcggggccaagggagggcacaacagctgctacctgaacagtttctgacccaacagttacccagcgccggactcgctgcgccccggcggctctagggacccccggcgccaacacttagctccgcgcccgagagaatgttggaccgacgacacaagacctcagacttgtgttattctagcagctgaacacaccccaggctcttctgaccggcagtggctctggaagcagtctggtgtatagagttatggattcactaccagattctactgtatgctcttgacaactatgaccacaatggtccacccacaaatgaattatcaggagtgaacccagaggcacgtatgaatgaaagtcctgatccgactgacctggcgggagtcatcattgagctcggccccaatgacagtccacagacaagtgaatttaaaggagcaaccgaggaggcacctgcgaaagaaagtgtgttagcacgactttccaagtttgaagttgaagatgctgaaaatgttgcttcatatgacagcaagattaagaaaattgtgcattcaattgtatcatcctttgcatttggactatttggagttttcctggtcttactggatgtcactctcatccttgccgacctaattttcactgacagcaaactttatattcctttggagtatcgttctatttctctagctattgccttattttttctcatggatgttcttcttcgagtatttgtagaaaggagacagcagtatttttctgacttatttaacattttagatactgccattattgtgattcttctgctggttgatgtcgtttacattttttttgacattaagttgcttaggaatattcccagatggacacatttacttcgacttctacgacttattattctgttaagaatttttcatctgtttcatcaaaaaagacaacttgaaaagctgataagaaggcgggtttcagaaaacaaaaggcgatacacaagggatggatttgacctagacctcacttacgttacagaacgtattattgctatgtcatttccatcttctggaaggcagtctttctatagaaatccaatcaaggaagttgtgcggtttctagataagaaacaccgaaaccactatcgagtctacaatctatgcagtgaaagagcttacgatcctaagcacttccataatagggtcgttagaatcatgattgatgatcataatgtccccactctacatcagatggtggttttcaccaaggaagtaaatgagtggatggctcaagatcttgaaaacatcgtagcgattcactgtaaaggaggcacagatagaacaggaactatggtttgtgccttccttattgcctctgaaatatgttcaactgcaaaggaaagcctgtattattttggagaaaggcgaacagataaaacccacagcgaaaaatttcagggagtagaaactccttctcagaagagatatgttgcatattttgcacaagtgaaacatctctacaactggaatctccctccaagacggatactctttataaaacacttcattatttattcgattcctcgttatgtacgtgatctaaaaatccaaatagaaatggagaaaaaggttgtcttttccactatttcattaggaaaatgttcggtacttgataacattacaacagacaaaatattaattgatgtattcgacggtccacctctgtatgatgatgtgaaagtgcagtttttctcttcgaatcttcctacatactatgacaattgctcattttacttctggttgcacacatcttttattgaaaataacaggctttatctaccaaaaaatgaattggataatctacataaacaaaaagcacggagaatttatccatcagattttgccgtggagatactttttggcgagaaaatgacttccagtgatgttgtagctggatccgattaagtatagctcccccttccccttctgggaaagaattatgttctttccaaccctgccacatgttcatatatcctaaatctatcctaaatgttccttgaagtatttatttatgtttatatatgtttatatatgttcttcataaatctattacatatatatagataaaatgt

SEQ ID NO: 72899 - DNA, 2197 bp, Homo sapiens
agcgggaaggcaggtggcggggcgtctccgagcggcggggccaagggagggcacaacagctgctacctgaacagtttctgacccaacagttacccagcgccggactcgctgcgccccggcggctctagggacccccggcgccaacacttagctccgcgcccgagagaatgttggaccgacgacacaagacctcagacttgtgttattctagcagctgaacacaccccaggctcttctgaccggcagtggctctggaagcagtctggtgtatagagttatggattcactaccagattctactgtatgctcttgacaactatgaccacaatggtccacccacaaatgaattatcaggagtgaacccagaggcacgtatgaatgaaagtcctgatccgactgacctggcgggagtcatcattgagctcggccccaatgacagtccacagacaagtgaatttaaaggagcaaccgaggaggcacctgcgaaagaaagcccacacacaagtgaatttaaaggagcagcccgggtgtcacctatcagtgaaagtgtgttagcacgactttccaagtttgaagttgaagatgctgaaaatgttgcttcatatgacagcaagattaagaaaattgtgcattcaattgtatcatcctttgcatttggactatttggagttttcctggtcttactggatgtcactctcatccttgccgacctaattttcactgacagcaaactttatattcctttggagtatcgttctatttctctagctattgccttattttttctcatggatgttcttcttcgagtatttgtagaaaggagacagcagtatttttctgacttatttaacattttagatactgccattattgtgattcttctgctggttgatgtcgtttacattttttttgacattaagttgcttaggaatattcccagatggacacatttacttcgacttctacgacttattattctgttaagaatttttcatctgtttcatcaaaaaagacaacttgaaaagctgataagaaggcgggtttcagaaaacaaaaggcgatacacaagggatggatttgacctagacctcacttacgttacagaacgtattattgctatgtcatttccatcttctggaaggcagtctttctatagaaatccaatcaaggaagttgtgcggtttctagataagaaacaccgaaaccactatcgagtctacaatctatgcagtgaaagagcttacgatcctaagcacttccataatagggtcgttagaatcatgattgatgatcataatgtccccactctacatcagatggtggttttcaccaaggaagtaaatgagtggatggctcaagatcttgaaaacatcgtagcgattcactgtaaaggaggcacagatagaacaggaactatggtttgtgccttccttattgcctctgaaatatgttcaactgcaaaggaaagcctgtattattttggagaaaggcgaacagataaaacccacagcgaaaaatttcagggagtagaaactccttctcagaagagatatgttgcatattttgcacaagtgaaacatctctacaactggaatctccctccaagacggatactctttataaaacacttcattatttattcgattcctcgttatgtacgtgatctaaaaatccaaatagaaatggagaaaaaggttgtcttttccactatttcattaggaaaatgttcggtacttgataacattacaacagacaaaatattaattgatgtattcgacggtccacctctgtatgatgatgtgaaagtgcagtttttctcttcgaatcttcctacatactatgacaattgctcattttacttctggttgcacacatcttttattgaaaataacaggctttatctaccaaaaaatgaattggataatctacataaacaaaaagcacggagaatttatccatcagattttgccgtggagatactttttggcgagaaaatgacttccagtgatgttgtagctggatccgattaagtatagctcccccttccccttctgggaaagaattatgttctttccaaccctgccacatgttcatatatcctaaatctatcctaaatgttccttgaagtatttatttatgtttatatatgtttatatatgttcttcataaatctattacatatatatagataaaatgt

SEQ ID NO: 72900 - DNA, 1857 bp, Homo sapiens
  misc_feature (1825)..(1825): n is a, c, g, or t
agcgggaaggcaggtggcggggcgtctccgagcggcggggccaagggagggcacaacagctgctacctgaacagtttctgacccaacagttacccagcgccggactcgctgcgccccggcggctctagggacccccggcgccaacacttagctccgcgcccgagagaatgttggaccgacgacacaagacctcagacttgtgttattctagcagctgaacacaccccaggctcttctgaccggcagtggctctggaagcagtctggtgtatagagttatggattcactaccagattctactgtatgctcttgacaactatgaccacaatggtccacccacaaatgaattatcaggagtgaacccagaggcacgtatgaatgaaagtcctgatccgactgacctggcgggagtcatcattgagctcggccccaatgacagtccacagacaagtgaatttaaaggagcaaccgaggaggcacctgcgaaagaaagcccacacacaagtgaatttaaaggagcagcccgggtgtcacctatcagtgaaagtgtgttagcacgactttccaagtttgaagttgaagatgctgaaaatgttgcttcatatgacagcaagattaagaaaattgtgcattcaattgtatcatcctttgcatttggactatttggagttttcctggtcttactggatgtcactctcatccttgccgacctaattttcactgacagcaaactttatattcctttggagtatcgttctatttctctagctattgccttattttttctcatggatgttcttcttcgagtatttgtagaaaggagacagcagtatttttctgacttatttaacattttagatactgccattattgtgattcttctgctggttgatgtcgtttacattttttttgacattaagttgcttaggaatattcccagatggacacatttacttcgacttctacgacttattattctgttaagaatttttcatctgtttcatcaaaaaagacaacttgaaaagctgataagaaggcgggtttcagaaaacaaaaggcgatacacaagggatggatttgacctagacctcacttacgttacagaacgtattattgctatgtcatttccatcttctggaaggcagtctttctatagaaatccaatcaaggaagttgtgcggtttctagataagaaacaccgaaaccactatcgagtctacaatctatgcagtgaaagagcttacgatcctaagcacttccataatagggtcgttagaatcatgattgatgatcataatgtccccactctacatcagatggtggttttcaccaaggaagtaaatgagtggatggctcaagatcttgaaaacatcgtagcgattcactgtaaaggaggcacagatagaacaggaactatggtttgtgccttccttattgcctctgaaatatgttcaactgcaaaggaaagcctgtattattttggagaaaggcgaacagataaaacccacagcgaaaaatttcagggagtagaaactccttctcagaagagatatgttgcatattttgcacaagtgaaacatctctacaactggaatctccctccaagacggatactctttataaaacacttcattatttattcgattcctcgttatgtacgtgatctaaaaatccaaatagaaatggagaaaaaggttgtcttttccactatttcattaggaaaatgttcggtacttgataacattacaacagacaaaatattaattgatgtattcgacggtccacctctgtatgatgatgtgaaagtgcagtttttctcttcgantcttcctacataacgtaacgggagatcctcta

SEQ ID NO: 72901 - DNA, 543 bp, Homo sapiens
cgttgtgctgttttctgtttataaagttggcggtgatggcaatcgcaagcttcccaggggattttttttttttgaacccttccagggtgttcttgcggcaatgggcaaccaaatgatgacgtcaaactccaactcccgcaaaaaaatggtttgtaggaaaaaattctgcccgggttgtgggggaaggggagcctggagaaaacaaagtcactattcccttttttgaaacaggaaaaaaaattattttttgttcagtaaaaatggtagagaattccaatgtccctagccacaagggaccagttccactgagaagtgaacagtgggaactcaaaatttcagaaacattgggggaagggaaaattggctttctcttaattggcagatgttccagtggggggggggggctctgtttttgttgggatgtgttatgttgtatgtacgcatatatggaccggagtctgctgagtttataaggttccaaaaatatggtaaaatcttggtttttgttaatttatctcaataaaagcccactggaactccaaa

SEQ ID NO: 72902 - DNA, 798 bp, Homo sapiens
agcgggaggcggcgggcgggcgaacgggcgagcgagggagggggcagaggagccgagttagctcagccaggcggcgacttcggcggcgccacgagagcgggcagcggaggagattgacgtgagtgaattcagatataactcaagcttgttagagggctttttaaaaataaaaagttgattccgtgcaagagagcaagttactgctgcttaccgttcagagacttacaggtgcttgcctgcattgcaataaaggactcatttattgagcaagacttatatttatctcttcattttggagagcctaataaactgttattacagtttctctactgactttcaaaagttttgaagtttgaaagacctttgcaattaaaacagcatgagcacggccagaacagagaaccctgttataatgggtctgtccagtcaaaatggtcagctgagaggccctgtgaaacccactggtggccctggaggagggggcacacagacacagcaacagatgaaccagctgaaaaacaccaacacaatcaataatggcactcagcagcaagcacagagtatgaccaccactattaagtaagtgttagagtaaattattaataaacacttgtggggaaccaagatttgtgttactttggtgttgactattaatacttatgccttaatttaaccattttgattccaaatagaggacagatgactttgttttatggccagtaggtatttgcaatagaataatatatttctgccataatttgttcagcaagtagtcatcctgaggtcagatgatacaca

SEQ ID NO: 72903 - DNA, 797 bp, Homo sapiens
agcgggaggcggcgggcgggcgaacgggcgagcgagggagggggcagaggagccgagttagctcagccaggcggcgacttcggcggcgccacgagagcgggcagcggaggagattgacgtgagtgaattcagatataactcaagcttgttagagggctttttaaaaataaaaagttgattccgtgcaagagagcaagttactgctgcttaccgttcagagacttacaggtgcttgcctgcattgcaataaaggactcatttattgagcaagacttatatttatctcttcattttggagagcctaataaactgttattacagtttctctactgactttcaaaagttttgaagtttgaaagacctttgcaattaaaacagcatgagcacggccagaacagagaaccctgttataatgggtctgtccagtcaaaatggtcagctgagaggccctgtgaaacccactggtggccctggaggagggggcacacagacacagcaacagatgaaccagctgaaaaacaccaacacaatcaataatggcactcagcagcaagcacagagtatgaccaccactattaagaggagagcattcccattgctttatctggtagggatatcttagctagagcaaaaaatggaacaggcaagagcggtgcctacctcattcccttacttgaacggctagacctgaagaaggacaatatacaaggttagttgaataaaagtttgtttttaaactaaaaatgggagtttcagccttggagccatgtgtagaagatactctttttttagtcaga

SEQ ID NO: 72904 - DNA, 575 bp, Homo sapiens
  misc_feature (85)..(85): n is a, c, g, or t
  misc_feature (94)..(94): n is a, c, g, or t
tttaaggctagggatgctgtatagtcccattagaaagctttttttcttaactgcacttagatttgttgtcctttttattactgcnccgcccccnccaaaaaatttctggtctgtctttagcttcatttctgaacattttatcttggcctcccagagtgctgggattacaggcgtgagccactgcatcataaggtgcagttacaggtgtgagccactgcatcataaggcgcagtatttctatagcttcttaaattttgtaaataatgatgtatagcatgttctcccacctcaccccatattttcttatatattccttgatactgtttcagcaatggtgattgttcccactagagaacttgctctacaggtcagtcaaatttgcatccaggtcagcaaacacatgggaggggccaaagtgatggcaaccacaggaggaaccaatttacgagatgacataatgaggcttgatgatacaggtaagaaatgattactaaaaggtagtgtagctctctgttattttagtcacaagtatttcagtaaattattaaaaattgtttttaagattaaggatagag

SEQ ID NO: 72905 - DNA, 483 bp, Homo sapiens
tcatggtcgagtctggatctagagcagcccccgacatctacaactatctgggagagggaatttaaaaggtgtcaacttttgaccaaaaaaattgtgcccttgtaccgatgcagctctctttctcccccacctcttgcgagataagagggatcattcatgtagaagaaaagagtataaatgcaattctgtatctcgctagagaacgtgtgggtgactaaacaaaaagtgcagtctccttcaccaactttagactgcgtggtgccacatgcctgtgggtccctcttaaagcacagacttaaaatggaaagtattactgaagtatagcctctaatgaggagtggcacttaaactatctgggacaccactactggacacggtcttgtagaggcagctgtccagttttggtgcttgactcttgaataggaattgttaaatggaaagatgctctgagtgactaggtcaaagcctggtcttttttttttt

SEQ ID NO: 72906 - DNA, 4481 bp, Homo sapiens
agcgggaggcggcgggcgggcgaacgggcgagcgagggagggggcagaggagccgagttagctcagccaggcggcgacttcggcggcgccacgagagcgggcagcggaggagattgacgtgagtgaattcagatataactcaagcttgttagagggctttttaaaaataaaaagttgattccgtgcaagagagcaagttactgctgcttaccgttcagagacttacaggtgcttgcctgcattgcaataaaggactcatttattgagcaagacttatatttatctcttcattttggagagcctaataaactgttattacagtttctctactgactttcaaaagttttgaagtttgaaagacctttgcaattaaaacagcatgagcacggccagaacagagaaccctgttataatgggtctgtccagtcaaaatggtcagctgagaggccctgtgaaacccactggtggccctggaggagggggcacacagacacagcaacagatgaaccagctgaaaaacaccaacacaatcaataatggcactcagcagcaagcacagagtatgaccaccactattaaacctggtgatgactggaaaaagactttaaaactccctccaaaggatctaagaatcaaaacttcggatgtgacctccacaaaaggaaatgagtttgaagattactgtttgaaacgggagttactgatgggaatttttgaaatgggctgggaaaagccatctcctattcaggaggagagcattcccattgctttatctggtagggatatcttagctagagcaaaaaatggaacaggcaagagcggtgcctacctcattcccttacttgaacggctagacctgaagaaggacaatatacaagcaatggtgattgttcccactagagaacttgctctacaggtcagtcaaatttgcatccaggtcagcaaacacatgggaggggccaaagtgatggcaaccacaggaggaaccaatttacgagatgacataatgaggcttgatgatacagtgcacgtggtgattgctacccctgggagaatcctggatcttattaagaaaggagtagcaaaggttgatcatgtccagatgatagtattggatgaggcagataagttgctgtcacaggattttgtgcagataatggaggatattattctcacgctacctaaaaacaggcagattttactatattccgctactttccctcttagtgtacagaagttcatgaattcccatttgcagaaaccctatgagattaacctgatggaggaactaactctgaagggagtaacccagtactacgcatatgtaactgagcgccaaaaagtacactgcctcaacacacttttctccaggcttcagataaaccagtcgatcattttctgtaactcctctcagcgagttgaattgctagccaagaagatttctcaactgggttattcttgcttctatattcatgctaaaatgaggcaggaacatcgaaatcgtgtatttcatgatttccgaaatggcttatgccgcaatcttgtttgcactgatctgtttacccgaggtattgatatacaagctgtgaatgtggtaataaactttgatttcccaaagctggcagagacctatctccatcgtattggaagatcaggtcgctttggtcatcttggcttagccatcaacttgatcacatatgatgatcgcttcaacctgaaaagtattgaggagcagctgggaacagaaattaaacctattccgagcaacattgataagagcctgtatgtggcagaataccacagcgagcctgtagaagatgagaaaccttaacaagcatgctttgacaaattacaaaaggctcgtttggatctgtgacacatcgttttggggggaatgctcttctctttgtgggtttttcatcttttattttggaactatgaagacttaaaagagctcagacattttctttttttaactggtgaagagaaaaaggctgaaaagaaggaatataccttttttgttccacttgtttgcactgtgtgctgactgaacattagttgcactaactgctggtttttaaaaaatgttttctggggaaaggggacaaggaaggaaaagaaagaagagaaggggagaaaccctaaaaagagaagaatcttaatgaacacacaagcttgtcaatgatttcaaaattctccaacagctgactctcgtgcatttcaacttctccctgattcctcatccgttttttaagcctgaagagcttattacttatttgtgcgaagtgccttatgctatgagaccattcagaatatcatcttttagacacagcccgaggaatcaacaatagtaactctttctttccgtttttttttctttttcttttaaaaaatgtctttttattttggtttcaggttgaagtctcttccctttctacccagtactcgagcccagggctagaagttgaaactcactagtaatgttaaacaccattttttttttctttttggggaggagttgatatgcaactgcagttcatccgcactgtaaatacatgtatttaaaaaaacaatcccaagtaaaaatttcttctgggctgagtagataaaaaacatcatcgctcccaaaggaaagagcagtctatcattgcaggagccatatgacaagcctttgtgctctatagcagacactaaagactgggttacatatgcctccagtagtagtatggcacttgatgtgtagacatgtcagagccttggccctctttcctctgtggcaaagcgtgtcccatagaaaattgggtgtgtatacttgtataaactttgtaaataagttttttttctgggttcatatatatatatatatatacatatatatatattttttttttggatgaaggttgctgggattaaggggattagagtgattatgggagcagctaaagatgagaggggctcagttttacgcaacactaaattctagaaagtactttggcctcgtgctgtagagagcagatttctatggtaccctgtgttagtaaaggggcccagaaatctgggatgtactgtttgctgccacactgtctcatctagtacctttggagtaggtttaccagagagagcaaggaagcttcaaaacattgataattcaagatttattttgagaagctctgattttgcttcttccccctttctaaaagtttgaggaatatttcaagctctgcaacagggggcaaagattaatctaccttgcagtgtaggaattctattgagtggcagtgtcattgagcagtatatatataaagcacagatttgcatttcagaatattagccagtaccagctttggtaatgttagcagttctggagcttaattttctgtggatcatttcctgtagtgtgtaaatgtgttgccctctgcccgctttgatacataaacttttgcaggaatgggcaacctgagagctgttaactttcatgctacagaaagctgcttgccattctcttgcattgtgacaagaattgttacctgtcattttgcactgtaaattgctggcagatgctttacagtcaatagtgttgctttaaattgtgcccctcccaacatgcttgatgtttggcctgatctccaggcaaaaggagtgagatgaatcaaaaccagtgaacttttttttttaatgtttttaattcccttttaacccagtgtactaggtcaatcaggaggcatctggaaagggggggaaaaaagcaaaaaacaaaattaaaaaaaattgatttccatattttttcaaaaccctaaaatattacaaaataagtcccgcatatactttaatgttttaactcttttggacaaaggaatcaattacttgaagttgcttttttgactctgcctacttctgagcaaactatttgcgactcacccacaattccttggagatcaaaatcctacagatgcctcctgatgggacatagccctaactccttaacaactgtagcaagaactgcacggtacaaacccaaaaaagaacaagctcatctatttggaacccaagcctcatattttctgtccagtcaatgttggttactaaatagaaaacctaattaaggaagtaacttttttccagggaggggtgggagagggaatttaaaaggtgtcaacttttgaccaaaaaaattgtgcccttgtaccgatgcagctctctttctcccccacctcttgcgagataagagggatcattcatgtagaagaaaagagtataaatgcaattctgtatctcgctagagaacgtgtgggtgactaaacaaaaagtgcagtctccttcaccaactttagactgcgtggtgccacatgcctgtgggtccctcttaaagcacagacttaaaatggaaagtattactgaagtatagcctctaatgaggagtggcacattatatctactccgtgtgacaaccatttcccgagctcatcctgttgccgcggtca

SEQ ID NO: 72907 - DNA, 4564 bp, Homo sapiens
agcgggaggcggcgggcgggcgaacgggcgagcgagggagggggcagaggagccgagttagctcagccaggcggcgacttcggcggcgccacgagagcgggcagcggaggagattgacgtgagtgaattcagatataactcaagcttgttagagggctttttaaaaataaaaagttgattccgtgcaagagagcaagttactgctgcttaccgttcagagacttacaggtgcttgcctgcattgcaataaaggactcatttattgagcaagacttatatttatctcttcattttggagagcctaataaactgttattacagtttctctactgactttcaaaagttttgaagtttgaaagacctttgcaattaaaacagcatgagcacggccagaacagagaaccctgttataatgggtctgtccagtcaaaatggtcagctgagaggccctgtgaaacccactggtggccctggaggagggggcacacagacacagcaacagatgaaccagctgaaaaacaccaacacaatcaataatggcactcagcagcaagcacagagtatgaccaccactattaaacctggtgatgactggaaaaagactttaaaactccctccaaaggatctaagaatcaaaacttcggatgtgacctccacaaaaggaaatgagtttgaagattactgtttgaaacgggagttactgatgggaatttttgaaatgggctgggaaaagccatctcctattcaggaggagagcattcccattgctttatctggtagggatatcttagctagagcaaaaaatggaacaggcaagagcggtgcctacctcattcccttacttgaacggctagacctgaagaaggacaatatacaagcaatggtgattgttcccactagagaacttgctctacaggtcagtcaaatttgcatccaggtcagcaaacacatgggaggggccaaagtgatggcaaccacaggaggaaccaatttacgagatgacataatgaggcttgatgatacagtgcacgtggtgattgctacccctgggagaatcctggatcttattaagaaaggagtagcaaaggttgatcatgtccagatgatagtattggatgaggcagataagttgctgtcacaggattttgtgcagataatggaggatattattctcacgctacctaaaaacaggcagattttactatattccgctactttccctcttagtgtacagaagttcatgaattcccatttgcagaaaccctatgagattaacctgatggaggaactaactctgaagggagtaacccagtactacgcatatgtaactgagcgccaaaaagtacactgcctcaacacacttttctccaggcttcagataaaccagtcgatcattttctgtaactcctctcagcgagttgaattgctagccaagaagatttctcaactgggttattcttgcttctatattcatgctaaaatgaggcaggaacatcgaaatcgtgtatttcatgatttccgaaatggcttatgccgcaatcttgtttgcactgatctgtttacccgaggtattgatatacaagctgtgaatgtggtaataaactttgatttcccaaagctggcagagacctatctccatcgtattggaagatcaggtcgctttggtcatcttggcttagccatcaacttgatcacatatgatgatcgcttcaacctgaaaagtattgaggagcagctgggaacagaaattaaacctattccgagcaacattgataagagcctgtatgtggcagaataccacagcgagcctgtagaagatgagaaaccttaacaagcatgctttgacaaattacaaaaggctcgtttggatctgtgacacatcgttttggggggaatgctcttctctttgtgggtttttcatcttttattttggaactatgaagacttaaaagagctcagacattttctttttttaactggtgaagagaaaaaggctgaaaagaaggaatataccttttttgttccacttgtttgcactgtgtgctgactgaacattagttgcactaactgctggtttttaaaaaatgttttctggggaaaggggacaaggaaggaaaagaaagaagagaaggggagaaaccctaaaaagagaagaatcttaatgaacacacaagcttgtcaatgatttcaaaattctccaacagctgactctcgtgcatttcaacttctccctgattcctcatccgttttttaagcctgaagagcttattacttatttgtgcgaagtgccttatgctatgagaccattcagaatatcatcttttagacacagcccgaggaatcaacaatagtaactctttctttccgtttttttttctttttcttttaaaaaatgtctttttattttggtttcaggttgaagtctcttccctttctacccagtactcgagcccagggctagaagttgaaactcactagtaatgttaaacaccattttttttttctttttggggaggagttgatatgcaactgcagttcatccgcactgtaaatacatgtatttaaaaaaacaatcccaagtaaaaatttcttctgggctgagtagataaaaaacatcatcgctcccaaaggaaagagcagtctatcattgcaggagccatatgacaagcctttgtgctctatagcagacactaaagactgggttacatatgcctccagtagtagtatggcacttgatgtgtagacatgtcagagccttggccctctttcctctgtggcaaagcgtgtcccatagaaaattgggtgtgtatacttgtataaactttgtaaataagttttttttctgggttcatatatatatatatatatacatatatatatattttttttttggatgaaggttgctgggattaaggggattagagtgattatgggagcagctaaagatgagaggggctcagttttacgcaacactaaattctagaaagtactttggcctcgtgctgtagagagcagatttctatggtaccctgtgttagtaaaggggcccagaaatctgggatgtactgtttgctgccacactgtctcatctagtacctttggagtaggtttaccagagagagcaaggaagcttcaaaacattgataattcaagatttattttgagaagctctgattttgcttcttccccctttctaaaagtttgaggaatatttcaagctctgcaacagggggcaaagattaatctaccttgcagtgtaggaattctattgagtggcagtgtcattgagcagtatatatataaagcacagatttgcatttcagaatattagccagtaccagctttggtaatgttagcagttctggagcttaattttctgtggatcatttcctgtagtgtgtaaatgtgttgccctctgcccgctttgatacataaacttttgcaggaatgggcaacctgagagctgttaactttcatgctacagaaagctgcttgccattctcttgcattgtgacaagaattgttacctgtcattttgcactgtaaattgctggcagatgctttacagtcaatagtgttgctttaaattgtgcccctcccaacatgcttgatgtttggcctgatctccaggcaaaaggagtgagatgaatcaaaaccagtgaacttttttttttaatgtttttaattcccttttaacccagtgtactaggtcaatcaggaggcatctggaaagggggggaaaaaagcaaaaaacaaaattaaaaaaaattgatttccatattttttcaaaaccctaaaatattacaaaataagtcccgcatatactttaatgttttaactcttttggacaaaggaatcaattacttgaagttgcttttttgactctgcctacttctgagcaaactatttgcgactcacccacaattccttggagatcaaaatcctacagatgcctcctgatgggacatagccctaactccttaacaactgtagcaagaactgcacggtacaaacccaaaaaagaacaagctcatctatttggaacccaagcctcatattttctgtccagtcaatgttggttactaaatagaaaacctaattaaggaagtaacttttttccagggaggggtgggagagggaatttaaaaggtgtcaacttttgaccaaaaaaattgtgcccttgtaccgatgcagctctctttctcccccacctcttgcgagataagagggatcattcatgtagaagaaaagagtataaatgcaattctgtatctcgctagagaacgtgtgggtgactaaacaaaaagtgcagtctccttcaccaactttagactgcgtggtgccacatgcctgtgggtccctcttaaagcacagacttaaaatggaaagtattactgaagtatagcctctaatgaggagtggcacttaaactatctgggacaccactactggacacggtcttgtagaggcagctgtccagttttggtgcttgactcttgaataggaattgttaaatggaaagatgctctgagtgactaggtcaaagcctggtcttttttttttt

SEQ ID NO: 72908 - DNA, 4404 bp, Homo sapiens
agcgggaggcggcgggcgggcgaacgggcgagcgagggagggggcagaggagccgagttagctcagccaggcggcgacttcggcggcgccacgagagcgggcagcggaggagattgacgtgagtgaattcagatataactcaagcttgttagagggctttttaaaaataaaaagttgattccgtgcaagagagcaagttactgctgcttaccgttcagagacttacaggtgcttgcctgcattgcaataaaggactcatttattgagcaagacttatatttatctcttcattttggagagcctaataaactgttattacagtttctctactgactttcaaaagttttgaagtttgaaagacctttgcaattaaaacagcatgagcacggccagaacagagaaccctgttataatgggtctgtccagtcaaaatggtcagctgagaggccctgtgaaacccactggtggccctggaggagggggcacacagacacagcaacagatgaaccagctgaaaaacaccaacacaatcaataatggcactcagcagcaagcacagagtatgaccaccactattaaacctggtgatgactggaaaaagactttaaaactccctccaaaggatctaagaatcaaaacttcggatgtgacctccacaaaaggaaatgagtttgaagattactgtttgaaacgggagttactgatgggaatttttgaaatgggctgggaaaagccatctcctattcaggaggagagcattcccattgctttatctggtagggatatcttagctagagcaaaaaatggaacaggcaagagcggtgcctacctcattcccttacttgaacggctagacctgaagaaggacaatatacaagcaatggtgattgttcccactagagaacttgctctacaggtcagtcaaatttgcatccaggtcagcaaacacatgggaggggccaaagtgatggcaaccacaggaggaaccaatttacgagatgacataatgaggcttgatgatacagtgcacgtggtgattgctacccctgggagaatcctggatcttattaagaaaggagtagcaaaggttgatcatgtccagatgatagtattggatgaggcagataagttgctgtcacaggattttgtgcagataatggaggatattattctcacgctacctaaaaacaggcagattttactatattccgctactttccctcttagtgtacagaagttcatgaattcccatttgcagaaaccctatgagattaacctgatggaggaactaactctgaagggagtaacccagtactacgcatatgtaactgagcgccaaaaagtacactgcctcaacacacttttctccaggcttcagataaaccagtcgatcattttctgtaactcctctcagcgagttgaattgctagccaagaagatttctcaactgggttattcttgcttctatattcatgctaaaatgaggcaggaacatcgaaatcgtgtatttcatgatttccgaaatggcttatgccgcaatcttgtttgcactgatctgtttacccgaggtattgatatacaagctgtgaatgtggtaataaactttgatttcccaaagctggcagagacctatctccatcgtattggaagatcaggtcgctttggtcatcttggcttagccatcaacttgatcacatatgatgatcgcttcaacctgaaaagtattgaggagcagctgggaacagaaattaaacctattccgagcaacattgataagagcctgtatgtggcagaataccacagcgagcctgtagaagatgagaaaccttaacaagcatgctttgacaaattacaaaaggctcgtttggatctgtgacacatcgttttggggggaatgctcttctctttgtgggtttttcatcttttattttggaactatgaagacttaaaagagctcagacattttctttttttaactggtgaagagaaaaaggctgaaaagaaggaatataccttttttgttccacttgtttgcactgtgtgctgactgaacattagttgcactaactgctggtttttaaaaaatgttttctggggaaaggggacaaggaaggaaaagaaagaagagaaggggagaaaccctaaaaagagaagaatcttaatgaacacacaagcttgtcaatgatttcaaaattctccaacagctgactctcgtgcatttcaacttctccctgattcctcatccgttttttaagcctgaagagcttattacttatttgtgcgaagtgccttatgctatgagaccattcagaatatcatcttttagacacagcccgaggaatcaacaatagtaactctttctttccgtttttttttctttttcttttaaaaaatgtctttttattttggtttcaggttgaagtctcttccctttctacccagtactcgagcccagggctagaagttgaaactcactagtaatgttaaacaccattttttttttctttttggggaggagttgatatgcaactgcagttcatccgcactgtaaatacatgtatttaaaaaaacaatcccaagtaaaaatttcttctgggctgagtagataaaaaacatcatcgctcccaaaggaaagagcagtctatcattgcaggagccatatgacaagcctttgtgctctatagcagacactaaagactgggttacatatgcctccagtagtagtatggcacttgatgtgtagacatgtcagagccttggccctctttcctctgtggcaaagcgtgtcccatagaaaattgggtgtgtatacttgtataaactttgtaaataagttttttttctgggttcatatatatatatatatatacatatatatatattttttttttggatgaaggttgctgggattaaggggattagagtgattatgggagcagctaaagatgagaggggctcagttttacgcaacactaaattctagaaagtactttggcctcgtgctgtagagagcagatttctatggtaccctgtgttagtaaaggggcccagaaatctgggatgtactgtttgctgccacactgtctcatctagtacctttggagtaggtttaccagagagagcaaggaagcttcaaaacattgataattcaagatttattttgagaagctctgattttgcttcttccccctttctaaaagtttgaggaatatttcaagctctgcaacagggggcaaagattaatctaccttgcagtgtaggaattctattgagtggcagtgtcattgagcagtatatatataaagcacagatttgcatttcagaatattagccagtaccagctttggtaatgttagcagttctggagcttaattttctgtggatcatttcctgtagtgtgtaaatgtgttgccctctgcccgctttgatacataaacttttgcaggaatgggcaacctgagagctgttaactttcatgctacagaaagctgcttgccattctcttgcattgtgacaagaattgttacctgtcattttgcactgtaaattgctggcagatgctttacagtcaatagtgttgctttaaattgtgcccctcccaacatgcttgatgtttggcctgatctccaggcaaaaggagtgagatgaatcaaaaccagtgaacttttttttttaatgtttttaattcccttttaacccagtgtactaggtcaatcaggaggcatctggaaagggggggaaaaaagcaaaaaacaaaattaaaaaaaattgatttccatattttttcaaaaccctaaaatattacaaaataagtcccgcatatactttaatgttttaactcttttggacaaaggaatcaattacttgaagttgcttttttgactctgcctacttctgagcaaactatttgcgactcacccacaattccttggagatcaaaatcctacagatgcctcctgatgggacatagccctaactccttaacaactgtagcaagaactgcacggtacaaacccaaaaaagaacaagctcatctatttggaacccaagcctcatattttctgtccagtcaatgttggttactaaatagaaaacctaattaaggaagtaacttttttccagggaggggtgggagagggaatttaaaaggtgtcaacttttgaccaaaaaaattgtgcccttgtaccgatgcagctctctttctcccccacctcttgcgagataagagggatcattcatgtagaagaaaagagtataaatgcaattctgtatctcgctagagaacgtgtagaaattgtacggcttgtattcgggggctttgtatgattatgggcgttgagtagtagtagtgactggttgacattctgtgactggtgtagcaattgaccaggtactacaagatca

SEQ ID NO: 72909 - DNA, 1833 bp, Homo sapiens
gcccgtggggccctttttaagcgccagactttaaatgggaagtattactggagtattagcctcttatgaggggtggcactttaactatctggggcacccactactggacccggtcttgtagaggccagctgtcccgttttggtgcttgactcttgaattagggattgttaaatgggaagatagctctgaggactaggtccaagcccggtctttttttttttttttttttttttttttttctttcttttttgggccctcataataagcattgttactattggaagttgttttcacattctttccaatattaaatatgtatttttttaagtaatgataatattttccagtggctcatttggatgagaactaccctctatttttaatattaaaactacatccaactcatcatttagcctttggttgtacagttgtgtaatgggctatggactgttacacaccttaccacctctaggcctatgttttttctttccccatatattctgatggggataaatactgttttgcctctcccataggaatggaatacatttattctaaaatgatctttcacagaagtaagagagagggaaacctaaatatacctctaaattgtttgaagttggtcccagcagcataaaatgggttggccccaaagggttggagggtgggcttggttatcagtatttgttttcagaatgagatgggagcatctttcctttgccacgtgctttgtgcttgataacatcatgcttggttcaaacgacaactcagcacaaagccttgagtataaattgttggaatcaaaacatctcattctgatgacgtggtttaattttttaatttttttttttaataggggtgggagggagggtactttgccccaaaagggagggtgtctgcactaaggatttagaaacactttggaagctcataacctcatcagaaactgcctttagccacactcctgaccttctagatgagtaacaaaaaaatgaaataagttcttggaaattaagccatttattttaatttgctatttttttcaatgttctaggtatctttaaatttgttattgtggaatcattttcctgccagatacctttatcaaaattattggcctcatgagagctgaagtaagtcagctttttggtgaactttagtggacttctgtgagattgtagttgtactttgtatctctaaatctaaagatagttttttaaaactcccaaagaaaatctgctctcctttctgatctaaaaactcatctttggggtaaagagttaagtgtccaaaggttgtcacagttcatgaggtcagagggagctagcctggcacctggactctgcccatccacagctgacagattccaacagaagtgtatttaaattctccagtagacaatgctgggtaagggagggggtagggctgggttattaagatacaggctgctgtattttacattggttgtgggggaaggggagcctggagaaaacaaagtcactattcccttttttgaaacaggaaaaaaaattattttttgttcagtaaaaatggtagagaattccaatgtccctagccacaagggaccagttccactgagaagtgaacagtgggaactcaaaatttcagaaacattgggggaagggaaaattggctttctcttaattggcagatgttccagtggggggggggggctctgtttttgttgggatgtgttatgttgtatgtacgcatatatggaccggagtctgctgagtttataaggttccaaaaatatggtaaaatcttggtttttgttaatttatctcaataaaagcccactggaactccaaa

SEQ ID NO: 72910 - DNA, 1963 bp, Homo sapiens
  misc_feature (1849)..(1849): n is a, c, g, or t
gcccgtggggccctttttaagcgccagactttaaatgggaagtattactggagtattagcctcttatgaggggtggcactttaactatctggggcacccactactggacccggtcttgtagaggccagctgtcccgttttggtgcttgactcttgaattagggattgttaaatgggaagatagctctgaggactaggtccaagcccggtctttttttttttttttttttttttttttttctttcttttttgggccctcataataagcattgttactattggaagttgttttcacattctttccaatattaaatatgtatttttttaagtaatgataatattttccagtggctcatttggatgagaactaccctctatttttaatattaaaactacatccaactcatcatttagcctttggttgtacagttgtgtaatgggctatggactgttacacaccttaccacctctaggcctatgttttttctttccccatatattctgatggggataaatactgttttgcctctcccataggaatggaatacatttattctaaaatgatctttcacagaagtaagagagagggaaacctaaatatacctctaaattgtttgaagttggtcccagcagcataaaatgggttggccccaaagggttggagggtgggcttggttatcagtatttgttttcagaatgagatgggagcatctttcctttgccacgtgctttgtgcttgataacatcatgcttggttcaaacgacaactcagcacaaagccttgagtataaattgttggaatcaaaacatctcattctgatgacgtggtttaattttttaatttttttttttaataggggtgggagggagggtactttgccccaaaagggagggtgtctgcactaaggatttagaaacactttggaagctcataacctcatcagaaactgcctttagccacactcctgaccttctagatgagtaacaaaaaaatgaaataagttcttggaaattaagccatttattttaatttgctatttttttcaatgttctaggtatctttaaatttgttattgtggaatcattttcctgccagatacctttatcaaaattattggcctcatgagagctgaagtaagtcagctttttggtgaactttagtggacttctgtgagattgtagttgtactttgtatctctaaatctaaagatagttttttaaaactcccaaagaaaatctgctctcctttctgatctaaaaactcatctttggggtaaagagttaagtgtccaaaggttgtcacagttcatgaggtcagagggagctagcctggcacctggactctgcccatccacagctgacagattccaacagaagtgtatttaaattctccagtagacaatgctgggtaagggagggggtagggctgggttattaagatacaggctgctgtattttacattggttgtgggggaaggggagcctggagaaaacaaagtcactattcccttttttgaaacaggaaaaaaaattattttttgttcagtaaaaatggtagagaattccaatgtccctagccacaagggaccagttccactgagaagtgaacagtgggaactcaaaatttcagaaacattgggggaagggaaaattggctttctcttaattggcagatgttccagtggggggggggggctctgtttttgttgggatgtgttatgttgtatgtacgcatatatggaccggagtctgctgagtttataaggttccaaaaatatggtaaaatcttggtttttgttaatttatctcaataaaagcccactggaactccaaaaaaaaaaaaaaaaaanaaattgggggggccgcgaccaagaaagtttcaaacatctgggggcggcccaagtaagaacgtgtacgctccaggaaccggcagactggggtttcccaaaaagcgggggcgggtg

SEQ ID NO: 72911 - DNA, 2075 bp, Homo sapiens
gcccgtggggccctttttaagcgccagactttaaatgggaagtattactggagtattagcctcttatgaggggtggcactttaactatctggggcacccactactggacccggtcttgtagaggccagctgtcccgttttggtgcttgactcttgaattagggattgttaaatgggaagatagctctgaggactaggtccaagcccggtctttttttttttttttttttttttttttttctttcttttttgggccctcataataagcattgttactattggaagttgttttcacattctttccaatattaaatatgtatttttttaagtaatgataatattttccagtggctcatttggatgagaactaccctctatttttaatattaaaactacatccaactcatcatttagcctttggttgtacagttgtgtaatgggctatggactgttacacaccttaccacctctaggcctatgttttttctttccccatatattctgatggggataaatactgttttgcctctcccataggaatggaatacatttattctaaaatgatctttcacagaagtaagagagagggaaacctaaatatacctctaaattgtttgaagttggtcccagcagcataaaatgggttggccccaaagggttggagggtgggcttggttatcagtatttgttttcagaatgagatgggagcatctttcctttgccacgtgctttgtgcttgataacatcatgcttggttcaaacgacaactcagcacaaagccttgagtataaattgttggaatcaaaacatctcattctgatgacgtggtttaattttttaatttttttttttaataggggtgggagggagggtactttgccccaaaagggagggtgtctgcactaaggatttagaaacactttggaagctcataacctcatcagaaactgcctttagccacactcctgaccttctagatgagtaacaaaaaaatgaaataagttcttggaaattaagccatttattttaatttgctatttttttcaatgttctaggtatctttaaatttgttattgtggaatcattttcctgccagatacctttatcaaaattattggcctcatgagagctgaagtaagtcagctttttggtgaactttagtggacttctgtgagattgtagttgtactttgtatctctaaatctaaagatagttttttaaaactcccaaagaaaatctgctctcctttctgatctaaaaactcatctttggggtaaagagttaagtgtccaaaggttgtcacagttcatgaggtcagagggagctagcctggcacctggactctgcccatccacagctgacagattccaacagaagtgtatttaaattctccagtagacaatgctgggtaagggagggggtagggctgggttattaagatacaggctgctgtattttacattggttgtgggggaaggggagcctggagaaaacaaagtcactattcccttttttgaaacaggaaaaaaaattattttttgttcagtaaaaatggtagagaattccaatgtccctagccacaagggaccagttccactgagaagtgaacagtgggaactcaaaatttcagaaacattgggggaagggaaaattggctttctcttaattggcagatgttccagtggggggggggggctctgtttttgttgggatgtgttatgttgtatgtacgcatatatggaccggagtctgctgagtttataaggttccaaaaatatggtaaaatcttggtttttgttaatttatctcaataaaagcccactggaactccaaaaaaaaaaacaacacagacaacaaatacccccaaaccaaacaacaagaaaacacaaaacacagcgcagaaattaattgccgcgcgcggcaaaaaaaccgatacaacgaggcccccggcgtaacaaggctccgacggaagcagactactgacgacaaggggaggaacaacgggcgacaccactagagagagagctaaacacacgacaccccgagtctcggctataataagaaaaacaaccagag

SEQ ID NO: 72912 - DNA, 1383 bp, Homo sapiens
ctctcatttaacttttttaatgggtctcaaaattctgtgacaaattttggtcaagtgtttccattaaaaagtactgattttaaaaactaataacttaaaactgccacacgcaaaaaaagaaaaccaaagtggtccacaaaacattctcctttccttctgaaggttttacgatgcattgttatcattaaccagtcttttactactaaacttaaatggccaattgaaacaaacagttctgagaccgttcttccaccactgattaagagtggggtggcaggtattagggataatattcatttagccttctgagctttctgggcagacttggtgaccttgcccagctccagcagccttcttgtccactgctttgatgacacccaccgcaactgtctgtctcatatcacgaacagcaaagagacccaaaggtggattagtcttgagaagctctcaacacacatgggcttgaggaaccatatcaacaatggcagcacgagaaacgcctttagccacactcctgaccttctagatgagtaacaaaaaaatgaaataagttcttggaaattaagccatttattttaatttgctatttttttcaatgttctaggtatctttaaatttgttattgtggaatcattttcctgccagatacctttatcaaaattattggcctcatgagagctgaagtaagtcagctttttggtgaactttagtggacttctgtgagattgtagttgtactttgtatctctaaatctaaagatagttttttaaaactcccaaagaaaatctgctctcctttctgatctaaaaactcatctttggggtaaagagttaagtgtccaaaggttgtcacagttcatgaggtcagagggagctagcctggcacctggactctgcccatccacagctgacagattccaacagaagtgtatttaaattctccagtagacaatgctgggtaagggagggggtagggctgggttattaagatacaggctgctgtattttacattggttgtgggggaaggggagcctggagaaaacaaagtcactattcccttttttgaaacaggaaaaaaaattattttttgttcagtaaaaatggtagagaattccaatgtccctagccacaagggaccagttccactgagaagtgaacagtgggaactcaaaatttcagaaacattgggggaagggaaaattggctttctcttaattggcagatgttccagtggggggggggggctctgtttttgttgggatgtgttatgttgtatgtacgcatatatggaccggagtctgctgagtttataaggttccaaaaatatggtaaaatcttggtttttgttaatttatctcaataaaagcccactggaactccaaa

SEQ ID NO: 72913 - DNA, 3764 bp, Homo sapiens
agcgggaggcggcgggcgggcgaacgggcgagcgagggagggggcagaggagccgagttagctcagccaggcggcgacttcggcggcgccacgagagcgggcagcggaggagattgacgtgagtgaattcagatataactcaagcttgttagagggctttttaaaaataaaaagttgattccgtgcaagagagcaagttactgctgcttaccgttcagagacttacaggtgcttgcctgcattgcaataaaggactcatttattgagcaagacttatatttatctcttcattttggagagcctaataaactgttattacagtttctctactgactttcaaaagttttgaagtttgaaagacctttgcaattaaaacagcatgagcacggccagaacagagaaccctgttataatgggtctgtccagtcaaaatggtcagctgagaggccctgtgaaacccactggtggccctggaggagggggcacacagacacagcaacagatgaaccagctgaaaaacaccaacacaatcaataatggcactcagcagcaagcacagagtatgaccaccactattaaacctggtgatgactggaaaaagactttaaaactccctccaaaggatctaagaatcaaaacttcggatgtgacctccacaaaaggaaatgagtttgaagattactgtttgaaacgggagttactgatgggaatttttgaaatgggctgggaaaagccatctcctattcaggaggagagcattcccattgctttatctggtagggatatcttagctagagcaaaaaatggaacaggcaagagcggtgcctacctcattcccttacttgaacggctagacctgaagaaggacaatatacaagcaatggtgattgttcccactagagaacttgctctacaggtcagtcaaatttgcatccaggtcagcaaacacatgggaggggccaaagtgatggcaaccacaggaggaaccaatttacgagatgacataatgaggcttgatgatacagtgcacgtggtgattgctacccctgggagaatcctggatcttattaagaaaggagtagcaaaggttgatcatgtccagatgatagtattggatgaggcagataagttgctgtcacaggattttgtgcagataatggaggatattattctcacgctacctaaaaacaggcagattttactatattccgctactttccctcttagtgtacagaagttcatgaattcccatttgcagaaaccctatgagattaacctgatggaggaactaactctgaagggagtaacccagtactacgcatatgtaactgagcgccaaaaagtacactgcctcaacacacttttctccaggcttcagataaaccagtcgatcattttctgtaactcctctcagcgagttgaattgctagccaagaagatttctcaactgggttattcttgcttctatattcatgctaaaatgaggcaggaacatcgaaatcgtgtatttcatgatttccgaaatggcttatgccgcaatcttgtttgcactgatctgtttacccgaggtattgatatacaagctgtgaatgtggtaataaactttgatttcccaaagctggcagagacctatctccatcgtattggaagatcaggtcgctttggtcatcttggcttagccatcaacttgatcacatatgatgatcgcttcaacctgaaaagtattgaggagcagctgggaacagaaattaaacctattccgagcaacattgataagagcctgtatgtggcagaataccacagcgagcctgtagaagatgagaaaccttaacaagcatgctttgacaaattacaaaaggctcgtttggatctgtgacacatcgttttggggggaatgctcttctctttgtgggtttttcatcttttattttggaactatgaagacttaaaagagctcagacattttctttttttaactggtgaagagaaaaaggctgaaaagaaggaatataccttttttgttccacttgtttgcactgtgtgctgactgaacattagttgcactaactgctggtttttaaaaaatgttttctggggaaaggggacaaggaaggaaaagaaagaagagaaggggagaaaccctaaaaagagaagaatcttaatgaacacacaagcttgtcaatgatttcaaaattctccaacagctgactctcgtgcatttcaacttctccctgattcctcatccgttttttaagcctgaagagcttattacttatttgtgcgaagtgccttatgctatgagaccattcagaatatcatcttttagacacagcccgaggaatcaacaatagtaactctttctttccgtttttttttctttttcttttaaaaaatgtctttttattttggtttcaggttgaagtctcttccctttctacccagtactcgagcccagggctagaagttgaaactcactagtaatgttaaacaccattttttttttctttttggggaggagttgatatgcaactgcagttcatccgcactgtaaatacatgtatttaaaaaaacaatcccaagtaaaaatttcttctgggctgagtagataaaaaacatcatcgctcccaaaggaaagagcagtctatcattgcaggagccatatgacaagcctttgtgctctatagcagacactaaagactgggttacatatgcctccagtagtagtatggcacttgatgtgtagacatgtcagagccttggccctctttcctctgtggcaaagcgtgtcccatagaaaattgggtgtgtatacttgtataaactttgtaaataagttttttttctgggttcatatatatatatatatatacatatatatatattttttttttggatgaaggttgctgggattaaggggattagagtgattatgggagcagctaaagatgagaggggctcagttttacgcaacactaaattctagaaagtactttggcctcgtgctgtagagagcagatttctatggtaccctgtgttagtaaaggggcccagaaatctgggatgtactgtttgctgccacactgtctcatctagtacctttggagtaggtttaccagagagagcaaggaagcttcaaaacattgataattcaagatttattttgagaagctctgattttgcttcttccccctttctaaaagtttgaggaatatttcaagctctgcaacagggggcaaagattaatctaccttgcagtgtaggaattctattgagtggcagtgtcattgagcagtatatatataaagcacagatttgcatttcagaatattagccagtaccagctttggtaatgttagcagttctggagcttaattttctgtggatcatttcctgtagtgtgtaaatgtgttgccctctgcccgctttgatacataaacttttgcaggaatgggcaacctgagagctgttaactttcatgctacagaaagctgcttgccattctcttgcattgtgacaagaattgttacctgtcattttgcactgtaaattgctggcagatgctttacagtcaatagtgttgctttaaattgtgcccctcccaacatgcttgatgtttggcctgatctccaggcaaaaggagtgagatgaatcaaaaccagtgaacttttttttttaatgtttttaattcccttttaacccagtgtactaggtcaatcaggaggcatctcactcctttgcctggagatcaggccaaacataggatc

SEQ ID NO: 72914 - DNA, 3606 bp, Homo sapiens
agcgggaggcggcgggcgggcgaacgggcgagcgagggagggggcagaggagccgagttagctcagccaggcggcgacttcggcggcgccacgagagcgggcagcggaggagattgacgtgagtgaattcagatataactcaagcttgttagagggctttttaaaaataaaaagttgattccgtgcaagagagcaagttactgctgcttaccgttcagagacttacaggtgcttgcctgcattgcaataaaggactcatttattgagcaagacttatatttatctcttcattttggagagcctaataaactgttattacagtttctctactgactttcaaaagttttgaagtttgaaagacctttgcaattaaaacagcatgagcacggccagaacagagaaccctgttataatgggtctgtccagtcaaaatggtcagctgagaggccctgtgaaacccactggtggccctggaggagggggcacacagacacagcaacagatgaaccagctgaaaaacaccaacacaatcaataatggcactcagcagcaagcacagagtatgaccaccactattaaacctggtgatgactggaaaaagactttaaaactccctccaaaggatctaagaatcaaaacttcggatgtgacctccacaaaaggaaatgagtttgaagattactgtttgaaacgggagttactgatgggaatttttgaaatgggctgggaaaagccatctcctattcaggaggagagcattcccattgctttatctggtagggatatcttagctagagcaaaaaatggaacaggcaagagcggtgcctacctcattcccttacttgaacggctagacctgaagaaggacaatatacaagcaatggtgattgttcccactagagaacttgctctacaggtcagtcaaatttgcatccaggtcagcaaacacatgggaggggccaaagtgatggcaaccacaggaggaaccaatttacgagatgacataatgaggcttgatgatacagtgcacgtggtgattgctacccctgggagaatcctggatcttattaagaaaggagtagcaaaggttgatcatgtccagatgatagtattggatgaggcagataagttgctgtcacaggattttgtgcagataatggaggatattattctcacgctacctaaaaacaggcagattttactatattccgctactttccctcttagtgtacagaagttcatgaattcccatttgcagaaaccctatgagattaacctgatggaggaactaactctgaagggagtaacccagtactacgcatatgtaactgagcgccaaaaagtacactgcctcaacacacttttctccaggcttcagataaaccagtcgatcattttctgtaactcctctcagcgagttgaattgctagccaagaagatttctcaactgggttattcttgcttctatattcatgctaaaatgaggcaggaacatcgaaatcgtgtatttcatgatttccgaaatggcttatgccgcaatcttgtttgcactgatctgtttacccgaggtattgatatacaagctgtgaatgtggtaataaactttgatttcccaaagctggcagagacctatctccatcgtattggaagatcaggtcgctttggtcatcttggcttagccatcaacttgatcacatatgatgatcgcttcaacctgaaaagtattgaggagcagctgggaacagaaattaaacctattccgagcaacattgataagagcctgtatgtggcagaataccacagcgagcctgtagaagatgagaaaccttaacaagcatgctttgacaaattacaaaaggctcgtttggatctgtgacacatcgttttggggggaatgctcttctctttgtgggtttttcatcttttattttggaactatgaagacttaaaagagctcagacattttctttttttaactggtgaagagaaaaaggctgaaaagaaggaatataccttttttgttccacttgtttgcactgtgtgctgactgaacattagttgcactaactgctggtttttaaaaaatgttttctggggaaaggggacaaggaaggaaaagaaagaagagaaggggagaaaccctaaaaagagaagaatcttaatgaacacacaagcttgtcaatgatttcaaaattctccaacagctgactctcgtgcatttcaacttctccctgattcctcatccgttttttaagcctgaagagcttattacttatttgtgcgaagtgccttatgctatgagaccattcagaatatcatcttttagacacagcccgaggaatcaacaatagtaactctttctttccgtttttttttctttttcttttaaaaaatgtctttttattttggtttcaggttgaagtctcttccctttctacccagtactcgagcccagggctagaagttgaaactcactagtaatgttaaacaccattttttttttctttttggggaggagttgatatgcaactgcagttcatccgcactgtaaatacatgtatttaaaaaaacaatcccaagtaaaaatttcttctgggctgagtagataaaaaacatcatcgctcccaaaggaaagagcagtctatcattgcaggagccatatgacaagcctttgtgctctatagcagacactaaagactgggttacatatgcctccagtagtagtatggcacttgatgtgtagacatgtcagagccttggccctctttcctctgtggcaaagcgtgtcccatagaaaattgggtgtgtatacttgtataaactttgtaaataagttttttttctgggttcatatatatatatatatatacatatatatatattttttttttggatgaaggttgctgggattaaggggattagagtgattatgggagcagctaaagatgagaggggctcagttttacgcaacactaaattctagaaagtactttggcctcgtgctgtagagagcagatttctatggtaccctgtgttagtaaaggggcccagaaatctgggatgtactgtttgctgccacactgtctcatctagtacctttggagtaggtttaccagagagagcaaggaagcttcaaaacattgataattcaagatttattttgagaagctctgattttgcttcttccccctttctaaaagtttgaggaatatttcaagctctgcaacagggggcaaagattaatctaccttgcagtgtaggaattctattgagtggcagtgtcattgagcagtatatatataaagcacagatttgcatttcagaatattagccagtaccagctttggtaatgttagcagttctggagcttaattttctgtggatcatttcctgtagtgtgtaaatgtgttgccctctgcccgctttgatacataaacttttgcaggaatgggcaacctgagagctgttaactttcatgctacagaaagctgcttgccattctcttgcattgtgacaagaattgttacctgtcattttgcactgtaaattgctggcagatgctttacagtcaatagtgttgccgtcgtgcctccgggatcctctgaa

SEQ ID NO: 72915 - DNA, 3572 bp, Homo sapiens
gcccgtggggccctttttaagcgccagactttaaatgggaagtattactggagtattagcctcttatgaggggtggcactttaactatctggggcacccactactggacccggtcttgtagaggccagctgtcccgttttggtgcttgactcttgaattagggattgttaaatgggaagatagctctgaggactaggtccaagcccggtctttttttttttttttttttttttttttttctttcttttttgggccctcataataagcattgttactattggaagttgttttcacattctttccaatattaaatatgtatttttttaagtaatgataatattttccagtggctcatttggatgagaactaccctctatttttaatattaaaactacatccaactcatcatttagcctttggttgtacagttgtgtaatgggctatggactgttacacaccttaccacctctaggcctatgttttttctttccccatatattctgatggggataaatactgttttgcctctcccataggaatggaatacatttattctaaaatgatctttcacagaagtaagagagagggaaacctaaatatacctctaaattgtttgaagttggtcccagcagcataaaatgggttggccccaaagggttggagggtgggcttggttatcagtatttgttttcagaatgagatgggagcatctttcctttgccacgtgctttgtgcttgataacatcatgcttggttcaaacgacaactcagcacaaagccttgagtataaattgttggaatcaaaacatctcattctgatgacgtggtttaattttttaatttttttttttaataggggtgggagggagggtactttgccccaaaagggagggtgtctgcactaaggatttagaaacactttggaagctcataacctcatcagaaactgcctttagccacactcctgaccttctagatgagtaacaaaaaaatgaaataagttcttggaaattaagccatttattttaatttgctatttttttcaatgttctaggtatctttaaatttgttattgtggaatcattttcctgccagatacctttatcaaaattattggcctcatgagagctgaagtaagtcagctttttggtgaactttagtggacttctgtgagattgtagttgtactttgtatctctaaatctaaagatagttttttaaaactcccaaagaaaatctgctctcctttctgatctaaaaactcatctttggggtaaagagttaagtgtccaaaggttgtcacagttcatgaggtcagagggagctagcctggcacctggactctgcccatccacagctgacagattccaacagaagttgccttatgctatgagaccattcagaatatcatcttttagacacagcccgaggaatcaacaatagtaactctttctttccgtttttttttctttttcttttaaaaaatgtctttttattttggtttcaggttgaagtctcttccctttctacccagtactcgagcccagggctagaagttgaaactcactagtaatgttaaacaccattttttttttctttttggggaggagttgatatgcaactgcagttcatccgcactgtaaatacatgtatttaaaaaaacaatcccaagtaaaaatttcttctgggctgagtagataaaaaacatcatcgctcccaaaggaaagagcagtctatcattgcaggagccatatgacaagcctttgtgctctatagcagacactaaagactgggttacatatgcctccagtagtagtatggcacttgatgtgtagacatgtcagagccttggccctctttcctctgtggcaaagcgtgtcccatagaaaattgggtgtgtatacttgtataaactttgtaaataagttttttttctgggttcatatatatatatatatatacatatatatatattttttttttggatgaaggttgctgggattaaggggattagagtgattatgggagcagctaaagatgagaggggctcagttttacgcaacactaaattctagaaagtactttggcctcgtgctgtagagagcagatttctatggtaccctgtgttagtaaaggggcccagaaatctgggatgtactgtttgctgccacactgtctcatctagtacctttggagtaggtttaccagagagagcaaggaagcttcaaaacattgataattcaagatttattttgagaagctctgattttgcttcttccccctttctaaaagtttgaggaatatttcaagctctgcaacagggggcaaagattaatctaccttgcagtgtaggaattctattgagtggcagtgtcattgagcagtatatatataaagcacagatttgcatttcagaatattagccagtaccagctttggtaatgttagcagttctggagcttaattttctgtggatcatttcctgtagtgtgtaaatgtgttgccctctgcccgctttgatacataaacttttgcaggaatgggcaacctgagagctgttaactttcatgctacagaaagctgcttgccattctcttgcattgtgacaagaattgttacctgtcattttgcactgtaaattgctggcagatgctttacagtcaatagtgttgctttaaattgtgcccctcccaacatgcttgatgtttggcctgatctccaggcaaaaggagtgagatgaatcaaaaccagtgaacttttttttttaatgtttttaattcccttttaacccagtgtactaggtcaatcaggaggcatctggaaagggggggaaaaaagcaaaaaacaaaattaaaaaaaattgatttccatattttttcaaaaccctaaaatattacaaaataagtcccgcatatactttaatgttttaactcttttggacaaaggaatcaattacttgaagttgcttttttgactctgcctacttctgagcaaactatttgcgactcacccacaattccttggagatcaaaatcctacagatgcctcctgatgggacatagccctaactccttaacaactgtagcaagaactgcacggtacaaacccaaaaaagaacaagctcatctatttggaacccaagcctcatattttctgtccagtcaatgttggttactaaatagaaaacctaattaaggaagtaacttttttccagggaggggtgggagagggaatttaaaaggtgtcaacttttgaccaaaaaaattgtgcccttgtaccgatgcagctctctttctcccccacctcttgcgagataagagggatcattcatgtagaagaaaagagtataaatgcaattctgtatctcgctagagaacgtgtgggtgactaaacaaaaagtgcagtctccttcaccaactttagactgcgtggtgccacatgcctgtgggtccctcttaaagcacagacttaaaatggaaagtattactgaagtatagcctctaatgaggagtggcacattatatctactccgtgtgacaaccatttcccgagctcatcctgttgccgcggtca

SEQ ID NO: 72916 - DNA, 4514 bp, Homo sapiens
tgctttgggggctgtggggagccccccgggccggctctgggggactctcgggcggaggcctaaggcctggccgggcctggggaggaaggcggtcggcagctgtgtggggtgggagcgcctgagaggaggcgaatataggaatgtgattgacgtgagtgaattcagatataactcaagcttgttagagggctttttaaaaataaaaagttgattccgtgcaagagagcaagttactgctgcttaccgttcagagacttacaggtgcttgcctgcattgcaataaaggactcatttattgagcaagacttatatttatctcttcattttggagagcctaataaactgttattacagtttctctactgactttcaaaagttttgaagtttgaaagacctttgcaattaaaacagcatgagcacggccagaacagagaaccctgttataatgggtctgtccagtcaaaatggtcagctgagaggccctgtgaaacccactggtggccctggaggagggggcacacagacacagcaacagatgaaccagctgaaaaacaccaacacaatcaataatggcactcagcagcaagcacagagtatgaccaccactattaaacctggtgatgactggaaaaagactttaaaactccctccaaaggatctaagaatcaaaacttcggatgtgacctccacaaaaggaaatgagtttgaagattactgtttgaaacgggagttactgatgggaatttttgaaatgggctgggaaaagccatctcctattcaggaggagagcattcccattgctttatctggtagggatatcttagctagagcaaaaaatggaacaggcaagagcggtgcctacctcattcccttacttgaacggctagacctgaagaaggacaatatacaagcaatggtgattgttcccactagagaacttgctctacaggtcagtcaaatttgcatccaggtcagcaaacacatgggaggggccaaagtgatggcaaccacaggaggaaccaatttacgagatgacataatgaggcttgatgatacagtgcacgtggtgattgctacccctgggagaatcctggatcttattaagaaaggagtagcaaaggttgatcatgtccagatgatagtattggatgaggcagataagttgctgtcacaggattttgtgcagataatggaggatattattctcacgctacctaaaaacaggcagattttactatattccgctactttccctcttagtgtacagaagttcatgaattcccatttgcagaaaccctatgagattaacctgatggaggaactaactctgaagggagtaacccagtactacgcatatgtaactgagcgccaaaaagtacactgcctcaacacacttttctccaggcttcagataaaccagtcgatcattttctgtaactcctctcagcgagttgaattgctagccaagaagatttctcaactgggttattcttgcttctatattcatgctaaaatgaggcaggaacatcgaaatcgtgtatttcatgatttccgaaatggcttatgccgcaatcttgtttgcactgatctgtttacccgaggtattgatatacaagctgtgaatgtggtaataaactttgatttcccaaagctggcagagacctatctccatcgtattggaagatcaggtcgctttggtcatcttggcttagccatcaacttgatcacatatgatgatcgcttcaacctgaaaagtattgaggagcagctgggaacagaaattaaacctattccgagcaacattgataagagcctgtatgtggcagaataccacagcgagcctgtagaagatgagaaaccttaacaagcatgctttgacaaattacaaaaggctcgtttggatctgtgacacatcgttttggggggaatgctcttctctttgtgggtttttcatcttttattttggaactatgaagacttaaaagagctcagacattttctttttttaactggtgaagagaaaaaggctgaaaagaaggaatataccttttttgttccacttgtttgcactgtgtgctgactgaacattagttgcactaactgctggtttttaaaaaatgttttctggggaaaggggacaaggaaggaaaagaaagaagagaaggggagaaaccctaaaaagagaagaatcttaatgaacacacaagcttgtcaatgatttcaaaattctccaacagctgactctcgtgcatttcaacttctccctgattcctcatccgttttttaagcctgaagagcttattacttatttgtgcgaagtgccttatgctatgagaccattcagaatatcatcttttagacacagcccgaggaatcaacaatagtaactctttctttccgtttttttttctttttcttttaaaaaatgtctttttattttggtttcaggttgaagtctcttccctttctacccagtactcgagcccagggctagaagttgaaactcactagtaatgttaaacaccattttttttttctttttggggaggagttgatatgcaactgcagttcatccgcactgtaaatacatgtatttaaaaaaacaatcccaagtaaaaatttcttctgggctgagtagataaaaaacatcatcgctcccaaaggaaagagcagtctatcattgcaggagccatatgacaagcctttgtgctctatagcagacactaaagactgggttacatatgcctccagtagtagtatggcacttgatgtgtagacatgtcagagccttggccctctttcctctgtggcaaagcgtgtcccatagaaaattgggtgtgtatacttgtataaactttgtaaataagttttttttctgggttcatatatatatatatatatacatatatatatattttttttttggatgaaggttgctgggattaaggggattagagtgattatgggagcagctaaagatgagaggggctcagttttacgcaacactaaattctagaaagtactttggcctcgtgctgtagagagcagatttctatggtaccctgtgttagtaaaggggcccagaaatctgggatgtactgtttgctgccacactgtctcatctagtacctttggagtaggtttaccagagagagcaaggaagcttcaaaacattgataattcaagatttattttgagaagctctgattttgcttcttccccctttctaaaagtttgaggaatatttcaagctctgcaacagggggcaaagattaatctaccttgcagtgtaggaattctattgagtggcagtgtcattgagcagtatatatataaagcacagatttgcatttcagaatattagccagtaccagctttggtaatgttagcagttctggagcttaattttctgtggatcatttcctgtagtgtgtaaatgtgttgccctctgcccgctttgatacataaacttttgcaggaatgggcaacctgagagctgttaactttcatgctacagaaagctgcttgccattctcttgcattgtgacaagaattgttacctgtcattttgcactgtaaattgctggcagatgctttacagtcaatagtgttgctttaaattgtgcccctcccaacatgcttgatgtttggcctgatctccaggcaaaaggagtgagatgaatcaaaaccagtgaacttttttttttaatgtttttaattcccttttaacccagtgtactaggtcaatcaggaggcatctggaaagggggggaaaaaagcaaaaaacaaaattaaaaaaaattgatttccatattttttcaaaaccctaaaatattacaaaataagtcccgcatatactttaatgttttaactcttttggacaaaggaatcaattacttgaagttgcttttttgactctgcctacttctgagcaaactatttgcgactcacccacaattccttggagatcaaaatcctacagatgcctcctgatgggacatagccctaactccttaacaactgtagcaagaactgcacggtacaaacccaaaaaagaacaagctcatctatttggaacccaagcctcatattttctgtccagtcaatgttggttactaaatagaaaacctaattaaggaagtaacttttttccagggaggggtgggagagggaatttaaaaggtgtcaacttttgaccaaaaaaattgtgcccttgtaccgatgcagctctctttctcccccacctcttgcgagataagagggatcattcatgtagaagaaaagagtataaatgcaattctgtatctcgctagagaacgtgtgggtgactaaacaaaaagtgcagtctccttcaccaactttagactgcgtggtgccacatgcctgtgggtccctcttaaagcacagacttaaaatggaaagtattactgaagtatagcctctaatgaggagtggcacattatatctactccgtgtgacaaccatttcccgagctcatcctgttgccgcggtca

SEQ ID NO: 72917 - DNA, 3932 bp, Homo sapiens
  misc_feature (85)..(85): n is a, c, g, or t
  misc_feature (94)..(94): n is a, c, g, or t
tttaaggctagggatgctgtatagtcccattagaaagctttttttcttaactgcacttagatttgttgtcctttttattactgcnccgcccccnccaaaaaatttctggtctgtctttagcttcatttctgaacattttatcttggcctcccagagtgctgggattacaggcgtgagccactgcatcataaggtgcagttacaggtgtgagccactgcatcataaggcgcagtatttctatagcttcttaaattttgtaaataatgatgtatagcatgttctcccacctcaccccatattttcttatatattccttgatactgtttcagcaatggtgattgttcccactagagaacttgctctacaggtcagtcaaatttgcatccaggtcagcaaacacatgggaggggccaaagtgatggcaaccacaggaggaaccaatttacgagatgacataatgaggcttgatgatacagtgcacgtggtgattgctacccctgggagaatcctggatcttattaagaaaggagtagcaaaggttgatcatgtccagatgatagtattggatgaggcagataagttgctgtcacaggattttgtgcagataatggaggatattattctcacgctacctaaaaacaggcagattttactatattccgctactttccctcttagtgtacagaagttcatgaattcccatttgcagaaaccctatgagattaacctgatggaggaactaactctgaagggagtaacccagtactacgcatatgtaactgagcgccaaaaagtacactgcctcaacacacttttctccaggcttcagataaaccagtcgatcattttctgtaactcctctcagcgagttgaattgctagccaagaagatttctcaactgggttattcttgcttctatattcatgctaaaatgaggcaggaacatcgaaatcgtgtatttcatgatttccgaaatggcttatgccgcaatcttgtttgcactgatctgtttacccgaggtattgatatacaagctgtgaatgtggtaataaactttgatttcccaaagctggcagagacctatctccatcgtattggaagatcaggtcgctttggtcatcttggcttagccatcaacttgatcacatatgatgatcgcttcaacctgaaaagtattgaggagcagctgggaacagaaattaaacctattccgagcaacattgataagagcctgtatgtggcagaataccacagcgagcctgtagaagatgagaaaccttaacaagcatgctttgacaaattacaaaaggctcgtttggatctgtgacacatcgttttggggggaatgctcttctctttgtgggtttttcatcttttattttggaactatgaagacttaaaagagctcagacattttctttttttaactggtgaagagaaaaaggctgaaaagaaggaatataccttttttgttccacttgtttgcactgtgtgctgactgaacattagttgcactaactgctggtttttaaaaaatgttttctggggaaaggggacaaggaaggaaaagaaagaagagaaggggagaaaccctaaaaagagaagaatcttaatgaacacacaagcttgtcaatgatttcaaaattctccaacagctgactctcgtgcatttcaacttctccctgattcctcatccgttttttaagcctgaagagcttattacttatttgtgcgaagtgccttatgctatgagaccattcagaatatcatcttttagacacagcccgaggaatcaacaatagtaactctttctttccgtttttttttctttttcttttaaaaaatgtctttttattttggtttcaggttgaagtctcttccctttctacccagtactcgagcccagggctagaagttgaaactcactagtaatgttaaacaccattttttttttctttttggggaggagttgatatgcaactgcagttcatccgcactgtaaatacatgtatttaaaaaaacaatcccaagtaaaaatttcttctgggctgagtagataaaaaacatcatcgctcccaaaggaaagagcagtctatcattgcaggagccatatgacaagcctttgtgctctatagcagacactaaagactgggttacatatgcctccagtagtagtatggcacttgatgtgtagacatgtcagagccttggccctctttcctctgtggcaaagcgtgtcccatagaaaattgggtgtgtatacttgtataaactttgtaaataagttttttttctgggttcatatatatatatatatatacatatatatatattttttttttggatgaaggttgctgggattaaggggattagagtgattatgggagcagctaaagatgagaggggctcagttttacgcaacactaaattctagaaagtactttggcctcgtgctgtagagagcagatttctatggtaccctgtgttagtaaaggggcccagaaatctgggatgtactgtttgctgccacactgtctcatctagtacctttggagtaggtttaccagagagagcaaggaagcttcaaaacattgataattcaagatttattttgagaagctctgattttgcttcttccccctttctaaaagtttgaggaatatttcaagctctgcaacagggggcaaagattaatctaccttgcagtgtaggaattctattgagtggcagtgtcattgagcagtatatatataaagcacagatttgcatttcagaatattagccagtaccagctttggtaatgttagcagttctggagcttaattttctgtggatcatttcctgtagtgtgtaaatgtgttgccctctgcccgctttgatacataaacttttgcaggaatgggcaacctgagagctgttaactttcatgctacagaaagctgcttgccattctcttgcattgtgacaagaattgttacctgtcattttgcactgtaaattgctggcagatgctttacagtcaatagtgttgctttaaattgtgcccctcccaacatgcttgatgtttggcctgatctccaggcaaaaggagtgagatgaatcaaaaccagtgaacttttttttttaatgtttttaattcccttttaacccagtgtactaggtcaatcaggaggcatctggaaagggggggaaaaaagcaaaaaacaaaattaaaaaaaattgatttccatattttttcaaaaccctaaaatattacaaaataagtcccgcatatactttaatgttttaactcttttggacaaaggaatcaattacttgaagttgcttttttgactctgcctacttctgagcaaactatttgcgactcacccacaattccttggagatcaaaatcctacagatgcctcctgatgggacatagccctaactccttaacaactgtagcaagaactgcacggtacaaacccaaaaaagaacaagctcatctatttggaacccaagcctcatattttctgtccagtcaatgttggttactaaatagaaaacctaattaaggaagtaacttttttccagggaggggtgggagagggaatttaaaaggtgtcaacttttgaccaaaaaaattgtgcccttgtaccgatgcagctctctttctcccccacctcttgcgagataagagggatcattcatgtagaagaaaagagtataaatgcaattctgtatctcgctagagaacgtgtgggtgactaaacaaaaagtgcagtctccttcaccaactttagactgcgtggtgccacatgcctgtgggtccctcttaaagcacagacttaaaatggaaagtattactgaagtatagcctctaatgaggagtggcacattatatctactccgtgtgacaaccatttcccgagctcatcctgttgccgcggtca

SEQ ID NO: 72918 - DNA, 3579 bp, Homo sapiens
ctgattacagaattgcgagctcaggtaccccgtgaccatttggacgcatgggaggggccaaagtgatggcaaccacaggaggaaccaatttacgagatgacataatgaggcttgatgatacagtgcacgtggtgattgctacccctgggagaatcctggatcttattaagaaaggagtagcaaaggttgatcatgtccagatgatagtattggatgaggcagataagttgctgtcacaggattttgtgcagataatggaggatattattctcacgctacctaaaaacaggcagattttactatattccgctactttccctcttagtgtacagaagttcatgaattcccatttgcagaaaccctatgagattaacctgatggaggaactaactctgaagggagtaacccagtactacgcatatgtaactgagcgccaaaaagtacactgcctcaacacacttttctccaggcttcagataaaccagtcgatcattttctgtaactcctctcagcgagttgaattgctagccaagaagatttctcaactgggttattcttgcttctatattcatgctaaaatgaggcaggaacatcgaaatcgtgtatttcatgatttccgaaatggcttatgccgcaatcttgtttgcactgatctgtttacccgaggtattgatatacaagctgtgaatgtggtaataaactttgatttcccaaagctggcagagacctatctccatcgtattggaagatcaggtcgctttggtcatcttggcttagccatcaacttgatcacatatgatgatcgcttcaacctgaaaagtattgaggagcagctgggaacagaaattaaacctattccgagcaacattgataagagcctgtatgtggcagaataccacagcgagcctgtagaagatgagaaaccttaacaagcatgctttgacaaattacaaaaggctcgtttggatctgtgacacatcgttttggggggaatgctcttctctttgtgggtttttcatcttttattttggaactatgaagacttaaaagagctcagacattttctttttttaactggtgaagagaaaaaggctgaaaagaaggaatataccttttttgttccacttgtttgcactgtgtgctgactgaacattagttgcactaactgctggtttttaaaaaatgttttctggggaaaggggacaaggaaggaaaagaaagaagagaaggggagaaaccctaaaaagagaagaatcttaatgaacacacaagcttgtcaatgatttcaaaattctccaacagctgactctcgtgcatttcaacttctccctgattcctcatccgttttttaagcctgaagagcttattacttatttgtgcgaagtgccttatgctatgagaccattcagaatatcatcttttagacacagcccgaggaatcaacaatagtaactctttctttccgtttttttttctttttcttttaaaaaatgtctttttattttggtttcaggttgaagtctcttccctttctacccagtactcgagcccagggctagaagttgaaactcactagtaatgttaaacaccattttttttttctttttggggaggagttgatatgcaactgcagttcatccgcactgtaaatacatgtatttaaaaaaacaatcccaagtaaaaatttcttctgggctgagtagataaaaaacatcatcgctcccaaaggaaagagcagtctatcattgcaggagccatatgacaagcctttgtgctctatagcagacactaaagactgggttacatatgcctccagtagtagtatggcacttgatgtgtagacatgtcagagccttggccctctttcctctgtggcaaagcgtgtcccatagaaaattgggtgtgtatacttgtataaactttgtaaataagttttttttctgggttcatatatatatatatatatacatatatatatattttttttttggatgaaggttgctgggattaaggggattagagtgattatgggagcagctaaagatgagaggggctcagttttacgcaacactaaattctagaaagtactttggcctcgtgctgtagagagcagatttctatggtaccctgtgttagtaaaggggcccagaaatctgggatgtactgtttgctgccacactgtctcatctagtacctttggagtaggtttaccagagagagcaaggaagcttcaaaacattgataattcaagatttattttgagaagctctgattttgcttcttccccctttctaaaagtttgaggaatatttcaagctctgcaacagggggcaaagattaatctaccttgcagtgtaggaattctattgagtggcagtgtcattgagcagtatatatataaagcacagatttgcatttcagaatattagccagtaccagctttggtaatgttagcagttctggagcttaattttctgtggatcatttcctgtagtgtgtaaatgtgttgccctctgcccgctttgatacataaacttttgcaggaatgggcaacctgagagctgttaactttcatgctacagaaagctgcttgccattctcttgcattgtgacaagaattgttacctgtcattttgcactgtaaattgctggcagatgctttacagtcaatagtgttgctttaaattgtgcccctcccaacatgcttgatgtttggcctgatctccaggcaaaaggagtgagatgaatcaaaaccagtgaacttttttttttaatgtttttaattcccttttaacccagtgtactaggtcaatcaggaggcatctggaaagggggggaaaaaagcaaaaaacaaaattaaaaaaaattgatttccatattttttcaaaaccctaaaatattacaaaataagtcccgcatatactttaatgttttaactcttttggacaaaggaatcaattacttgaagttgcttttttgactctgcctacttctgagcaaactatttgcgactcacccacaattccttggagatcaaaatcctacagatgcctcctgatgggacatagccctaactccttaacaactgtagcaagaactgcacggtacaaacccaaaaaagaacaagctcatctatttggaacccaagcctcatattttctgtccagtcaatgttggttactaaatagaaaacctaattaaggaagtaacttttttccagggaggggtgggagagggaatttaaaaggtgtcaacttttgaccaaaaaaattgtgcccttgtaccgatgcagctctctttctcccccacctcttgcgagataagagggatcattcatgtagaagaaaagagtataaatgcaattctgtatctcgctagagaacgtgtgggtgactaaacaaaaagtgcagtctccttcaccaactttagactgcgtggtgccacatgcctgtgggtccctcttaaagcacagacttaaaatggaaagtattactgaagtatagcctctaatgaggagtggcacattatatctactccgtgtgacaaccatttcccgagctcatcctgttgccgcggtca

SEQ ID NO: 72919 - DNA, 2226 bp, Homo sapiens
  misc_feature (2214)..(2214): n is a, c, g, or t
agcgggaggcggcgggcgggcgaacgggcgagcgagggagggggcagaggagccgagttagctcagccaggcggcgacttcggcggcgccacgagagcgggcagcggaggagattgacgtgagtgaattcagatataactcaagcttgttagagggctttttaaaaataaaaagttgattccgtgcaagagagcaagttactgctgcttaccgttcagagacttacaggtgcttgcctgcattgcaataaaggactcatttattgagcaagacttatatttatctcttcattttggagagcctaataaactgttattacagtttctctactgactttcaaaagttttgaagtttgaaagacctttgcaattaaaacagcatgagcacggccagaacagagaaccctgttataatgggtctgtccagtcaaaatggtcagctgagaggccctgtgaaacccactggtggccctggaggagggggcacacagacacagcaacagatgaaccagctgaaaaacaccaacacaatcaataatggcactcagcagcaagcacagagtatgaccaccactattaaacctggtgatgactggaaaaagactttaaaactccctccaaaggatctaagaatcaaaacttcggatgtgacctccacaaaaggaaatgagtttgaagattactgtttgaaacgggagttactgatgggaatttttgaaatgggctgggaaaagccatctcctattcaggaggagagcattcccattgctttatctggtagggatatcttagctagagcaaaaaatggaacaggcaagagcggtgcctacctcattcccttacttgaacggctagacctgaagaaggacaatatacaagcaatggtgattgttcccactagagaacttgctctacaggtcagtcaaatttgcatccaggtcagcaaacacatgggaggggccaaagtgatggcaaccacaggaggaaccaatttacgagatgacataatgaggcttgatgatacagtgcacgtggtgattgctacccctgggagaatcctggatcttattaagaaaggagtagcaaaggttgatcatgtccagatgatagtattggatgaggcagataagttgctgtcacaggattttgtgcagataatggaggatattattctcacgctacctaaaaacaggcagattttactatattccgctactttccctcttagtgtacagaagttcatggtgagtataaatctgtacttggaatcagtgccatcctgtgacctttgagtatgcttttatttgtaattacatcttcatatctgtgaatatactttatgctaattatttcaagcctttggctctttcttcagttgatcaattaaagatttgttttacgtaaattaactgactttttaagaaggttgtaatagtaacttaattaaattcctcatctttcacttagtttttggtgtcatgatgacatagccattggtgctagctgaattgattccggtattattctatatacaaaacagagcttgagtatcctaaactgaaatccaaaatactgcagaatttgaaaccttttgagccacgaacatgatgctaaaaggaaatgttctttggattttgaattttcaaattaaggatgctcagtcactaagtgtaatgcacatattccaaaattagaaaaaatttaaaacctgaaacacttctgttcctaagcattttgggtaaggaatactcaacctgtagtaacttagctgcatttttgagatccttatatcttaatttatttctatcgggtcgggcatggtggctcatgcctgtaatcccagcactttggggggccgaggcgggcagatcacaaggtcaggagttcgagaccagcctgggcaacatggtgaaaccccgtctctactaaaaatacaaaaattagtctgttatggcagtgcatgcctgcattcccagctactcgggaggccgaggcaggagaatcacttgaacccgggaggtggaggttgcagggagcagagatcgtgccactacactccagcctgggtgacagagcaagattttgtctcagggtggcaggggggaaattctgtaatgacagatcatatattttgttttgaagagagttgcgtcccttacagcaagattttatcggacagaaacgtatagggtattgaagctcatggtgctagctncctgtgccgaat

SEQ ID NO: 72920 - DNA, 1189 bp, Homo sapiens
agcgggaggcggcgggcgggcgaacgggcgagcgagggagggggcagaggagccgagttagctcagccaggcggcgacttcggcggcgccacgagagcgggcagcggaggagattgacgtgagtgaattcagatataactcaagcttgttagagggctttttaaaaataaaaagttgattccgtgcaagagagcaagttactgctgcttaccgttcagagacttacaggtgcttgcctgcattgcaataaaggactcatttattgagcaagacttatatttatctcttcattttggagagcctaataaactgttattacagtttctctactgactttcaaaagttttgaagtttgaaagacctttgcaattaaaacagcatgagcacggccagaacagagaaccctgttataatgggtctgtccagtcaaaatggtcagctgagaggccctgtgaaacccactggtggccctggaggagggggcacacagacacagcaacagatgaaccagctgaaaaacaccaacacaatcaataatggcactcagcagcaagcacagagtatgaccaccactattaaacctggtgatgactggaaaaagactttaaaactccctccaaaggatctaagaatcaaaacttcggatgtgacctccacaaaaggaaatgagtttgaagattactgtttgaaacgggagttactgatgggaatttttgaaatgggctgggaaaagccatctcctattcaggaggagagcattcccattgctttatctggtagggatatcttagctagagcaaaaaatggaacaggcaagagcggtgcctacctcattcccttacttgaacggctagacctgaagaaggacaatatacaagcaatggtgattgttcccactagagaacttgctctacaggtcagtcaaatttgcatccaggtcagcaaacacatgggaggggccaaagtgatggcaaccacaggaggaaccaatttacgagatgacataatgaggcttgatgatacagtgcacgtggtgattgctacccctgggagaatcctggatcttattaagaaaggagtagcaaaggttgatcatgtccagatgatagtattggatgaggctagataagttgctgtcacaggattttgtgcaaatgggaattcatgacgtctgtacactaagacgggt

SEQ ID NO: 72921 - DNA, 575 bp, Homo sapiens
gagctcggtacccctcaacgctttatacttccttaattagctcatctatttggaacccaagcctcatattttctgtccagtcaatgttggttactaaatagaaaacctaattaaggaagtaacttttttccagggaggggtgggagagggaatttaaaaggtgtcaacttttgaccaaaaaaattgtgcccttgtaccgatgcagctctctttctcccccacctcttgcgagataagagggatcattcatgtagaagaaaagagtataaatgcaattctgtatctcgctagagaacgtgtgggtgactaaacaaaaagtgcagtctccttcaccaactttagactgcgtggtgccacatgcctgtgggtccctcttaaagcacagacttaaaatggaaagtattactgaagtatagcctctaatgaggagtggcacttaaactatctgggacaccactactggacacggtcttgtagaggcagctgtccagttttggtgcttgactcttgaataggaattgttaaatggaaagatgctctgagtgactaggtcaaagcctggtcttttttttttt

SEQ ID NO: 72922 - DNA, 516 bp, Homo sapiens
ctggaagtgtgaagttcaagtcaaaagctcacttaaatctataaggactctcggttgctattacaagtagaagaaaattaatgaattgtcttgtttaaattgtgtgatacttcagtgagttgtaatgcaattaagtataatgaatcactgacttttagagatgtcagagacttagagaattcatggggaggaaactgaagagaagagattatcattgacgagtagtgctaatttactagtctctttctacttaatctctggattgctttgaattaacaattttaaatgtttgatattggcctcattgtgtttttgagatagttcaaagttgtgtctatcctagcttggctcgtgatttggtctaagtgtagctgtattattaattctttaatataaaagatgagaattcttttaaagcggttcttttaaaagggaaacaaagtttttctgttgtgtttgctaatttaattttgtttgtttgtttcagattgacgtgagtgaattcagatataactc

SEQ ID NO: 72923 - DNA, 418 bp, Homo sapiens
agaggacagatgactttgttttatggccagtaggtatttgcaatagaataatatatttctgccataatttgttcagcaagtagtcatcctgaggtcagatgatacacacaaattttgtataaatggtttttggaaacatttctggctttcataattagtgtaaaagttattagcttagtttgttgtaaatgaataaaattattagtcatctcgtttttgtcagtatagtttttttacgactgcaccttaccctagttaaacagcagataaagccaactttatgtattaaatttaaagactcagtctgagtctttagagtctttaaagacttgcccagccttctgaactccaagcattattcactcagaaaattttctcgtaactttttttagcttatggaacttagcttttttacttt

SEQ ID NO: 72924 - DNA, 274 bp, Homo sapiens
gtcgtgctgatttacttggatctctgctattcatgtagaattcaaatgtaggatacttaggacacttaaagcaataccgaaagaggtatccttcagtgtatttcagagaggaatttgcttgtgtactacattcagaagtaattttgtattgtcttatctcttttaggaggagagcattcccattgctttatctggtagggatatcttagctagagcaaaaaatggaacaggcaagagcggtgcctacctcattcccttacttgaacggctagac

SEQ ID NO: 72925 - DNA, 490 bp, Homo sapiens
ttcacattgattttcatattttattcattaaaatttttaaacacatgttttttaggtcgctttggtcatcttggcttagccatcaacttgatcacatatgatgatcgcttcaacctgaaaagtattgaggagcagctgggaacagaaattaaacctattccgagcaacattgataagagcctgtatgtggcagaataccacagcgagcctgtagaagatgagaaaccttaacaagcatgtacgtccctgacagaacagctaagaggaacctttaaatgagggaaatcaaaatcttctttcctgggggaaatttgatgtcacaccatatataatagcaataaagggtaaaatacccactagcataaatgacagtaaataatatctcttgtgggaggttgtagtctcattcgagaatctgtaaatgttgttcttgaatgcagcttcccgggtaatgtggtagattagcagtacttaaattcagagtcctaaa

SEQ ID NO: 72926 - DNA, 251 bp, Homo sapiens
gatgaattaagagggaaatttataaagtaaaatctttagcgctgttgatcaaagagttccaggccgggcgtggtggctcatgcctgtaatcccagcactttgggaggctgaggtgggcagatcacgaggtcaggagatcaagaccatcctaacacggtgaaaccccatctctactaaaaatacaaaaaattagccgggcatggtggcgggcgcctgtagtagcagctacttgggaggctgaggcaggagaa

SEQ ID NO: 72927 - DNA, 348 bp, Homo sapiens
cggcacgaggagcatctgaaacagtacctggggctcaggaggattgcttaagcctaggagttcaagaccagcctggtcaacaaagcaagaccccatttctatagacagataaaatcaccatgcctggctaattttttaattattttgtagagatggggtctcactttgttgcacaggctgtttgcttgattcttaagaacgtatagggatccagctgtacagagctttctgcagtcttttgtaatagaattagttgttaaaattgtacttattacatgagcatcaaagaccttggaataaagctattcctcacatatctggacattatttggacttactatgttaccg

SEQ ID NO: 72928 - DNA, 367 bp, Homo sapiens
ttttaagatgggatctcacggttacccaggctggagtgcagtagtgcgtcatagctcactgtggcctgaaactcctgaactcaaactatcctcctgcctcagcctcccaaatagctgggactgcaggcacatgccaccatgcctggctaattttttaattattttgtagagatggggtctcactttgttgcacaggctgtttgcttgattcttaagaacgtatagggatccagctgtacagagctttctgcagtcttttgtaatagaattagttgttaaaattgtacttattacatgagcatcaaagaccttggaataaagctattcctcacatatctggacattatttggacttactatgttaccg

SEQ ID NO: 72929 - DNA, 304 bp, Homo sapiens
tctctaaatacaaaaattagccgggtgtggtgacgggcacatgtaatcccagcaactcaggaggcaggagaatcacttaaacctgagagaaggttgcagtgcgccgagattgcaccattgccctcaagccccggtgaaagtgcaagactccgactcaaaagaaaaagagagaggctttggctttgccttatctgtgctatctacctaacaccggtaattttggaatctggaagatttttcatttagaagctctttctattctggtcctggctggatatatacattacagattatttctaaggta

SEQ ID NO: 72930 - DNA, 717 bp, Homo sapiens
atttaatacgtttcacatcctagaaagattatgtcagtggtgtgtagggtggattggagatggagaaagcagaattcctttcaataacttcattatactgaacacatttattgagagtgatcatatttacagattcatggaatcagacaactggcggggctgcgatgctttcttagttttcctcattcattttcaaatagaatacctgaggtttactcaggatcacagaagtggttctgtgatagcttagtctagaattcagtcttcagcatgtactaggtgattaataaaggtgaattcacctctctcttctctcccaagtcccatttcagtgtttgtgtcattctgccacattgcattgtactagcagatagaaggacttaacatcattccattctaccgtctttttttaaccagtccaaagtgaatagaggtattttcctaggtctgactgagaaagatgttccctgagagtaccattgggaagaggggcagttcggtgccctggactgggctgaatgaggtgttaggatttttcagctgtagtgattcagatgtagaagaatgtcaaggtatttgttttgttgcatgtctttatctctgccactaagctccctttaagttgttttcttttaaacttagttttatttgtgccactgaaacttgttaaataagctatgataaattgggcactgattaaaagtatatttatctaaa

SEQ ID NO: 72931 - DNA, 1261 bp, Homo sapiens
tcatttattttataaaagcatctccttctataactcaaaattttctttaagtgtcatataaaagtgtacattttacttttaagcaactaatttagatacctaagaaaaactatgtgcattaggaaaagtcatgtttttcttctcagaaaggttgatcacatgacatgtctactaagaattttcacctctgtacttgtatgtatattttattgttactcaatcttgtattttatttacaaattcaacactgtcaaccctgggaattctaaaataccaatgtatttttaggttgtagctaatgttgtattcactttcaattctcagttgtccacactggtgatataagaggaacaaatcagaatcattaaatactttgtaatgccatcataaactcatatattcatcctcaaactcccttgtttaatgctaattggtggcctggaacttcactgagatgcaaaatcaagaactgaagcctagttgctagataacaaaaagctataaatgtttatgtatgtgaattttaaattagaataaccgtcttaaactcctacttgccatttctaaggcaaagcattcattttaatattgtactttgccttttcattcagttagtggagtaagtcatgaaacccttaggaagaaaaacaagttatgacttattcactaaaattgatgcaagacagttggttctagatgaccatggccatgtgttcatcatataaaaccttcagttctctctatggtgcttggctggagattgacatgtgaggatgtgccaatcatattaaatggatttggtctatgtgggtgatatgtggcctgaatgtaactgtgatagactgaaatttgttcttagctctcaaaatccactgaagaagtcaagtgaaggtgggtaaaatagggagattagtgacaactttgtgccaaattttttaaaaaatggaagcaggtagccaatattagaatgataatttaagggtgtggttgaattttagttagttgtcacatagttattgaacctcatatgctcagtgctgtgggaatcaaacatggaagaggtatggctcctgcccctaatgagaacaagggggaaaaatccagatataatctaaatgctaggttatgtcagggtataggaacacagagaatgggggacctgtaagaactggaagagtcagagagggctccattgaagaggtcaaacataattccggaaagaataggtagtgaggagattgtgccaggaaaataagtggga

SEQ ID NO: 72932 - DNA, 1406 bp, Homo sapiens
tgcctcgcggggttgcggcgagcccggcccgcgaacgtcacgtccctgcgcgctccctgcactctcccgagctgcgctaggcgggcgccacggctgcccggcgaaggaaaccgaaaccgagtccgggcccgtccctccgcggccccatccgcccggtgcacccggggtcgcgctcgccaggccgcggagcccagagctgcgcgcacgaaccgtgcgccgggagggcgtgggcgtggcgccgaagggtcccgggtcttcgacgcctctgcggcggctcctccctccttgcagttggatccctggcgggtgcggcccggcccggcccgtgagcggcgcacagaatgggccgatgctgcttctacacggcggggacgttgtccctgctcctgctggtgaccagcgtcacgctgctggtggcccgggtcttccagaaggctgtagaccagagtatcgagaagaaaattgtgttaaggaatggtactgaggcatttgactcctgggagaagccccctctgcctgtgtatactcagttctatttcttcaatgtcaccaatccagaggagatcctcagaggggagacccctcgggtggaagaagtggggccatacacctacagggaactcagaaacaaagcaaatattcaatttggagataatggaacaacaatatctgctgttagcaacaaggcctatgtttttgaacgagaccaatctgttggagaccctaaaattgacttaattagaacattaaatattcctgtattgactgtcatagagtggtcccaggtgcacttcctcagggagatcatcgaggccatgttgaaagcctatcagcagaagctctttgtgactcacacagttgacgaattgctctggggctacaaagatgaaatcttgtcccttatccatgttttcaggcccgatatctctccctattttggcctattctatgaggtaagtagatttttcttttcagaacctctttttttagctgacagtgggttggggcaccccaagccagattaactttgagtttcttctagaaattgcctagagttaagttatcttatagagtgtgtgaaaaatggagtgttttttggaaagaaaaaaaacttgaggccgggtgcggtggctaatgcctgtaattccaggactttgggagaccgaggtgggtggatcacttgaggttaagactttgagaccagcctggccaacatggcaaaactctatctctactaaaaatacaaaaattagccagctgtggtgatgtacacctgtaatctcacctactcaggagactgaggcaggtaagttgcatgaacccaggaggcagaggttgcagtgagctgaagttacaccactgtactccagccagggtgacagagcaagactctgtctaaaaaagcc

SEQ ID NO: 72933 - DNA, 2752 bp, Homo sapiens
  misc_feature (817)..(817): n is a, c, g, or t
  misc_feature (1018)..(1018): n is a, c, g, or t
  misc_feature (1033)..(1033): n is a, c, g, or t
  misc_feature (1336)..(1336): n is a, c, g, or t
  misc_feature (1392)..(1392): n is a, c, g, or t
  misc_feature (1464)..(1464): n is a, c, g, or t
  misc_feature (2066)..(2066): n is a, c, g, or t
  misc_feature (2354)..(2354): n is a, c, g, or t
aaaatacttagcccagggcccatcacacagtaaccaatattaagtgttggctcttagttactatgatatgctctgtcaagcatcaactgacctggtctacttccagtcaataggtagtctctacatggaagccaaataaaagatactgttgtccatatttcagcagagtggtttcctcaggggaggcagagaaggaatggaatcaagagcattacgtagacaggttcagttatatccataatataatttttatttgtctaagtggcagatacaaaggtatttgttagagtattttatctctttctggtgcctaaaatttttcattaaaaaatgctgtaggggtggtttggtttgtgcagtgaaaccacctatgttattcacaaccttgcgagagatgtatcaacagctctggttcagagatgaaaaagtgaggcccagaaggctcttccggccagccttcaaaggaagggctgaaggctcagtggtgactgtgtacatcaaagtggttaggcactatgcagtgtaagcagtggtcatattacatgggactatgtttgaaatcagtaagaatgaaaggcagaataacgttgaactccatttaaataaatgactggggcaaaatatggaatctgatttttcttggagggggggattgagtatcaaagtgtgtattccaataaagtatctgtccaatgtgacacttttcaagtgcctaagaccctacgaggccacggccatcgctgcctgttctaccttagctttggctctgccgtgccctggcttccctggctttgccggtggcccgtccacactggcntatgtccatgcaggtctagagaggcctcttatttcttttttatgtgagtctccattctaaatgttatcatcttaattttgtaccacatattgttttttcttgtttggatgatatcaccgttgctacaataaacaccttccactacaattcatcttctgctttattacacgttgagttgacagaatgccttccaaacattcntttctacttaccctntgagcttttggccatgttgtacctgagaactgttgctaacttgcggatttcgggcagattacactgaccagagtccacattcactttttattcttacatcctaacaggtcagtgtatattactttcagtgactatgagagtgtacagggactgcctgcctttcggtataaagttcctgcagaaatattagccaatacgtcagacaatgccggcttctgtatacctgagggaaactgcctgggctcaggagttctgaatgtcagcatctgcaagaatggtaagaactcagagaggggacatganaggggtgtcaagaatgcagaaggattggagttcaacaaagaatatgtagctgggcntagtggcgcacacctacagtcccagctactaaggatgctgaggtgggatgatcacttgagcccaggagttcncaagtccatcctgggcaacatggcgagaccactgtctctaaaaaacaaaacaaacaaaaaagaatatattgtcagcccaatagaaagatcagtttctttcaagaacaatgtttcataacatggctattgaatggtaaaaaaaaatcatggcttttctgtgatgctttttatttctagaatgccatgttgtgtttttttttctggacagtggtttagaagtcttaacagtaataatagctcatgtttactaagcacctgatgtatgccagtcactgtcctaagtgctttacatatttacatgtagttaatgcctgcaaaacattaactgatttcatgttcaaaacaatgctaaggctgggcacggtggctcatgcttgtattcccagcactttgagaggccgagatgtgaggattgcttgaggccaggggttcaagatcagcctgggcaacatagcaagaccctgtctctacaaaaaaaaaaaaattaaaaaattagctgggtgtggcggcacacacctgtagttacagctgctcaggaggctgaggcagagagattgcttgaacccaggagttcgaggttgcactgtgctatgattgtgctnctgcactccagcctgggcaatagagtgattccgcacctccccaccaaaaaaaaaaagctaaaagaaaaagtggacaactcagttttaagaaagtacgtatcatggcaaagattctcagtgattttgaagcagagttagttttaaaccctgacacaaatgtcccagtgtttcttaatgtcagagctactctgctcctttccatgaatgaggcagaattatcagtggcacaactgacaaaactattttcttcatcttgaagagtagttttaacagccacatgttgcaganttattcacaatgaacttactagatagtagacattcagcggcctgtttttataattggggaaactagggctcagagagggaacgtgattttgatgcgactcctccctctgagcagatccctggcggaactcagggtcttctcatatttgccctgtgattccctcttgggctgtaattcctctttaaaatttctctggagagctctctgtgtagtccctttctcctgaatagtaatgtgctcacttttgctcccttatctatctcattttaaaatctcctttcaggcctggcatggtggcgtgtgcctgtagacccagctactcaggaggctatggtggaagggtcgtttgagcccagtttgattctagcctgggcaacatagcgagactccatctttta

SEQ ID NO: 72934 - DNA, 248 bp, Homo sapiens
tggagggggcccagccactcattattgagggtaacctcccttaaagttaacggattgtagatattaatcacacctacaaaataccttcaccacaccatctgggctagtgtttgaccaaacaactgggcaccatagtctagccaagttgtcataaaattatcacagttactttaaatgatcatattcacatattttcagaaaaatgggtcgacgcggccgcgaatttagtagtagtagtaggcggccgc

SEQ ID NO: 72935 - DNA, 4753 bp, Homo sapiens
tgcctcgcggggttgcggcgagcccggcccgcgaacgtcacgtccctgcgcgctccctgcactctcccgagctgcgctaggcgggcgccacggctgcccggcgaaggaaaccgaaaccgagtccgggcccgtccctccgcggccccatccgcccggtgcacccggggtcgcgctcgccaggccgcggagcccagagctgcgcgcacgaaccgtgcgccgggagggcgtgggcgtggcgccgaagggtcccgggtcttcgacgcctctgcggcggctcctccctccttgcagttggatccctggcgggtgcggcccggcccggcccgtgagcggcgcacagaatgggccgatgctgcttctacacggcggggacgttgtccctgctcctgctggtgaccagcgtcacgctgctggtggcccgggtcttccagaaggctgtagaccagagtatcgagaagaaaattgtgttaaggaatggtactgaggcatttgactcctgggagaagccccctctgcctgtgtatactcagttctatttcttcaatgtcaccaatccagaggagatcctcagaggggagacccctcgggtggaagaagtggggccatacacctacagggaactcagaaacaaagcaaatattcaatttggagataatggaacaacaatatctgctgttagcaacaaggcctatgtttttgaacgagaccaatctgttggagaccctaaaattgacttaattagaacattaaatattcctgtattgactgtcatagagtggtcccaggtgcacttcctcagggagatcatcgaggccatgttgaaagcctatcagcagaagctctttgtgactcacacagttgacgaattgctctggggctacaaagatgaaatcttgtcccttatccatgttttcaggcccgatatctctccctattttggcctattctatgagaaaaatgggactaatgatggagactatgtttttctaactggagaagacagttaccttaactttacaaaaattgtggaatggaatgggaaaacgtcacttgactggtggataacagacaagtgcaatatgattaatggaacagatggagattcttttcacccactaataaccaaagatgaggtcctttatgtcttcccatctgacttttgcaggtcagtgtatattactttcagtgactatgagagtgtacagggactgcctgcctttcggtataaagttcctgcagaaatattagccaatacgtcagacaatgccggcttctgtatacctgagggaaactgcctgggctcaggagttctgaatgtcagcatctgcaagaatggtgcacccatcattatgtctttcccacacttttaccaagcagatgagaggtttgtttctgccatagaaggcatgcacccaaatcaggaagaccatgagacatttgtggacattaatcctttgactggaataatcctaaaagcagccaagaggttccaaatcaacatttatgtcaaaaaattagatgactttgttgaaacgggagacattagaaccatggttttcccagtgatgtacctcaatgagagtgttcacattgataaagagacggcgagtcgactgaagtctatgattaacactactttgatcatcaccaacataccctacatcatcatggcgctgggtgtgttctttggtttggtttttacctggcttgcatgcaaaggacagggatccatggatgagggaacagcggatgaaagagcacccctcattcgaacctaaacattgcctttgcttggtgaagaaactgtgtgagctgtcctgacctggacgatgacgtggggaaaccctccacctccttgcaggcttgttgcctgttgaaagaaggaaaaagacacggcgctggcaagtgataggaacattctggccagaggttaaagagcaggctgacatggctggccattaagctttataaaatcatgtgggctctgaaattgttcttttatgtgtctagcaagtatttaataaacccttgtatagtaattttgttgttgttgggtgctggtagctccagaattttgtgaccactattgtgggtaaaatgtctctgcatcacttgttaatgctactggtctaacttcattcagtatgcttcattcaccgaactttgtgctcaaaatgcgtatataccattttatgttgtattcctccatttcacttgcaaaacagaagtaaataagagttcgggacccagggtaaaatggtagcttcatccaatatatcattcaaatgcatctgatttctaaaacatattacattttatgctgatcttcagttcataattcttccaggaaaactcagtcttccaactgcaataaaatactgggtagaatcaaatgggaaaggggttgggtggggcaatacccatgagttgatagtgataagctcctaaggatttttaacttgtacttttgtgaacgaagagaatgcataaataatgttggtgaggataaagtacagatatttcatgtagaattaattgctagttatgatgcttgtggatagttaactgttttttttttagtcaaaatgatcatgctacgaaaagatgcttctgagagaatgtaatgagtaactgatttttcttcctgagtcgcccttgccaaatatgttactgtattaattaatctaatattgagtgattatttgtaaaattatgaatatgggaaatccatctatctacagcctaagttacacataagtttcagaaagtctgattagactaaagagatatttcttctgggacagccttcttcttggtaattttgaagttctttttacaagttccttcctcagtttcagttctttccagtgttttgtagctcactgtcactcactgaatagagaaacgtgtgccctatacttcctgtgacaatcattttgctgacagaatgatggatgtttaaaatattgcacaaagtactttaaagaaaggtctgttaggaccagaagcagagacaccacttttcaaaggacttcttggtttcagcataacctaagacagggaattgggagccatcatatgtcacagtgttcagaattcaagcatatttaagggcattttctttgattctcaaagttcagcattcattttgaattgagaagcctatacatttagctgacaaagtgcttatagaatttcttaacaactgaaccattcaaaaggattttttttgtttaaaactggatttcaatgtaagcaaatgaagaaaaaaatatagatttcatttccatagcttcttatccctgtattgaggtaataaattgttttactgacaatttttcctttttctacactaaaacaatatgtgatatatttcccctcttgaagaggcaattcattaaactctcaaattttctatagaatcaagatagaacctttagatactccaactcaccaaaatgtaaaaaaactaacaaaaatatttggtcttcaataatgctaaatatctacatttttagaatttatcaacatttaactagataattgggcatgtcttaattatgcatgtacttatccatactaataaaattgacaatgctagtgcatacttattggtttagtcctattatcaggatataatcatctgtgaggaggatattttaaatactgtaaatgataacagttaatgatatacacatttagactgagttgcacactggcagggagaccaaaaacattacttccatacttgtgtcatgattctttttttttgagagagtctcactctgtcgccaggctggagtacagtggcatgatctcggctcactgcaacctctgcctcccgggttcaagcaattctcctgcctcagccacccaagtagctgggactacaggtgcgtgccaccacgcccagctaaattttgtatttttagtggagacggggtttcaccatgttggccaggatggtctcaatctcctgaccctgcgatctgcccacctcagcctcccaaagtgctgggattacaggcgtaagccaccgggcctggcctgttttatgattcttaatagttacttggtttaaatcacatttgatactatccttctgaaaagtctgagacagatctacaaactacagtcaaaattatagattaagaggaatgaatgcacctatttggctttaagttgaagatgaattatttctcatgctcattttcttgcggcagttatcttagaaagacccccaaaggctttgtgattgtaagcactgtcatgatcacagaatgcaagcttctggtaccatgatcctcaacttagagaggaagaaaccaagacagagagcttaactcacttctctcagggaaaattaggagttgagcacaggacaggaaatgggctttgccacttttagctccaggcttttctaaccagacttgatttcctcatgttctagaaagatcactaatggtcaagtggaacaagcactacacgactaacccctattggggtttttaacttaagggaggctaatttttaatttaaactgctcgagatatgagttctgcaaaaggtggtccgcatccttggccctctggacattatcactaaattgcttgtgcctgttaacaagaatactgaccagaatgctcttcatgtagcttatacagttggttcacttcatgcggttcttgacatgtttatttctacccttaatgcaatgaaatgtttcattaataaaaaaccactttatataaaa

SEQ ID NO: 72936 - DNA, 4925 bp, Homo sapiens
tgcctcgcggggttgcggcgagcccggcccgcgaacgtcacgtccctgcgcgctccctgcactctcccgagctgcgctaggcgggcgccacggctgcccggcgaaggaaaccgaaaccgagtccgggcccgtccctccgcggccccatccgcccggtgcacccggggtcgcgctcgccaggccgcggagcccagagctgcgcgcacgaaccgtgcgccgggagggcgtgggcgtggcgccgaagggtcccgggtcttcgacgcctctgcggcggctcctccctccttgcagttggatccctggcgggtgcggcccggcccggcccgtgagcggcgcacagaatgggccgatgctgcttctacacggcggggacgttgtccctgctcctgctggtgaccagcgtcacgctgctggtggcccgggtcttccagaaggctgtagaccagagtatcgagaagaaaattgtgttaaggaatggtactgaggcatttgactcctgggagaagccccctctgcctgtgtatactcagttctatttcttcaatgtcaccaatccagaggagatcctcagaggggagacccctcgggtggaagaagtggggccatacacctacagggaactcagaaacaaagcaaatattcaatttggagataatggaacaacaatatctgctgttagcaacaaggcctatgtttttgaacgagaccaatctgttggagaccctaaaattgacttaattagaacattaaatattcctgtattgactgtcatagagtggtcccaggtgcacttcctcagggagatcatcgaggccatgttgaaagcctatcagcagaagctctttgtgactcacacagttgacgaattgctctggggctacaaagatgaaatcttgtcccttatccatgttttcaggcccgatatctctccctattttggcctattctatgagaaaaatgggactaatgatggagactatgtttttctaactggagaagacagttaccttaactttacaaaaattgtggaatggaatgggaaaacgtcacttgactggtggataacagacaagtgcaatatgattaatggaacagatggagattcttttcacccactaataaccaaagatgaggtcctttatgtcttcccatctgacttttgcaggtcagtgtatattactttcagtgactatgagagtgtacagggactgcctgcctttcggtataaagttcctgcagaaatattagccaatacgtcagacaatgccggcttctgtatacctgagggaaactgcctgggctcaggagttctgaatgtcagcatctgcaagaatggtgcacccatcattatgtctttcccacacttttaccaagcagatgagaggtttgtttctgccatagaaggcatgcacccaaatcaggaagaccatgagacatttgtggacattaatcctttgactggaataatcctaaaagcagccaagaggttccaaatcaacatttatgtcaaaaaattagatgactttgttgaaacgggagacattagaaccatggttttcccagtgatgtacctcaatgagagtgttcacattgataaagagacggcgagtcgactgaagtctatgattaacactactttgatcatcaccaacataccctacatcatcatggcgctgggtgtgttctttggtttggtttttacctggcttgcatgcaaaggacagggatccatggatgagggaacagcggatgaaagagcacccctcattcgaacctaaacattgcctttgcttggtgaagaaactgtgtgagctgtcctgacctggacgatgacgtggggaaaccctccacctccttgcaggcttgttgcctgttgaaagaaggaaaaagacacggcgctggcaagtgataggaacattctggccagaggttaaagagcaggctgacatggctggccattaagctttataaaatcatgtgggctctgaaattgttcttttatgtgtctagcaagtatttaataaacccttgtatagtaattttgttgttgttgggtgctggtagctccagaattttgtgaccactattgtgggtaaaatgtctctgcatcacttgttaatgctactggtctaacttcattcagtatgcttcattcaccgaactttgtgctcaaaatgcgtatataccattttatgttgtattcctccatttcacttgcaaaacagaagtaaataagagttcgggacccagggtaaaatggtagcttcatccaatatatcattcaaatgcatctgatttctaaaacatattacattttatgctgatcttcagttcataattcttccaggaaaactcagtcttccaactgcaataaaatactgggtagaatcaaatgggaaaggggttgggtggggcaatacccatgagttgatagtgataagctcctaaggatttttaacttgtacttttgtgaacgaagagaatgcataaataatgttggtgaggataaagtacagatatttcatgtagaattaattgctagttatgatgcttgtggatagttaactgttttttttttagtcaaaatgatcatgctacgaaaagatgcttctgagagaatgtaatgagtaactgatttttcttcctgagtcgcccttgccaaatatgttactgtattaattaatctaatattgagtgattatttgtaaaattatgaatatgggaaatccatctatctacagcctaagttacacataagtttcagaaagtctgattagactaaagagatatttcttctgggacagccttcttcttggtaattttgaagttctttttacaagttccttcctcagtttcagttctttccagtgttttgtagctcactgtcactcactgaatagagaaacgtgtgccctatacttcctgtgacaatcattttgctgacagaatgatggatgtttaaaatattgcacaaagtactttaaagaaaggtctgttaggaccagaagcagagacaccacttttcaaaggacttcttggtttcagcataacctaagacagggaattgggagccatcatatgtcacagtgttcagaattcaagcatatttaagggcattttctttgattctcaaagttcagcattcattttgaattgagaagcctatacatttagctgacaaagtgcttatagaatttcttaacaactgaaccattcaaaaggattttttttgtttaaaactggatttcaatgtaagcaaatgaagaaaaaaatatagatttcatttccatagcttcttatccctgtattgaggtaataaattgttttactgacaatttttcctttttctacactaaaacaatatgtgatatatttcccctcttgaagaggcaattcattaaactctcaaattttctatagaatcaagatagaacctttagatactccaactcaccaaaatgtaaaaaaactaacaaaaatatttggtcttcaataatgctaaatatctacatttttagaatttatcaacatttaactagataattgggcatgtcttaattatgcatgtacttatccatactaataaaattgacaatgctagtgcatacttattggtttagtcctattatcaggatataatcatctgtgaggaggatattttaaatactgtaaatgataacagttaatgatatacacatttagactgagttgcacactggcagggagaccaaaaacattacttccatacttgtgtcatgattctttttttttgagagagtctcactctgtcgccaggctggagtacagtggcatgatctcggctcactgcaacctctgcctcccgggttcaagcaattctcctgcctcagccacccaagtagctgggactacaggtgcgtgccaccacgcccagctaaattttgtatttttagtggagacggggtttcaccatgttggccaggatggtctcaatctcctgaccctgcgatctgcccacctcagcctcccaaagtgctgggattacaggcgtaagccaccgggcctggcctgttttatgattcttaatagttacttggtttaaatcacatttgatactatccttctgaaaagtctgagacagatctacaaactacagtcaaaattatagattaagaggaatgaatgcacctatttggctttaagttgaagatgaattatttctcatgctcattttcttgcggcagttatcttagaaagacccccaaaggctttgtgattgtaagcactgtcatgatcacagaatgcaagcttctggtaccatgatcctcaacttagagaggaagaaaccaagacagagagcttaactcacttctctcagggaaaattaggagttgagcacaggacaggaaatgggctttgccacttttagctccaggcttttctaaccagacttgatttcctcatgttctagaaagatcactaatggtcaagtggaacaagcactacacgactaacccctattggggtttttaacttaagggaggctaatttttaatttaaactgctcgagatatgagttctgcaaaaggtggtccgcatccttggccctctggacattatcactaaattgcttgtgcctgttaacaagaatactgaccagaatgctcttcatgtagcttatacagttggttcacttcatgcggttcttgacatgtttatttctacccttaatgcaatgaaatgtttcattaataaaaaaccactttatataaaaaaaaaaaggggcggcaaagtacctcaaggccagttaagcgtacccgtttggaaagggcctaaggggggattaaacagccgccgcgtaaacgcgcgggacaggctcgcatttggagacctcgggggcatgcccccggtgcgaaatgtgagacccttggaagcggtaacaaaga

SEQ ID NO: 72937 - DNA, 5239 bp, Homo sapiens
  misc_feature (5100)..(5100): n is a, c, g, or t
  misc_feature (5142)..(5142): n is a, c, g, or t
tgcctcgcggggttgcggcgagcccggcccgcgaacgtcacgtccctgcgcgctccctgcactctcccgagctgcgctaggcgggcgccacggctgcccggcgaaggaaaccgaaaccgagtccgggcccgtccctccgcggccccatccgcccggtgcacccggggtcgcgctcgccaggccgcggagcccagagctgcgcgcacgaaccgtgcgccgggagggcgtgggcgtggcgccgaagggtcccgggtcttcgacgcctctgcggcggctcctccctccttgcagttggatccctggcgggtgcggcccggcccggcccgtgagcggcgcacagaatgggccgatgctgcttctacacggcggggacgttgtccctgctcctgctggtgaccagcgtcacgctgctggtggcccgggtcttccagaaggctgtagaccagagtatcgagaagaaaattgtgttaaggaatggtactgaggcatttgactcctgggagaagccccctctgcctgtgtatactcagttctatttcttcaatgtcaccaatccagaggagatcctcagaggggagacccctcgggtggaagaagtggggccatacacctacagggaactcagaaacaaagcaaatattcaatttggagataatggaacaacaatatctgctgttagcaacaaggcctatgtttttgaacgagaccaatctgttggagaccctaaaattgacttaattagaacattaaatattcctgtattgactgtcatagagtggtcccaggtgcacttcctcagggagatcatcgaggccatgttgaaagcctatcagcagaagctctttgtgactcacacagttgacgaattgctctggggctacaaagatgaaatcttgtcccttatccatgttttcaggcccgatatctctccctattttggcctattctatgagaaaaatgggactaatgatggagactatgtttttctaactggagaagacagttaccttaactttacaaaaattgtggaatggaatgggaaaacgtcacttgactggtggataacagacaagtgcaatatgattaatggaacagatggagattcttttcacccactaataaccaaagatgaggtcctttatgtcttcccatctgacttttgcaggtcagtgtatattactttcagtgactatgagagtgtacagggactgcctgcctttcggtataaagttcctgcagaaatattagccaatacgtcagacaatgccggcttctgtatacctgagggaaactgcctgggctcaggagttctgaatgtcagcatctgcaagaatggtgcacccatcattatgtctttcccacacttttaccaagcagatgagaggtttgtttctgccatagaaggcatgcacccaaatcaggaagaccatgagacatttgtggacattaatcctttgactggaataatcctaaaagcagccaagaggttccaaatcaacatttatgtcaaaaaattagatgactttgttgaaacgggagacattagaaccatggttttcccagtgatgtacctcaatgagagtgttcacattgataaagagacggcgagtcgactgaagtctatgattaacactactttgatcatcaccaacataccctacatcatcatggcgctgggtgtgttctttggtttggtttttacctggcttgcatgcaaaggacagggatccatggatgagggaacagcggatgaaagagcacccctcattcgaacctaaacattgcctttgcttggtgaagaaactgtgtgagctgtcctgacctggacgatgacgtggggaaaccctccacctccttgcaggcttgttgcctgttgaaagaaggaaaaagacacggcgctggcaagtgataggaacattctggccagaggttaaagagcaggctgacatggctggccattaagctttataaaatcatgtgggctctgaaattgttcttttatgtgtctagcaagtatttaataaacccttgtatagtaattttgttgttgttgggtgctggtagctccagaattttgtgaccactattgtgggtaaaatgtctctgcatcacttgttaatgctactggtctaacttcattcagtatgcttcattcaccgaactttgtgctcaaaatgcgtatataccattttatgttgtattcctccatttcacttgcaaaacagaagtaaataagagttcgggacccagggtaaaatggtagcttcatccaatatatcattcaaatgcatctgatttctaaaacatattacattttatgctgatcttcagttcataattcttccaggaaaactcagtcttccaactgcaataaaatactgggtagaatcaaatgggaaaggggttgggtggggcaatacccatgagttgatagtgataagctcctaaggatttttaacttgtacttttgtgaacgaagagaatgcataaataatgttggtgaggataaagtacagatatttcatgtagaattaattgctagttatgatgcttgtggatagttaactgttttttttttagtcaaaatgatcatgctacgaaaagatgcttctgagagaatgtaatgagtaactgatttttcttcctgagtcgcccttgccaaatatgttactgtattaattaatctaatattgagtgattatttgtaaaattatgaatatgggaaatccatctatctacagcctaagttacacataagtttcagaaagtctgattagactaaagagatatttcttctgggacagccttcttcttggtaattttgaagttctttttacaagttccttcctcagtttcagttctttccagtgttttgtagctcactgtcactcactgaatagagaaacgtgtgccctatacttcctgtgacaatcattttgctgacagaatgatggatgtttaaaatattgcacaaagtactttaaagaaaggtctgttaggaccagaagcagagacaccacttttcaaaggacttcttggtttcagcataacctaagacagggaattgggagccatcatatgtcacagtgttcagaattcaagcatatttaagggcattttctttgattctcaaagttcagcattcattttgaattgagaagcctatacatttagctgacaaagtgcttatagaatttcttaacaactgaaccattcaaaaggattttttttgtttaaaactggatttcaatgtaagcaaatgaagaaaaaaatatagatttcatttccatagcttcttatccctgtattgaggtaataaattgttttactgacaatttttcctttttctacactaaaacaatatgtgatatatttcccctcttgaagaggcaattcattaaactctcaaattttctatagaatcaagatagaacctttagatactccaactcaccaaaatgtaaaaaaactaacaaaaatatttggtcttcaataatgctaaatatctacatttttagaatttatcaacatttaactagataattgggcatgtcttaattatgcatgtacttatccatactaataaaattgacaatgctagtgcatacttattggtttagtcctattatcaggatataatcatctgtgaggaggatattttaaatactgtaaatgataacagttaatgatatacacatttagactgagttgcacactggcagggagaccaaaaacattacttccatacttgtgtcatgattctttttttttgagagagtctcactctgtcgccaggctggagtacagtggcatgatctcggctcactgcaacctctgcctcccgggttcaagcaattctcctgcctcagccacccaagtagctgggactacaggtgcgtgccaccacgcccagctaaattttgtatttttagtggagacggggtttcaccatgttggccaggatggtctcaatctcctgaccctgcgatctgcccacctcagcctcccaaagtgctgggattacaggcgtaagccaccgggcctggcctgttttatgattcttaatagttacttggtttaaatcacatttgatactatccttctgaaaagtctgagacagatctacaaactacagtcaaaattatagattaagaggaatgaatgcacctatttggctttaagttgaagatgaattatttctcatgctcattttcttgcggcagttatcttagaaagacccccaaaggctttgtgattgtaagcactgtcatgatcacagaatgcaagcttctggtaccatgatcctcaacttagagaggaagaaaccaagacagagagcttaactcacttctctcagggaaaattaggagttgagcacaggacaggaaatgggctttgccacttttagctccaggcttttctaaccagacttgatttcctcatgttctagaaagatcactaatggtcaagtggaacaagcactacacgactaacccctattggggtttttaacttaagggaggctaatttttaatttaaactgctcgagatatgagttctgcaaaaggtggtccgcatccttggccctctggacattatcactaaattgcttgtgcctgttaacaagaatactgaccagaatgctcttcatgtagcttatacagttggttcacttcatgcggttcttgacatgtttatttctacccttaatgcaatgaaatgtttcattaataaaaaaccactttatataaaaagacaacaggtgtgaaacgccacccacttcattgaatctttctctcataaatcaaaatctttattggaaggagtcagcaaattctctcaccttcatcacttccgggagaggagtaggagcaacatctatttacttctggcaggaggtaacgacacttcttcccatccctaggaactaggtaaaggcccactgatccttagaaagagttagacacgctgcctgtctggtcataggagggagtacaaatccttctgggttcaggacctcataccagtaataaggaagtgtccgctctttctgcaggaggggaaggctctcttctttggaatatctgccatagatatgangaagtttgactgctttgggagagcaggagtcagaatactcantaagctctacacacaggttccaatcatatagatcctacctgaggctgatgctgtaccagtagaacccaagagatccccataggtccccatgacgctt

SEQ ID NO: 72938 - DNA, 4707 bp, Homo sapiens
tgcctcgcggggttgcggcgagcccggcccgcgaacgtcacgtccctgcgcgctccctgcactctcccgagctgcgctaggcgggcgccacggctgcccggcgaaggaaaccgaaaccgagtccgggcccgtccctccgcggccccatccgcccggtgcacccggggtcgcgctcgccaggccgcggagcccagagctgcgcgcacgaaccgtgcgccgggagggcgtgggcgtggcgccgaagggtcccgggtcttcgacgcctctgcggcggctcctccctccttgcagttggatccctggcgggtgcggcccggcccggcccgtgagcggcgcacagaatgggccgatgctgcttctacacggcggggacgttgtccctgctcctgctggtgaccagcgtcacgctgctggtggcccgggtcttccagaaggctgtagaccagagtatcgagaagaaaattgtgttaaggaatggtactgaggcatttgactcctgggagaagccccctctgcctgtgtatactcagttctatttcttcaatgtcaccaatccagaggagatcctcagaggggagacccctcgggtggaagaagtggggccatacacctacagggaactcagaaacaaagcaaatattcaatttggagataatggaacaacaatatctgctgttagcaacaaggcctatgtttttgaacgagaccaatctgttggactgtcatagagtggtcccaggtgcacttcctcagggagatcatcgaggccatgttgaaagcctatcagcagaagctctttgtgactcacacagttgacgaattgctctggggctacaaagatgaaatcttgtcccttatccatgttttcaggcccgatatctctccctattttggcctattctatgagaaaaatgggactaatgatggagactatgtttttctaactggagaagacagttaccttaactttacaaaaattgtggaatggaatgggaaaacgtcacttgactggtggataacagacaagtgcaatatgattaatggaacagatggagattcttttcacccactaataaccaaagatgaggtcctttatgtcttcccatctgacttttgcaggtcagtgtatattactttcagtgactatgagagtgtacagggactgcctgcctttcggtataaagttcctgcagaaatattagccaatacgtcagacaatgccggcttctgtatacctgagggaaactgcctgggctcaggagttctgaatgtcagcatctgcaagaatggtgcacccatcattatgtctttcccacacttttaccaagcagatgagaggtttgtttctgccatagaaggcatgcacccaaatcaggaagaccatgagacatttgtggacattaatcctttgactggaataatcctaaaagcagccaagaggttccaaatcaacatttatgtcaaaaaattagatgactttgttgaaacgggagacattagaaccatggttttcccagtgatgtacctcaatgagagtgttcacattgataaagagacggcgagtcgactgaagtctatgattaacactactttgatcatcaccaacataccctacatcatcatggcgctgggtgtgttctttggtttggtttttacctggcttgcatgcaaaggacagggatccatggatgagggaacagcggatgaaagagcacccctcattcgaacctaaacattgcctttgcttggtgaagaaactgtgtgagctgtcctgacctggacgatgacgtggggaaaccctccacctccttgcaggcttgttgcctgttgaaagaaggaaaaagacacggcgctggcaagtgataggaacattctggccagaggttaaagagcaggctgacatggctggccattaagctttataaaatcatgtgggctctgaaattgttcttttatgtgtctagcaagtatttaataaacccttgtatagtaattttgttgttgttgggtgctggtagctccagaattttgtgaccactattgtgggtaaaatgtctctgcatcacttgttaatgctactggtctaacttcattcagtatgcttcattcaccgaactttgtgctcaaaatgcgtatataccattttatgttgtattcctccatttcacttgcaaaacagaagtaaataagagttcgggacccagggtaaaatggtagcttcatccaatatatcattcaaatgcatctgatttctaaaacatattacattttatgctgatcttcagttcataattcttccaggaaaactcagtcttccaactgcaataaaatactgggtagaatcaaatgggaaaggggttgggtggggcaatacccatgagttgatagtgataagctcctaaggatttttaacttgtacttttgtgaacgaagagaatgcataaataatgttggtgaggataaagtacagatatttcatgtagaattaattgctagttatgatgcttgtggatagttaactgttttttttttagtcaaaatgatcatgctacgaaaagatgcttctgagagaatgtaatgagtaactgatttttcttcctgagtcgcccttgccaaatatgttactgtattaattaatctaatattgagtgattatttgtaaaattatgaatatgggaaatccatctatctacagcctaagttacacataagtttcagaaagtctgattagactaaagagatatttcttctgggacagccttcttcttggtaattttgaagttctttttacaagttccttcctcagtttcagttctttccagtgttttgtagctcactgtcactcactgaatagagaaacgtgtgccctatacttcctgtgacaatcattttgctgacagaatgatggatgtttaaaatattgcacaaagtactttaaagaaaggtctgttaggaccagaagcagagacaccacttttcaaaggacttcttggtttcagcataacctaagacagggaattgggagccatcatatgtcacagtgttcagaattcaagcatatttaagggcattttctttgattctcaaagttcagcattcattttgaattgagaagcctatacatttagctgacaaagtgcttatagaatttcttaacaactgaaccattcaaaaggattttttttgtttaaaactggatttcaatgtaagcaaatgaagaaaaaaatatagatttcatttccatagcttcttatccctgtattgaggtaataaattgttttactgacaatttttcctttttctacactaaaacaatatgtgatatatttcccctcttgaagaggcaattcattaaactctcaaattttctatagaatcaagatagaacctttagatactccaactcaccaaaatgtaaaaaaactaacaaaaatatttggtcttcaataatgctaaatatctacatttttagaatttatcaacatttaactagataattgggcatgtcttaattatgcatgtacttatccatactaataaaattgacaatgctagtgcatacttattggtttagtcctattatcaggatataatcatctgtgaggaggatattttaaatactgtaaatgataacagttaatgatatacacatttagactgagttgcacactggcagggagaccaaaaacattacttccatacttgtgtcatgattctttttttttgagagagtctcactctgtcgccaggctggagtacagtggcatgatctcggctcactgcaacctctgcctcccgggttcaagcaattctcctgcctcagccacccaagtagctgggactacaggtgcgtgccaccacgcccagctaaattttgtatttttagtggagacggggtttcaccatgttggccaggatggtctcaatctcctgaccctgcgatctgcccacctcagcctcccaaagtgctgggattacaggcgtaagccaccgggcctggcctgttttatgattcttaatagttacttggtttaaatcacatttgatactatccttctgaaaagtctgagacagatctacaaactacagtcaaaattatagattaagaggaatgaatgcacctatttggctttaagttgaagatgaattatttctcatgctcattttcttgcggcagttatcttagaaagacccccaaaggctttgtgattgtaagcactgtcatgatcacagaatgcaagcttctggtaccatgatcctcaacttagagaggaagaaaccaagacagagagcttaactcacttctctcagggaaaattaggagttgagcacaggacaggaaatgggctttgccacttttagctccaggcttttctaaccagacttgatttcctcatgttctagaaagatcactaatggtcaagtggaacaagcactacacgactaacccctattggggtttttaacttaagggaggctaatttttaatttaaactgctcgagatatgagttctgcaaaaggtggtccgcatccttggccctctggacattatcactaaattgcttgtgcctgttaacaagaatactgaccagaatgctcttcatgtagcttatacagttggttcacttcatgcggttcttgacatgtttatttctacccttaatgcaatgaaatgtttcattaataaaaaaccactttatataaaa

SEQ ID NO: 72939 - DNA, 3870 bp, Homo sapiens
tgcctcgcggggttgcggcgagcccggcccgcgaacgtcacgtccctgcgcgctccctgcactctcccgagctgcgctaggcgggcgccacggctgcccggcgaaggaaaccgaaaccgagtccgggcccgtccctccgcggccccatccgcccggtgcacccggggtcgcgctcgccaggccgcggagcccagagctgcgcgcacgaaccgtgcgccgggagggcgtgggcgtggcgccgaagggtcccgggtcttcgacgcctctgcggcggctcctccctccttgcagttggatccctggcgggtgcggcccggcccggcccgtgagcggcgcacagaatgggccgatgctgcttctacacggcggggacgttgtccctgctcctgctggtgaccagcgtcacgctgctggtggcccgggtcttccagaaggctgtagaccagagtatcgagaagaaaattgtgttaaggaatggtactgaggcatttgactcctgggagaagccccctctgcctgtgtatactcagttctatttcttcaatgtcaccaatccagaggagatcctcagaggggagacccctcgggtggaagaagtggggccatacacctacagggaactcagaaacaaagcaaatattcaatttggagataatggaacaacaatatctgctgttagcaacaaggcctatgtttttgaacgagaccaatctgttggagaccctaaaattgacttaattagaacattaaatattcctgtattgactgtcatagagtggtcccaggtgcacttcctcagggagatcatcgaggccatgttgaaagcctatcagcagaagctctttgtgactcacacagttgacgaattgctctggggctacaaagatgaaatcttgtcccttatccatgttttcaggcccgatatctctccctattttggcctattctatgagaaaaatgggactaatgatggagactatgtttttctaactggagaagacagttaccttaactttacaaaaattgtggaatggaatgggaaaacgtcacttgactggtggataacagacaagtgcaatatgattaatggaacagatggagattcttttcacccactaataaccaaagatgaggtcctttatgtcttcccatctgacttttgcaggtcagtgtatattactttcagtgactatgagagtgtacagggactgcctgcctttcggtataaagttcctgcagaaatattagccaatacgtcagacaatgccggcttctgtatacctgagggaaactgcctgggctcaggagttctgaatgtcagcatctgcaagaatggtgcacccatcattatgtctttcccacacttttaccaagcagatgagaggtttgtttctgccatagaaggcatgcacccaaatcaggaagaccatgagacatttgtggacattaatcctttgactggaataatcctaaaagcagccaagaggttccaaatcaacatttatgtcaaaaaattagatgactttgttgaaacgggagacattagaaccatggttttcccagtgatgtacctcaatgagagtgttcacattgataaagagacggcgagtcgactgaagtctatgattaacactactttgatcatcaccaacataccctacatcatcatggcgctgggtgtgttctttggtttggtttttacctggcttgcatgcaaaggacagggatccatggatgagggaacagcggatgaaagagcacccctcattcgaacctaaacattgcctttgcttggtgaagaaactgtgtgagctgtcctgacctggacgatgacgtggggaaaccctccacctccttgcaggcttgttgcctgttgaaagaaggaaaaagacacggcgctggcaagtgataggaacattctggccagaggttaaagagcaggctgacatggctggccattaagctttataaaatcatgtgggctctgaaattgttcttttatgtgtctagcaagtatttaataaacccttgtatagtaattttgttgttgttgggtgctggtagctccagaattttgtgaccactattgtgggtaaaatgtctctgcatcacttgttaatgctactggtctaacttcattcagtatgcttcattcaccgaactttgtgctcaaaatgcgtatataccattttatgttgtattcctccatttcacttgcaaaacagaagtaaataagagttcgggacccagggtaaaatggtagcttcatccaatatatcattcaaatgcatctgatttctaaaacatattacattttatgctgatcttcagttcataattcttccaggaaaactcagtcttccaactgcaataaaatactgggtagaatcaaatgggaaaggggttgggtggggcaatacccatgagttgatagtgataagctcctaaggatttttaacttgtacttttgtgaacgaagagaatgcataaataatgttggtgaggataaagtacagatatttcatgtagaattaattgctagttatgatgcttgtggatagttaactgttttttttttagtcaaaatgatcatgctacgaaaagatgcttctgagagaatgtaatgagtaactgatttttcttcctgagtcgcccttgccaaatatgttactgtattaattaatctaatattgagtgattatttgtaaaattatgaatatgggaaatccatctatctacagcctaagttacacataagtttcagaaagtctgattagactaaagagatatttcttctgggacagccttcttcttggtaattttgaagttctttttacaagttccttcctcagtttcagttctttccagtgttttgtagctcactgtcactcactgaatagagaaacgtgtgccctatacttcctgtgacaatcattttgctgacagaatgatggatgtttaaaatattgcacaaagtactttaaagaaaggtctgttaggaccagaagcagagacaccacttttcaaaggacttcttggtttcagcataacctaagacagggaattgggagccatcatatgtcacagtgttcagaattcaagcatatttaagggcattttctttgattctcaaagttcagcattcattttgaattgagaagcctatacatttagctgacaaagtgcttatagaatttcttaacaactgaaccattcaaaaggattttttttgtttaaaactggatttcaatgtaagcaaatgaagaaaaaaatatagatttcatttccatagcttcttatccctgtattgaggtaataaattgttttactgacaatttttcctttttctacactaaaacaatatgtgatatatttcccctcttgaagaggcaattcattaaactctcaaattttctatagaatcaagatagaacctttagatactccaactcaccaaaatgtaaaaaaactaacaaaaatatttggtcttcaataatgctaaatatctacatttttagaatttatcaacatttaactagataattgggcatgtcttaattatgcatgtacttatccatactaataaaattgacaatgctagtgcatacttattggtttagtcctattatcaggatataatcatctgtgaggaggatattttaaatactgtaaatgataacagttaatgatatacacatttagactgagttgcacactggcagggagaccaaaaacattacttccatacttgtgtcatgattctttttttttgagagagtctcactctgtcgccaggctggagtacagtgagctgagatcgtgccattctactccagcctgggtgacagtgcgagactctgtctcaaaaaa

SEQ ID NO: 72940 - DNA, 3882 bp, Homo sapiens
  misc_feature (55)..(55): n is a, c, g, or t
agaaatatttatttatgacaattgcgaaaaaaaagaaaaaggtttaaggagaacngactctcttcttgaaccggcgaaacagaaaaatgggactaatgatggagactatgtttttctaactggagaagacagttaccttaactttacaaaaattgtggaatggaatgggaaaacgtcacttgactggtggataacagacaagtgcaatatgattaatggaacagatggagattcttttcacccactaataaccaaagatgaggtcctttatgtcttcccatctgacttttgcaggtcagtgtatattactttcagtgactatgagagtgtacagggactgcctgcctttcggtataaagttcctgcagaaatattagccaatacgtcagacaatgccggcttctgtatacctgagggaaactgcctgggctcaggagttctgaatgtcagcatctgcaagaatggtgcacccatcattatgtctttcccacacttttaccaagcagatgagaggtttgtttctgccatagaaggcatgcacccaaatcaggaagaccatgagacatttgtggacattaatcctttgactggaataatcctaaaagcagccaagaggttccaaatcaacatttatgtcaaaaaattagatgactttgttgaaacgggagacattagaaccatggttttcccagtgatgtacctcaatgagagtgttcacattgataaagagacggcgagtcgactgaagtctatgattaacactactttgatcatcaccaacataccctacatcatcatggcgctgggtgtgttctttggtttggtttttacctggcttgcatgcaaaggacagggatccatggatgagggaacagcggatgaaagagcacccctcattcgaacctaaacattgcctttgcttggtgaagaaactgtgtgagctgtcctgacctggacgatgacgtggggaaaccctccacctccttgcaggcttgttgcctgttgaaagaaggaaaaagacacggcgctggcaagtgataggaacattctggccagaggttaaagagcaggctgacatggctggccattaagctttataaaatcatgtgggctctgaaattgttcttttatgtgtctagcaagtatttaataaacccttgtatagtaattttgttgttgttgggtgctggtagctccagaattttgtgaccactattgtgggtaaaatgtctctgcatcacttgttaatgctactggtctaacttcattcagtatgcttcattcaccgaactttgtgctcaaaatgcgtatataccattttatgttgtattcctccatttcacttgcaaaacagaagtaaataagagttcgggacccagggtaaaatggtagcttcatccaatatatcattcaaatgcatctgatttctaaaacatattacattttatgctgatcttcagttcataattcttccaggaaaactcagtcttccaactgcaataaaatactgggtagaatcaaatgggaaaggggttgggtggggcaatacccatgagttgatagtgataagctcctaaggatttttaacttgtacttttgtgaacgaagagaatgcataaataatgttggtgaggataaagtacagatatttcatgtagaattaattgctagttatgatgcttgtggatagttaactgttttttttttagtcaaaatgatcatgctacgaaaagatgcttctgagagaatgtaatgagtaactgatttttcttcctgagtcgcccttgccaaatatgttactgtattaattaatctaatattgagtgattatttgtaaaattatgaatatgggaaatccatctatctacagcctaagttacacataagtttcagaaagtctgattagactaaagagatatttcttctgggacagccttcttcttggtaattttgaagttctttttacaagttccttcctcagtttcagttctttccagtgttttgtagctcactgtcactcactgaatagagaaacgtgtgccctatacttcctgtgacaatcattttgctgacagaatgatggatgtttaaaatattgcacaaagtactttaaagaaaggtctgttaggaccagaagcagagacaccacttttcaaaggacttcttggtttcagcataacctaagacagggaattgggagccatcatatgtcacagtgttcagaattcaagcatatttaagggcattttctttgattctcaaagttcagcattcattttgaattgagaagcctatacatttagctgacaaagtgcttatagaatttcttaacaactgaaccattcaaaaggattttttttgtttaaaactggatttcaatgtaagcaaatgaagaaaaaaatatagatttcatttccatagcttcttatccctgtattgaggtaataaattgttttactgacaatttttcctttttctacactaaaacaatatgtgatatatttcccctcttgaagaggcaattcattaaactctcaaattttctatagaatcaagatagaacctttagatactccaactcaccaaaatgtaaaaaaactaacaaaaatatttggtcttcaataatgctaaatatctacatttttagaatttatcaacatttaactagataattgggcatgtcttaattatgcatgtacttatccatactaataaaattgacaatgctagtgcatacttattggtttagtcctattatcaggatataatcatctgtgaggaggatattttaaatactgtaaatgataacagttaatgatatacacatttagactgagttgcacactggcagggagaccaaaaacattacttccatacttgtgtcatgattctttttttttgagagagtctcactctgtcgccaggctggagtacagtggcatgatctcggctcactgcaacctctgcctcccgggttcaagcaattctcctgcctcagccacccaagtagctgggactacaggtgcgtgccaccacgcccagctaaattttgtatttttagtggagacggggtttcaccatgttggccaggatggtctcaatctcctgaccctgcgatctgcccacctcagcctcccaaagtgctgggattacaggcgtaagccaccgggcctggcctgttttatgattcttaatagttacttggtttaaatcacatttgatactatccttctgaaaagtctgagacagatctacaaactacagtcaaaattatagattaagaggaatgaatgcacctatttggctttaagttgaagatgaattatttctcatgctcattttcttgcggcagttatcttagaaagacccccaaaggctttgtgattgtaagcactgtcatgatcacagaatgcaagcttctggtaccatgatcctcaacttagagaggaagaaaccaagacagagagcttaactcacttctctcagggaaaattaggagttgagcacaggacaggaaatgggctttgccacttttagctccaggcttttctaaccagacttgatttcctcatgttctagaaagatcactaatggtcaagtggaacaagcactacacgactaacccctattggggtttttaacttaagggaggctaatttttaatttaaactgctcgagatatgagttctgcaaaaggtggtccgcatccttggccctctggacattatcactaaattgcttgtgcctgttaacaagaatactgaccagaatgctcttcatgtagcttatacagttggttcacttcatgcggttcttgacatgtttatttctacccttaatgcaatgaaatgtttcattaataaaaaaccactttatataaaa

SEQ ID NO: 72941 - DNA, 2867 bp, Homo sapiens
tgcctcgcggggttgcggcgagcccggcccgcgaacgtcacgtccctgcgcgctccctgcactctcccgagctgcgctaggcgggcgccacggctgcccggcgaaggaaaccgaaaccgagtccgggcccgtccctccgcggccccatccgcccggtgcacccggggtcgcgctcgccaggccgcggagcccagagctgcgcgcacgaaccgtgcgccgggagggcgtgggcgtggcgccgaagggtcccgggtcttcgacgcctctgcggcggctcctccctccttgcagttggatccctggcgggtgcggcccggcccggcccgtgagcggcgcacagaatgggccgatgctgcttctacacggcggggacgttgtccctgctcctgctggtgaccagcgtcacgctgctggtggcccgggtcttccagaaggctgtagaccagagtatcgagaagaaaattgtgttaaggaatggtactgaggcatttgactcctgggagaagccccctctgcctgtgtatactcagttctatttcttcaatgtcaccaatccagaggagatcctcagaggggagacccctcgggtggaagaagtggggccatacacctacagggaactcagaaacaaagcaaatattcaatttggagataatggaacaacaatatctgctgttagcaacaaggcctatgtttttgaacgagaccaatctgttggagaccctaaaattgacttaattagaacattaaatattcctgtattgactgtcatagagtggtcccaggtgcacttcctcagggagatcatcgaggccatgttgaaagcctatcagcagaagctctttgtgactcacacagttgacgaattgctctggggctacaaagatgaaatcttgtcccttatccatgttttcaggcccgatatctctccctattttggcctattctatgagaaaaatgggactaatgatggagactatgtttttctaactggagaagacagttaccttaactttacaaaaattgtggaatggaatgggaaaacgtcacttgactggtggataacagacaagtgcaatatgattaatggaacagatggagattcttttcacccactaataaccaaagatgaggtcctttatgtcttcccatctgacttttgcaggtcagtgtatattactttcagtgactatgagagtgtacagggactgcctgcctttcggtataaagttcctgcagaaatattagccaatacgtcagacaatgccggcttctgtatacctgagggaaactgcctgggctcaggagttctgaatgtcagcatctgcaagaatggtgcacccatcattatgtctttcccacacttttaccaagcagatgagaggtttgtttctgccatagaaggcatgcacccaaatcaggaagaccatgagacatttgtggacattaatcctttgactggaataatcctaaaagcagccaagaggttccaaatcaacatttatgtcaaaaaattagatgactttgttgaaacgggagacattagaaccatggttttcccagtgatgtacctcaatgagagtgttcacattgataaagagacggcgagtcgactgaagtctatgattaacactactttgatcatcaccaacataccctacatcatcatggcgctgggtgtgttctttggtttggtttttacctggcttgcatgcaaaggacagggatccatggatgagggaacagcggatgaaagagcacccctcattcgaacctaaacattgcctttgcttggtgaagaaactgtgtgagctgtcctgacctggacgatgacgtggggaaaccctccacctccttgcaggcttgttgcctgttgaaagaaggaaaaagacacggcgctggcaagtgataggaacattctggccagaggttaaagagcaggctgacatggctggccattaagctttataaaatcatgtgggctctgaaattgttcttttatgtgtctagcaagtatttaataaacccttgtatagtaattttgttgttgttgggtgctggtagctccagaattttgtgaccactattgtgggtaaaatgtctctgcatcacttgttaatgctactggtctaacttcattcagtatgcttcattcaccgaactttgtgctcaaaatgcgtatataccattttatgttgtattcctccatttcacttgcaaaacagaagtaaataagagttcgggacccagggtaaaatggtagcttcatccaatatatcattcaaatgcatctgatttctaaaacatattacattttatgctgatcttcagttcataattcttccaggaaaactcagtcttccaactgcaataaaatactgggtagaatcaaatgggaaaggggttgggtggggcaatacccatgagttgatagtgataagctcctaaggatttttaatcacttctctcagggaaaattaggagttgagcacaggacaggaaatgggctttgccacttttagctccaggcttttctaaccagacttgatttcctcatgttctagaaagatcactaatggtcaagtggaacaagcactacacgactaacccctattggggtttttaacttaagggaggctaatttttaatttaaactgctcgagatatgagttctgcaaaaggtggtccgcatccttggccctctggacattatcactaaattgcttgtgcctgttaacaagaatactgaccagaatgctcttcatgtagcttatacagttggttcacttcatgcggttcttgacatgtttatttctacccttaatgcaatgaaatgtttcattaataaaaaaccactttatataaaa

SEQ ID NO: 72942 - DNA, 4728 bp, Homo sapiens
  misc_feature (817)..(817): n is a, c, g, or t
  misc_feature (1018)..(1018): n is a, c, g, or t
  misc_feature (1033)..(1033): n is a, c, g, or t
aaaatacttagcccagggcccatcacacagtaaccaatattaagtgttggctcttagttactatgatatgctctgtcaagcatcaactgacctggtctacttccagtcaataggtagtctctacatggaagccaaataaaagatactgttgtccatatttcagcagagtggtttcctcaggggaggcagagaaggaatggaatcaagagcattacgtagacaggttcagttatatccataatataatttttatttgtctaagtggcagatacaaaggtatttgttagagtattttatctctttctggtgcctaaaatttttcattaaaaaatgctgtaggggtggtttggtttgtgcagtgaaaccacctatgttattcacaaccttgcgagagatgtatcaacagctctggttcagagatgaaaaagtgaggcccagaaggctcttccggccagccttcaaaggaagggctgaaggctcagtggtgactgtgtacatcaaagtggttaggcactatgcagtgtaagcagtggtcatattacatgggactatgtttgaaatcagtaagaatgaaaggcagaataacgttgaactccatttaaataaatgactggggcaaaatatggaatctgatttttcttggagggggggattgagtatcaaagtgtgtattccaataaagtatctgtccaatgtgacacttttcaagtgcctaagaccctacgaggccacggccatcgctgcctgttctaccttagctttggctctgccgtgccctggcttccctggctttgccggtggcccgtccacactggcntatgtccatgcaggtctagagaggcctcttatttcttttttatgtgagtctccattctaaatgttatcatcttaattttgtaccacatattgttttttcttgtttggatgatatcaccgttgctacaataaacaccttccactacaattcatcttctgctttattacacgttgagttgacagaatgccttccaaacattcntttctacttaccctntgagcttttggccatgttgtacctgagaactgttgctaacttgcggatttcgggcagattacactgaccagagtccacattcactttttattcttacatcctaacaggtcagtgtatattactttcagtgactatgagagtgtacagggactgcctgcctttcggtataaagttcctgcagaaatattagccaatacgtcagacaatgccggcttctgtatacctgagggaaactgcctgggctcaggagttctgaatgtcagcatctgcaagaatggtgcacccatcattatgtctttcccacacttttaccaagcagatgagaggtttgtttctgccatagaaggcatgcacccaaatcaggaagaccatgagacatttgtggacattaatcctttgactggaataatcctaaaagcagccaagaggttccaaatcaacatttatgtcaaaaaattagatgactttgttgaaacgggagacattagaaccatggttttcccagtgatgtacctcaatgagagtgttcacattgataaagagacggcgagtcgactgaagtctatgattaacactactttgatcatcaccaacataccctacatcatcatggcgctgggtgtgttctttggtttggtttttacctggcttgcatgcaaaggacagggatccatggatgagggaacagcggatgaaagagcacccctcattcgaacctaaacattgcctttgcttggtgaagaaactgtgtgagctgtcctgacctggacgatgacgtggggaaaccctccacctccttgcaggcttgttgcctgttgaaagaaggaaaaagacacggcgctggcaagtgataggaacattctggccagaggttaaagagcaggctgacatggctggccattaagctttataaaatcatgtgggctctgaaattgttcttttatgtgtctagcaagtatttaataaacccttgtatagtaattttgttgttgttgggtgctggtagctccagaattttgtgaccactattgtgggtaaaatgtctctgcatcacttgttaatgctactggtctaacttcattcagtatgcttcattcaccgaactttgtgctcaaaatgcgtatataccattttatgttgtattcctccatttcacttgcaaaacagaagtaaataagagttcgggacccagggtaaaatggtagcttcatccaatatatcattcaaatgcatctgatttctaaaacatattacattttatgctgatcttcagttcataattcttccaggaaaactcagtcttccaactgcaataaaatactgggtagaatcaaatgggaaaggggttgggtggggcaatacccatgagttgatagtgataagctcctaaggatttttaacttgtacttttgtgaacgaagagaatgcataaataatgttggtgaggataaagtacagatatttcatgtagaattaattgctagttatgatgcttgtggatagttaactgttttttttttagtcaaaatgatcatgctacgaaaagatgcttctgagagaatgtaatgagtaactgatttttcttcctgagtcgcccttgccaaatatgttactgtattaattaatctaatattgagtgattatttgtaaaattatgaatatgggaaatccatctatctacagcctaagttacacataagtttcagaaagtctgattagactaaagagatatttcttctgggacagccttcttcttggtaattttgaagttctttttacaagttccttcctcagtttcagttctttccagtgttttgtagctcactgtcactcactgaatagagaaacgtgtgccctatacttcctgtgacaatcattttgctgacagaatgatggatgtttaaaatattgcacaaagtactttaaagaaaggtctgttaggaccagaagcagagacaccacttttcaaaggacttcttggtttcagcataacctaagacagggaattgggagccatcatatgtcacagtgttcagaattcaagcatatttaagggcattttctttgattctcaaagttcagcattcattttgaattgagaagcctatacatttagctgacaaagtgcttatagaatttcttaacaactgaaccattcaaaaggattttttttgtttaaaactggatttcaatgtaagcaaatgaagaaaaaaatatagatttcatttccatagcttcttatccctgtattgaggtaataaattgttttactgacaatttttcctttttctacactaaaacaatatgtgatatatttcccctcttgaagaggcaattcattaaactctcaaattttctatagaatcaagatagaacctttagatactccaactcaccaaaatgtaaaaaaactaacaaaaatatttggtcttcaataatgctaaatatctacatttttagaatttatcaacatttaactagataattgggcatgtcttaattatgcatgtacttatccatactaataaaattgacaatgctagtgcatacttattggtttagtcctattatcaggatataatcatctgtgaggaggatattttaaatactgtaaatgataacagttaatgatatacacatttagactgagttgcacactggcagggagaccaaaaacattacttccatacttgtgtcatgattctttttttttgagagagtctcactctgtcgccaggctggagtacagtggcatgatctcggctcactgcaacctctgcctcccgggttcaagcaattctcctgcctcagccacccaagtagctgggactacaggtgcgtgccaccacgcccagctaaattttgtatttttagtggagacggggtttcaccatgttggccaggatggtctcaatctcctgaccctgcgatctgcccacctcagcctcccaaagtgctgggattacaggcgtaagccaccgggcctggcctgttttatgattcttaatagttacttggtttaaatcacatttgatactatccttctgaaaagtctgagacagatctacaaactacagtcaaaattatagattaagaggaatgaatgcacctatttggctttaagttgaagatgaattatttctcatgctcattttcttgcggcagttatcttagaaagacccccaaaggctttgtgattgtaagcactgtcatgatcacagaatgcaagcttctggtaccatgatcctcaacttagagaggaagaaaccaagacagagagcttaactcacttctctcagggaaaattaggagttgagcacaggacaggaaatgggctttgccacttttagctccaggcttttctaaccagacttgatttcctcatgttctagaaagatcactaatggtcaagtggaacaagcactacacgactaacccctattggggtttttaacttaagggaggctaatttttaatttaaactgctcgagatatgagttctgcaaaaggtggtccgcatccttggccctctggacattatcactaaattgcttgtgcctgttaacaagaatactgaccagaatgctcttcatgtagcttatacagttggttcacttcatgcggttcttgacatgtttatttctacccttaatgcaatgaaatgtttcattaataaaaaaccactttatataaaa

SEQ ID NO: 72943 - DNA, 2039 bp, Homo sapiens
tgcctcgcggggttgcggcgagcccggcccgcgaacgtcacgtccctgcgcgctccctgcactctcccgagctgcgctaggcgggcgccacggctgcccggcgaaggaaaccgaaaccgagtccgggcccgtccctccgcggccccatccgcccggtgcacccggggtcgcgctcgccaggccgcggagcccagagctgcgcgcacgaaccgtgcgccgggagggcgtgggcgtggcgccgaagggtcccgggtcttcgacgcctctgcggcggctcctccctccttgcagttggatccctggcgggtgcggcccggcccggcccgtgagcggcgcacagaatgggccgatgctgcttctacacggcggggacgttgtccctgctcctgctggtgaccagcgtcacgctgctggtggcccgggtcttccagaaggctgtagaccagagtatcgagaagaaaattgtgttaaggaatggtactgaggcatttgactcctgggagaagccccctctgcctgtgtatactcagttctatttcttcaatgtcaccaatccagaggagatcctcagaggggagacccctcgggtggaagaagtggggccatacacctacagggaactcagaaacaaagcaaatattcaatttggagataatggaacaacaatatctgctgttagcaacaaggcctatgtttttgaacgagaccaatctgttggagaccctaaaattgacttaattagaacattaaatattcctgtattgactgtcatagagtggtcccaggtgcacttcctcagggagatcatcgaggccatgttgaaagcctatcagcagaagctctttgtgactcacacagttgacgaattgctctggggctacaaagatgaaatcttgtcccttatccatgttttcaggcccgatatctctccctattttggcctattctatgagaaaaatgggactaatgatggagactatgtttttctaactggagaagacagttaccttaactttacaaaaattgtggaatggaatgggaaaacgtcacttgactggtggataacagacaagtgcaatatgattaatggaacagatggagattcttttcacccactaataaccaaagatgaggtcctttatgtcttcccatctgacttttgcaggtcagtgtatattactttcagtgactatgagagtgtacagggactgcctgcctttcggtataaagttcctgcagaaatattagccaatacgtcagacaatgccggcttctgtatacctgagggaaactgcctgggctcaggagttctgaatgtcagcatctgcaagaatggtgcacccatcattatgtctttcccacacttttaccaagcagatgagaggtttgtttctgccatagaaggcatgcacccaaatcaggaagaccatgagacatttgtggacattaatcctttgactggaataatcctaaaagcagccaagaggttccaaatcaacatttatgtcaaaaaattagatgactttgttgaaacgggagacattagaaccatggttttcccagtgatgtacctcaatgagagtgttcacattgataaagagacggcgagtcgactgaagtctatgattaacactactttgatcatcaccaacataccctacatcatcatggcgctgggtgtgttctttggtttggtttttacctggcttgcatgcaaaggacagggatccatggatgagggaacagcggatgaaagagcacccctcattcgaacctaaacattgcctttgcttggtgaagaaactgtgtgagctgtcctgacctggacgatgacgtggggaaaccctccacctccttgcaggcttgttgcctgttgaaagaaggaaaaagacacggcgctggcaagtgataggaacattctggccagaggttaaagagcaggctgacatggctggccattaagctttataaaatcatgtgggctctgaaattgttcttttatgtgtctagcaagtatttaataaacccttgtatagtaa

SEQ ID NO: 72944 - DNA, 2177 bp, Homo sapiens
tgcctcgcggggttgcggcgagcccggcccgcgaacgtcacgtccctgcgcgctccctgcactctcccgagctgcgctaggcgggcgccacggctgcccggcgaaggaaaccgaaaccgagtccgggcccgtccctccgcggccccatccgcccggtgcacccggggtcgcgctcgccaggccgcggagcccagagctgcgcgcacgaaccgtgcgccgggagggcgtgggcgtggcgccgaagggtcccgggtcttcgacgcctctgcggcggctcctccctccttgcagttggatccctggcgggtgcggcccggcccggcccgtgagcggcgcacagaatgggccgatgctgcttctacacggcggggacgttgtccctgctcctgctggtgaccagcgtcacgctgctggtggcccgggtcttccagaaggctgtagaccagagtatcgagaagaaaattgtgttaaggaatggtactgaggcatttgactcctgggagaagccccctctgcctgtgtatactcagttctatttcttcaatgtcaccaatccagaggagatcctcagaggggagacccctcgggtggaagaagtggggccatacacctacagggaactcagaaacaaagcaaatattcaatttggagataatggaacaacaatatctgctgttagcaacaaggcctatgtttttgaacgagaccaatctgttggagaccctaaaattgacttaattagaacattaaatattcctgtattgactgtcatagagtggtcccaggtgcacttcctcagggagatcatcgaggccatgttgaaagcctatcagcagaagctctttgtgactcacacagttgacgaattgctctggggctacaaagatgaaatcttgtcccttatccatgttttcaggcccgatatctctccctattttggcctattctatgagaaaaatgggactaatgatggagactatgtttttctaactggagaagacagttaccttaactttacaaaaattgtggaatggaatgggaaaacgtcacttgactggtggataacagacaagtgcaatatgattaatggaacagatggagattcttttcacccactaataaccaaagatgaggtcctttatgtcttcccatctgacttttgcaggtcagtgtatattactttcagtgactatgagagtgtacagggactgcctgcctttcggtataaagttcctgcagaaatattagccaatacgtcagacaatgccggcttctgtatacctgagggaaactgcctgggctcaggagttctgaatgtcagcatctgcaagaatggtgcacccatcattatgtctttcccacacttttaccaagcagatgagaggtttgtttctgccatagaaggcatgcacccaaatcaggaagaccatgagacatttgtggacattaatcctttgactggaataatcctaaaagcagccaagaggttccaaatcaacatttatgtcaaaaaattagatgactttgttgaaacgggagacattagaaccatggttttcccagtgatgtacctcaatgagagtgttcacattgataaagagacggcgagtcgactgaagtctatgattaacactactttgatcatcaccaacataccctacatcatcatggcgctgggtgtgttctttggtttggtttttacctggcttgcatgcaaaggacagggatccatggatgagggaacagcggatgaaagagcacccctcattcgaacctaaacattgcctttgcttggtgaagaaactgtgtgagctgtcctgacctggacgatgacgtggggaaaccctccacctccttgcaggcttgttgcctgttgaaagaaggaaaaagacacggcgctggcaagtgataggaacattctggccagaggttaaagagcaggctgacatggctggccattaagctctaccctcagctccaccctcagcggatgataatctcaagacacgtgccgagtgtctgctccatccccttccaccctcagcggatgataatctcaagacaccttccgagcgtcagctcactccccttccaccctcagctccaccctcagcagatgataatatcaagacacctgccgagcgtctgcgggggccgcttccaccctcagcggatga

SEQ ID NO: 72945 - DNA, 812 bp, Homo sapiens
tgcgattgcacaacctccgctcactgcagcctcgacctcacagactgaagcaatcccccgtcgaccggtcgacctgggattacaggcgtaagccaccgggcctggcctgttttatgattcttaatagttacttggtttaaatcacatttgatactatccttctgaaaagtctgagacagatctacaaactacagtcaaaattatagattaagaggaatgaatgcacctatttggctttaagttgaagatgaattatttctcatgctcattttcttgcggcagttatcttagaaagacccccaaaggctttgtgattgtaagcactgtcatgatcacagaatgcaagcttctggtaccatgatcctcaacttagagaggaagaaaccaagacagagagcttaactcacttctctcagggaaaattaggagttgagcacaggacaggaaatgggctttgccacttttagctccaggcttttctaaccagacttgatttcctcatgttctagaaagatcactaatggtcaagtggaacaagcactacacgactaacccctattggggtttttaacttaagggaggctaatttttaatttaaactgctcgagatatgagttctgcaaaaggtggtccgcatccttggccctctggacattatcactaaattgcttgtgcctgttaacaagaatactgaccagaatgctcttcatgtagcttatacagttggttcacttcatgcggttcttgacatgtttatttctacccttaatgcaatgaaatgtttcattaataaaaaaccactttatataaaa

SEQ ID NO: 72946 - DNA, 2777 bp, Homo sapiens
  misc_feature (1361)..(1361): n is a, c, g, or t
  misc_feature (1417)..(1417): n is a, c, g, or t
  misc_feature (1489)..(1489): n is a, c, g, or t
  misc_feature (2091)..(2091): n is a, c, g, or t
  misc_feature (2379)..(2379): n is a, c, g, or t
tgcctcgcggggttgcggcgagcccggcccgcgaacgtcacgtccctgcgcgctccctgcactctcccgagctgcgctaggcgggcgccacggctgcccggcgaaggaaaccgaaaccgagtccgggcccgtccctccgcggccccatccgcccggtgcacccggggtcgcgctcgccaggccgcggagcccagagctgcgcgcacgaaccgtgcgccgggagggcgtgggcgtggcgccgaagggtcccgggtcttcgacgcctctgcggcggctcctccctccttgcagttggatccctggcgggtgcggcccggcccggcccgtgagcggcgcacagaatgggccgatgctgcttctacacggcggggacgttgtccctgctcctgctggtgaccagcgtcacgctgctggtggcccgggtcttccagaaggctgtagaccagagtatcgagaagaaaattgtgttaaggaatggtactgaggcatttgactcctgggagaagccccctctgcctgtgtatactcagttctatttcttcaatgtcaccaatccagaggagatcctcagaggggagacccctcgggtggaagaagtggggccatacacctacagggaactcagaaacaaagcaaatattcaatttggagataatggaacaacaatatctgctgttagcaacaaggcctatgtttttgaacgagaccaatctgttggagaccctaaaattgacttaattagaacattaaatattcctgtattgactgtcatagagtggtcccaggtgcacttcctcagggagatcatcgaggccatgttgaaagcctatcagcagaagctctttgtgactcacacagttgacgaattgctctggggctacaaagatgaaatcttgtcccttatccatgttttcaggcccgatatctctccctattttggcctattctatgagaaaaatgggactaatgatggagactatgtttttctaactggagaagacagttaccttaactttacaaaaattgtggaatggaatgggaaaacgtcacttgactggtggataacagacaagtgcaatatgattaatggaacagatggagattcttttcacccactaataaccaaagatgaggtcctttatgtcttcccatctgacttttgcaggtcagtgtatattactttcagtgactatgagagtgtacagggactgcctgcctttcggtataaagttcctgcagaaatattagccaatacgtcagacaatgccggcttctgtatacctgagggaaactgcctgggctcaggagttctgaatgtcagcatctgcaagaatggtaagaactcagagaggggacatganaggggtgtcaagaatgcagaaggattggagttcaacaaagaatatgtagctgggcntagtggcgcacacctacagtcccagctactaaggatgctgaggtgggatgatcacttgagcccaggagttcncaagtccatcctgggcaacatggcgagaccactgtctctaaaaaacaaaacaaacaaaaaagaatatattgtcagcccaatagaaagatcagtttctttcaagaacaatgtttcataacatggctattgaatggtaaaaaaaaatcatggcttttctgtgatgctttttatttctagaatgccatgttgtgtttttttttctggacagtggtttagaagtcttaacagtaataatagctcatgtttactaagcacctgatgtatgccagtcactgtcctaagtgctttacatatttacatgtagttaatgcctgcaaaacattaactgatttcatgttcaaaacaatgctaaggctgggcacggtggctcatgcttgtattcccagcactttgagaggccgagatgtgaggattgcttgaggccaggggttcaagatcagcctgggcaacatagcaagaccctgtctctacaaaaaaaaaaaaattaaaaaattagctgggtgtggcggcacacacctgtagttacagctgctcaggaggctgaggcagagagattgcttgaacccaggagttcgaggttgcactgtgctatgattgtgctnctgcactccagcctgggcaatagagtgattccgcacctccccaccaaaaaaaaaaagctaaaagaaaaagtggacaactcagttttaagaaagtacgtatcatggcaaagattctcagtgattttgaagcagagttagttttaaaccctgacacaaatgtcccagtgtttcttaatgtcagagctactctgctcctttccatgaatgaggcagaattatcagtggcacaactgacaaaactattttcttcatcttgaagagtagttttaacagccacatgttgcaganttattcacaatgaacttactagatagtagacattcagcggcctgtttttataattggggaaactagggctcagagagggaacgtgattttgatgcgactcctccctctgagcagatccctggcggaactcagggtcttctcatatttgccctgtgattccctcttgggctgtaattcctctttaaaatttctctggagagctctctgtgtagtccctttctcctgaatagtaatgtgctcacttttgctcccttatctatctcattttaaaatctcctttcaggcctggcatggtggcgtgtgcctgtagacccagctactcaggaggctatggtggaagggtcgtttgagcccagtttgattctagcctgggcaacatagcgagactccatctttta

SEQ ID NO: 72947 - DNA, 503 bp, Homo sapiens
tactactaaattcgcggccgctcgaccagaatgcaagcttctggtaccatgatcctcaacttagagaggaagaaaccaagacagagagcttaactcacttctctcagggaaaattaggagttgagcacaggacaggaaatgggctttgccacttttagctccaggcttttctaaccagacttgatttcctcatgttctagaaagatcactaatggtcaagtggaacaagcactacacgactaacccctattggggtttttaacttaagggaggctaatttttaatttaaactgctcgagatatgagttctgcaaaaggtggtccgcatccttggccctctggacattatcactaaattgcttgtgcctgttaacaagaatactgaccagaatgctcttcatgtagcttatacagttggttcacttcatgcggttcttgacatgtttatttctacccttaatgcaatgaaatgtttcattaataaaaaaccactttatataaaa

SEQ ID NO: 72948 - DNA, 403 bp, Homo sapiens
aggtctctcctccttccatgcccccactccccacccaaacttttcacactggggagaagtttctgacatgaacatctaacttgttttctctcttctgtgtttcagggaacagcggatgaaagagcacccctcattcgaacctaaacattgcctttgcttggtgaagaaactgtgtgagctgtcctgacctggacgatgacgtggggaaaccctccacctccttgcaggcttgttgcctgttgaaagaaggaaaaagacacggcgctggcaagtgataggaacattctggccagaggttaaagagcaggctgacatggctggccattaagctttataaaatcatgtgggctctgaaattgttcttttatgtgtctagcaagtatttaataaacccttgtatagt

SEQ ID NO: 72949 - DNA, 401 bp, Homo sapiens
ccaggaacttttatattcagcttagattttaaaaacagcatcattcatttctgttttccttcaaatgcaggtgcacccatcattatgtctttcccacacttttaccaagcagatgagaggtttgtttctgccatagaaggcatgcacccaaatcaggaagaccatgagacatttgtggacattaatcctgtgagtacatactacctcctggtaaaagagcatatgttttattctgtctatacattgttcaccagtttagtcctgagccttctttaaaaatatccttactttcatatacatattcaagtgggagaaattcagctcagtgctgatggaggcattgtctcatagccctgtaattagaaggctgaattttgtggattgaatagcagaaatacgag

SEQ ID NO: 72950 - DNA, 748 bp, Homo sapiens
aagaaacctctgtttttgcttgtaaggctttgaacagattggagggggcccagccactcattattgagggtaacctcccttaaagttaacggattgtagatattaatcacacctacaaaataccttcaccacaccatctgggctagtgtttgaccaaacaactgggcaccatagtctagccaagttgtcataaaattatcacagttactttaaatgatcatattcacatattttcagaaaaatgggactaatgatggagactatgtttttctaactggagaagacagttaccttaactttacaaaaattgtggaatggaatgggaaaacgtaagtcaaatgatttatcagtggaattattttttcagttttcatttaaactacatgtctacttctacattgcttaaaaatgtgtttagccttttttggatgaaaaatataaaaacatgtaaatagtcttgtaattattattctacaaatcaagatggtggtaaaacatcttacagattaaatattagtgatttgtagatttatcatggccaggcatgaattacaggccagtgaaaagtcccactcttgcttaatagtcattgagtgatgtgtagtagctacagcacaaatacttttcaaaccaccacatgttttgggctatttggccattgcctctatgaaagctgatttgggccagggacctactttttctcccccttgatctaattaaaactgttgtgtctgtgtatgaataagat

SEQ ID NO: 72951 - DNA, 1381 bp, Homo sapiens
tgcctcgcggggttgcggcgagcccggcccgcgaacgtcacgtccctgcgcgctccctgcactctcccgagctgcgctaggcgggcgccacggctgcccggcgaaggaaaccgaaaccgagtccgggcccgtccctccgcggccccatccgcccggtgcacccggggtcgcgctcgccaggccgcggagcccagagctgcgcgcacgaaccgtgcgccgggagggcgtgggcgtggcgccgaagggtcccgggtcttcgacgcctctgcggcggctcctccctccttgcagttggatccctggcgggtgcggcccggcccggcccgtgagcggcgcacagaatgggccgatgctgcttctacacggcggggacgttgtccctgctcctgctggtgaccagcgtcacgctgctggtggcccgggtcttccagaaggctgtagaccagagtatcgagaagaaaattgtgttaaggaatggtactgaggcatttgactcctgggagaagccccctctgcctgtgtatactcagttctatttcttcaatgtcaccaatccagaggagatcctcagaggggagacccctcgggtggaagaagtggggccatacacctacagggaactcagaaacaaagcaaatattcaatttggagataatggaacaacaatatctgctgttagcaacaaggcctatgtttttgaacgagaccaatctgttggatcaccctatagaagaactaatgtagtcactaagtaacatgacaaacataactcctccggataagcctgcgtccgactcaaaacactgaactgagcaatgcaaacagcgcaatatctacaaatcaagacaacaagtccattattaccctcacgtgtcaacccgaacaacaagaaatgctcactcaggacaaggtctccaacacaagtacaagggaacctcgcggaaactccttacgcccggcatggattaccaaaaaacaatcaccttcctagacattcaaaccaagtattcacgagggacaccgcgttggcaccaatgaaacaccatgcttaaacaggccagcgagtacccctcacccgatgcaaacaaggtaaacataaatcaattatgtgtacccgttgacacagtcagagggcaaccagtggtaactcgaaagtgcagacatacacaacagacaggagattaccaaaacacggatcatcgataacacaatcacagaccaaggtgtcacacaattgtcaccctggcgcacgactgaaaaacacagagacgcaagaaatataagacaacagtgcaacgaacagctcacaagacaccgtcatcggacgagatctcgaactgacatatacaagcacaaaaagatgaaccataacaaaaagcaa

SEQ ID NO: 72952 - DNA, 4698 bp, Homo sapiens
tgcctcgcggggttgcggcgagcccggcccgcgaacgtcacgtccctgcgcgctccctgcactctcccgagctgcgctaggcgggcgccacggctgcccggcgaaggaaaccgaaaccgagtccgggcccgtccctccgcggccccatccgcccggtgcacccggggtcgcgctcgccaggccgcggagcccagagctgcgcgcacgaaccgtgcgccgggagggcgtgggcgtggcgccgaagggtcccgggtcttcgacgcctctgcggcggctcctccctccttgcagttggatccctggcgggtgcggcccggcccggcccgtgagcggcgcacagaatgggccgatgctgcttctacacggcggggacgttgtccctgctcctgctggtgaccagcgtcacgctgctggtggcccgggtcttccagaaggctgtagaccagagtatcgagaagaaaattgtgttaaggaatggtactgaggcatttgactcctgggagaagccccctctgcctgtgtatactcagttctatttcttcaatgtcaccaatccagaggagatcctcagaggggagacccctcgggtggaagaagtggggccatacacctacagggaactcagaaacaaagcaaatattcaatttggagataatggaacaacaatatctgctgttagcaacaaggcctatgtttttgaacgagaccaatctgttggagaccctaaaattgacttaattagaacattaaatattcctgtattgactgtcatagagtggtcccaggtgcacttcctcagggagatcatcgaggccatgttgaaagcctatcagcagaagctctttgtgactcacacagttgacgaattgctctggggctacaaagatgaaatcttgtcccttatccatgttttcaggcccgatatctctccctattttggcctattctatgagaaaaatgggactaatgatggagactatgtttttctaactggagaagacagttaccttaactttacaaaaattgtggaatggaatgggaaaacgtcacttgactggtggataacagacaagtgcaatatgattaatggaacagatggagattcttttcacccactaataaccaaagatgaggtcctttatgtcttcccatctgacttttgcaggtcagtgtatattactttcagtgactatgagagtgtacagggactgcctgcctttcggtataaagttcctgcagaaatattagccaatacgtcagacaatgccggcttctgtatacctgagggaaactgcctgggctcaggagttctgaatgtcagcatctgcaagaatggtgcacccatcattatgtctttcccacacttttaccaagcagatgagaggtttgtttctgccatagaaggcatgcacccaaatcaggaagaccatgagacatttgtggacattaatcctttgactggaataatcctaaaagcagccaagaggttccaaatcaacatttatgtcaaaaaattagatgactttgttgaaacgggagacattagaaccatggttttcccagtgatgtacctcaatgagagtgttcacattgataaagagacggcgagtcgactgaagtctatgattaacactactttgatcatcaccaacataccctacatcatcatggcgctgggtgtgttctttggtttggtttttacctggcttgcatgcaaaggacagggatccatggatgagggaacagcggatgaaagagcacccctcattcgaacctaaacattgcctttgcttggtgaagaaactgtgtgagctgtcctgacctggacgatgacgtggggaaaccctccacctccttgcaggcttgttgcctgttgaaagaaggaaaaagacacggcgctggcaagtgataggaacattctggccagaggttaaagagcaggctgacatggctggccattaagctttataaaatcatgtgggctctgaaattgttcttttatgtgtctagcaagtatttaataaacccttgtatagtaattttgttgttgttgggtgctggtagctccagaattttgtgaccactattgtgggtaaaatgtctctgcatcacttgttaatgctactggtctaacttcattcagtatgcttcattcaccgaactttgtgctcaaaatgcgtatataccattttatgttgtattcctccatttcacttgcaaaacagaagtaaataagagttcgggacccagggtaaaatggtagcttcatccaatatatcattcaaatgcatctgattttcagtcttccaactgcaataaaatactgggtagaatcaaatgggaaaggggttgggtggggcaatacccatgagttgatagtgataagctcctaaggatttttaacttgtacttttgtgaacgaagagaatgcataaataatgttggtgaggataaagtacagatatttcatgtagaattaattgctagttatgatgcttgtggatagttaactgttttttttttagtcaaaatgatcatgctacgaaaagatgcttctgagagaatgtaatgagtaactgatttttcttcctgagtcgcccttgccaaatatgttactgtattaattaatctaatattgagtgattatttgtaaaattatgaatatgggaaatccatctatctacagcctaagttacacataagtttcagaaagtctgattagactaaagagatatttcttctgggacagccttcttcttggtaattttgaagttctttttacaagttccttcctcagtttcagttctttccagtgttttgtagctcactgtcactcactgaatagagaaacgtgtgccctatacttcctgtgacaatcattttgctgacagaatgatggatgtttaaaatattgcacaaagtactttaaagaaaggtctgttaggaccagaagcagagacaccacttttcaaaggacttcttggtttcagcataacctaagacagggaattgggagccatcatatgtcacagtgttcagaattcaagcatatttaagggcattttctttgattctcaaagttcagcattcattttgaattgagaagcctatacatttagctgacaaagtgcttatagaatttcttaacaactgaaccattcaaaaggattttttttgtttaaaactggatttcaatgtaagcaaatgaagaaaaaaatatagatttcatttccatagcttcttatccctgtattgaggtaataaattgttttactgacaatttttcctttttctacactaaaacaatatgtgatatatttcccctcttgaagaggcaattcattaaactctcaaattttctatagaatcaagatagaacctttagatactccaactcaccaaaatgtaaaaaaactaacaaaaatatttggtcttcaataatgctaaatatctacatttttagaatttatcaacatttaactagataattgggcatgtcttaattatgcatgtacttatccatactaataaaattgacaatgctagtgcatacttattggtttagtcctattatcaggatataatcatctgtgaggaggatattttaaatactgtaaatgataacagttaatgatatacacatttagactgagttgcacactggcagggagaccaaaaacattacttccatacttgtgtcatgattctttttttttgagagagtctcactctgtcgccaggctggagtacagtggcatgatctcggctcactgcaacctctgcctcccgggttcaagcaattctcctgcctcagccacccaagtagctgggactacaggtgcgtgccaccacgcccagctaaattttgtatttttagtggagacggggtttcaccatgttggccaggatggtctcaatctcctgaccctgcgatctgcccacctcagcctcccaaagtgctgggattacaggcgtaagccaccgggcctggcctgttttatgattcttaatagttacttggtttaaatcacatttgatactatccttctgaaaagtctgagacagatctacaaactacagtcaaaattatagattaagaggaatgaatgcacctatttggctttaagttgaagatgaattatttctcatgctcattttcttgcggcagttatcttagaaagacccccaaaggctttgtgattgtaagcactgtcatgatcacagaatgcaagcttctggtaccatgatcctcaacttagagaggaagaaaccaagacagagagcttaactcacttctctcagggaaaattaggagttgagcacaggacaggaaatgggctttgccacttttagctccaggcttttctaaccagacttgatttcctcatgttctagaaagatcactaatggtcaagtggaacaagcactacacgactaacccctattggggtttttaacttaagggaggctaatttttaatttaaactgctcgagatatgagttctgcaaaaggtggtccgcatccttggccctctggacattatcactaaattgcttgtgcctgttaacaagaatactgaccagaatgctcttcatgtagcttatacagttggttcacttcatgcggttcttgacatgtttatttctacccttaatgcaatgaaatgtttcattaataaaaaaccactttatataaaa

SEQ ID NO: 72953 - DNA, 4512 bp, Homo sapiens
tgcctcgcggggttgcggcgagcccggcccgcgaacgtcacgtccctgcgcgctccctgcactctcccgagctgcgctaggcgggcgccacggctgcccggcgaaggaaaccgaaaccgagtccgggcccgtccctccgcggccccatccgcccggtgcacccggggtcgcgctcgccaggccgcggagcccagagctgcgcgcacgaaccgtgcgccgggagggcgtgggcgtggcgccgaagggtcccgggtcttcgacgcctctgcggcggctcctccctccttgcagttggatccctggcgggtgcggcccggcccggcccgtgagcggcgcacagaatgggccgatgctgcttctacacggcggggacgttgtccctgctcctgctggtgaccagcgtcacgctgctggtggcccgggtcttccagaaggctgtagaccagagtatcgagaagaaaattgtgttaaggaatggtactgaggcatttgactcctgggagaagccccctctgcctgtgtatactcagttctatttcttcaatgtcaccaatccagaggagatcctcagaggggagacccctcgggtggaagaagtggggccatacacctacagggaactcagaaacaaagcaaatattcaatttggagataatggaacaacaatatctgctgttagcaacaaggcctatgtttttgaacgagaccaatctgttggagaccctaaaattgacttaattagaacattaaatattcctgtattgactgtcatagagtggtcccaggtgcacttcctcagggagatcatcgaggccatgttgaaagcctatcagcagaagctctttgtgactcacacagttgacgaattgctctggggctacaaagatgaaatcttgtcccttatccatgttttcaggcccgatatctctccctattttggcctattctatgagaaaaatgggactaatgatggagactatgtttttctaactggagaagacagttaccttaactttacaaaaattgtggaatggaatgggaaaacgtcacttgactggtggataacagacaagtgcaatatgattaatggaacagatggagattcttttcacccactaataaccaaagatgaggtcctttatgtcttcccatctgacttttgcaggtcagtgtatattactttcagtgactatgagagtgtacagggactgcctgcctttcggtataaagttcctgcagaaatattagccaatacgtcagacaatgccggcttctgtatacctgagggaaactgcctgggctcaggagttctgaatgtcagcatctgcaagaatggtgcacccatcattatgtctttcccacacttttaccaagcagatgagaggtttgtttctgccatagaaggcatgcacccaaatcaggaagaccatgagacatttgtggacattaatcctttgactggaataatcctaaaagcagccaagaggttccaaatcaacatttatgtcaaaaaattagatgactttgttgaaacgggagacattagaaccatggttttcccagtgatgtacctcaatgagagtgttcacattgataaagagacggcgagtcgactgaagtctatgattaacactactttgatcatcaccaacataccctacatcatcatggcgctgggtgtgttctttggtttggtttttacctggcttgcatgcaaaggacagggatccatggatgagggaacagcggatgaaagagcacccctcattcgaacctaaacattgcctttgcttggtgaagaaactgtgtgagctgtcctgacctggacgatgacgtggggaaaccctccacctccttgcaggcttgttgcctgttgaaagaaggaaaaagacacggcgctggcaagtgataggaacattctggccagaggttaaagagcaggctgacatggctggccattaagctttataaaatcatgtgggctctgaaattgttcttttatgtgtctagcaagtatttaataaacccttgtatagtaattttgttgttgttgggtgctggtagctccagaattttgtgaccactattgtgggtaaaatgtctctgcatcacttgttaatgctactggtctaacttcattcagtatgcttcattcaccgaactttgtgctcaaaatgcgtatataccattttatgttgtattcctccatttcacttgcaaaacagaagtaaataagagttcgggacccagggtaaaatggtagcttcatccaatatatcattcaaatgcatctgatttctaaaacatattacattttatgctgatcttcagttcataattcttccaggaaaactcagtcttccaactgcaataaaatactgggtagaatcaaatgggaaaggggttgggtggggcaatacccatgagttgatagtgataagctcctaaggatttttaacttgtacttttgtgaacgaagagaatgcataaataatgttggtgaggataaagtacagatatttcatgtagaattaattgctagttatgatgcttgtggatagttaactgttttttttttagtcaaaatgatcatgctacgaaaagatgcttctgagagaatgtaatgagtaactgatttttcttcctgagtcgcccttgccaaatatgttactgtattaattaatctaatattgagtgattatttgtaaaattatgaatatgggaaatccatctatctacagcctaagttacacataagtttcagaaagtctgattagactaaagagatatttcttctgggacagccttcttcttggtaattttgaagttctttttacaagttccttcctcagtttcagttctttccagtgttttgtagctcactgtcactcactgaatagagaaacgtgtgccctatacttcctgtgacaatcattttgctgacagaatgatggatgtttaaaatattgcacaaagtactttaaagaaaggtctgttaggaccagaagcagagacaccacttttcaaaggacttcttggtttcagcataacctaagacagggaattgggagccatcatatgtcacagtgttcagaattcaagcatatttaagggcattttctttgattctcaaagttcagcattcattttgaattgagaagcctatacatttagctgacaaagtgcttatagaatttcttaacaactgaaccattcaaaaggattttttttgtttaaaactggatttcaatgtaagcaaatgaagaaaaaaatatagatttcatttccatagcttcttatccctgtattgaggtaataaattgttttactgacaatttttcctttttctacactaaaacaatatgtgatatatttcccctcttgaagaggcaattcattaaactctcaaattttctatagaatcaagatagaacctttagatactccaactcaccaaaatgtaaaaaaactaacaaaaatatttggtcttcaataatgctaaatatctacatttttagaatttatcaacatttaactagataattgggcatgtcttaattatgcatgtacttatccatactaataaaattgacaatgctagtgcatacttattggtttagtcctattatcaggatataatcatctgtgaggaggatattttaaatactgtaaatgataacagttaatgatatacacatttagactgagttgcacactggcagggagaccaaaaacattacttccatacttgtgtcatgattctttttttttgagagagtctcactctgtcgccaggctggagtacagtggcatgatctcggctcactgcaacctctgcctcccgggttcaagcaattctcctgcctcagccacccaagtagctgggactacaggtgcgtgccaccacgcccagctaaattttgtatttttagtggagacggggtttcaccatgttggccaggatggtctcaatctcctgaccctgcgatctgcccacctcagcctcccaaagtgctgggattacaggcgtaagccaccgggcctggcctgttttatgattcttaatagttacttggtttaaatcacatttgatactatccttctgaaaagtctgagacagatctacaaactacagtcaaaattatagattaagaggaatgaatgcacctatttggctttaagttgaagatgaattatttctcatgctcattttcttgcggcagttatcttagaaagacccccaaaggctttgtgattgtaagcactgtcatgatcacagaatgcaagcttctggtaccatgatcctcaacttagagaggaagaaaccaagacagagagcttaactcacttctctcagggaaaattaggagttgagcacaggacaggaaatgggctttgccacttttagctccaggcttttctaaccagacttgatttcctcatgttctagaaagatcactaatggtcaagtggaaccaacaaccctggtaccggctcgattcctgcctttct

SEQ ID NO: 72954 - DNA, 4438 bp, Homo sapiens
tcacccagtacaattctgtcttaccattcaaattgtctgcaagcctgaatttttgtggccatgggacaaagaatgccatctttagcttcacaaaggaaaagtcctgcaacatttttgacccccaacatggggctcaagaagcgaaaattgtgttaaggaatggtactgaggcatttgactcctgggagaagccccctctgcctgtgtatactcagttctatttcttcaatgtcaccaatccagaggagatcctcagaggggagacccctcgggtggaagaagtggggccatacacctacagggaactcagaaacaaagcaaatattcaatttggagataatggaacaacaatatctgctgttagcaacaaggcctatgtttttgaacgagaccaatctgttggagaccctaaaattgacttaattagaacattaaatattcctgtattgactgtcatagagtggtcccaggtgcacttcctcagggagatcatcgaggccatgttgaaagcctatcagcagaagctctttgtgactcacacagttgacgaattgctctggggctacaaagatgaaatcttgtcccttatccatgttttcaggcccgatatctctccctattttggcctattctatgagaaaaatgggactaatgatggagactatgtttttctaactggagaagacagttaccttaactttacaaaaattgtggaatggaatgggaaaacgtcacttgactggtggataacagacaagtgcaatatgattaatggaacagatggagattcttttcacccactaataaccaaagatgaggtcctttatgtcttcccatctgacttttgcaggtcagtgtatattactttcagtgactatgagagtgtacagggactgcctgcctttcggtataaagttcctgcagaaatattagccaatacgtcagacaatgccggcttctgtatacctgagggaaactgcctgggctcaggagttctgaatgtcagcatctgcaagaatggtgcacccatcattatgtctttcccacacttttaccaagcagatgagaggtttgtttctgccatagaaggcatgcacccaaatcaggaagaccatgagacatttgtggacattaatcctttgactggaataatcctaaaagcagccaagaggttccaaatcaacatttatgtcaaaaaattagatgactttgttgaaacgggagacattagaaccatggttttcccagtgatgtacctcaatgagagtgttcacattgataaagagacggcgagtcgactgaagtctatgattaacactactttgatcatcaccaacataccctacatcatcatggcgctgggtgtgttctttggtttggtttttacctggcttgcatgcaaaggacagggatccatggatgagggaacagcggatgaaagagcacccctcattcgaacctaaacattgcctttgcttggtgaagaaactgtgtgagctgtcctgacctggacgatgacgtggggaaaccctccacctccttgcaggcttgttgcctgttgaaagaaggaaaaagacacggcgctggcaagtgataggaacattctggccagaggttaaagagcaggctgacatggctggccattaagctttataaaatcatgtgggctctgaaattgttcttttatgtgtctagcaagtatttaataaacccttgtatagtaattttgttgttgttgggtgctggtagctccagaattttgtgaccactattgtgggtaaaatgtctctgcatcacttgttaatgctactggtctaacttcattcagtatgcttcattcaccgaactttgtgctcaaaatgcgtatataccattttatgttgtattcctccatttcacttgcaaaacagaagtaaataagagttcgggacccagggtaaaatggtagcttcatccaatatatcattcaaatgcatctgatttctaaaacatattacattttatgctgatcttcagttcataattcttccaggaaaactcagtcttccaactgcaataaaatactgggtagaatcaaatgggaaaggggttgggtggggcaatacccatgagttgatagtgataagctcctaaggatttttaacttgtacttttgtgaacgaagagaatgcataaataatgttggtgaggataaagtacagatatttcatgtagaattaattgctagttatgatgcttgtggatagttaactgttttttttttagtcaaaatgatcatgctacgaaaagatgcttctgagagaatgtaatgagtaactgatttttcttcctgagtcgcccttgccaaatatgttactgtattaattaatctaatattgagtgattatttgtaaaattatgaatatgggaaatccatctatctacagcctaagttacacataagtttcagaaagtctgattagactaaagagatatttcttctgggacagccttcttcttggtaattttgaagttctttttacaagttccttcctcagtttcagttctttccagtgttttgtagctcactgtcactcactgaatagagaaacgtgtgccctatacttcctgtgacaatcattttgctgacagaatgatggatgtttaaaatattgcacaaagtactttaaagaaaggtctgttaggaccagaagcagagacaccacttttcaaaggacttcttggtttcagcataacctaagacagggaattgggagccatcatatgtcacagtgttcagaattcaagcatatttaagggcattttctttgattctcaaagttcagcattcattttgaattgagaagcctatacatttagctgacaaagtgcttatagaatttcttaacaactgaaccattcaaaaggattttttttgtttaaaactggatttcaatgtaagcaaatgaagaaaaaaatatagatttcatttccatagcttcttatccctgtattgaggtaataaattgttttactgacaatttttcctttttctacactaaaacaatatgtgatatatttcccctcttgaagaggcaattcattaaactctcaaattttctatagaatcaagatagaacctttagatactccaactcaccaaaatgtaaaaaaactaacaaaaatatttggtcttcaataatgctaaatatctacatttttagaatttatcaacatttaactagataattgggcatgtcttaattatgcatgtacttatccatactaataaaattgacaatgctagtgcatacttattggtttagtcctattatcaggatataatcatctgtgaggaggatattttaaatactgtaaatgataacagttaatgatatacacatttagactgagttgcacactggcagggagaccaaaaacattacttccatacttgtgtcatgattctttttttttgagagagtctcactctgtcgccaggctggagtacagtggcatgatctcggctcactgcaacctctgcctcccgggttcaagcaattctcctgcctcagccacccaagtagctgggactacaggtgcgtgccaccacgcccagctaaattttgtatttttagtggagacggggtttcaccatgttggccaggatggtctcaatctcctgaccctgcgatctgcccacctcagcctcccaaagtgctgggattacaggcgtaagccaccgggcctggcctgttttatgattcttaatagttacttggtttaaatcacatttgatactatccttctgaaaagtctgagacagatctacaaactacagtcaaaattatagattaagaggaatgaatgcacctatttggctttaagttgaagatgaattatttctcatgctcattttcttgcggcagttatcttagaaagacccccaaaggctttgtgattgtaagcactgtcatgatcacagaatgcaagcttctggtaccatgatcctcaacttagagaggaagaaaccaagacagagagcttaactcacttctctcagggaaaattaggagttgagcacaggacaggaaatgggctttgccacttttagctccaggcttttctaaccagacttgatttcctcatgttctagaaagatcactaatggtcaagtggaacaagcactacacgactaacccctattggggtttttaacttaagggaggctaatttttaatttaaactgctcgagatatgagttctgcaaaaggtggtccgcatccttggccctctggacattatcactaaattgcttgtgcctgttaacaagaatactgaccagaatgctcttcatgtagcttatacagttggttcacttcatgcggttcttgacatgtttatttctacccttaatgcaatgaaatgtttcattaataaaaaaccactttatataaaa

SEQ ID NO: 72955 - DNA, 3870 bp, Homo sapiens
gttaacaattgacaatataaggaaaagaaagacctatctgcaacaactctcttattttccaccgctacacaaaaatgggactaatgatggagactatgtttttctaactggagaagacagttaccttaactttacaaaaattgtggaatggaatgggaaaacgtcacttgactggtggataacagacaagtgcaatatgattaatggaacagatggagattcttttcacccactaataaccaaagatgaggtcctttatgtcttcccatctgacttttgcaggtcagtgtatattactttcagtgactatgagagtgtacagggactgcctgcctttcggtataaagttcctgcagaaatattagccaatacgtcagacaatgccggcttctgtatacctgagggaaactgcctgggctcaggagttctgaatgtcagcatctgcaagaatggtgcacccatcattatgtctttcccacacttttaccaagcagatgagaggtttgtttctgccatagaaggcatgcacccaaatcaggaagaccatgagacatttgtggacattaatcctttgactggaataatcctaaaagcagccaagaggttccaaatcaacatttatgtcaaaaaattagatgactttgttgaaacgggagacattagaaccatggttttcccagtgatgtacctcaatgagagtgttcacattgataaagagacggcgagtcgactgaagtctatgattaacactactttgatcatcaccaacataccctacatcatcatggcgctgggtgtgttctttggtttggtttttacctggcttgcatgcaaaggacagggatccatggatgagggaacagcggatgaaagagcacccctcattcgaacctaaacattgcctttgcttggtgaagaaactgtgtgagctgtcctgacctggacgatgacgtggggaaaccctccacctccttgcaggcttgttgcctgttgaaagaaggaaaaagacacggcgctggcaagtgataggaacattctggccagaggttaaagagcaggctgacatggctggccattaagctttataaaatcatgtgggctctgaaattgttcttttatgtgtctagcaagtatttaataaacccttgtatagtaattttgttgttgttgggtgctggtagctccagaattttgtgaccactattgtgggtaaaatgtctctgcatcacttgttaatgctactggtctaacttcattcagtatgcttcattcaccgaactttgtgctcaaaatgcgtatataccattttatgttgtattcctccatttcacttgcaaaacagaagtaaataagagttcgggacccagggtaaaatggtagcttcatccaatatatcattcaaatgcatctgatttctaaaacatattacattttatgctgatcttcagttcataattcttccaggaaaactcagtcttccaactgcaataaaatactgggtagaatcaaatgggaaaggggttgggtggggcaatacccatgagttgatagtgataagctcctaaggatttttaacttgtacttttgtgaacgaagagaatgcataaataatgttggtgaggataaagtacagatatttcatgtagaattaattgctagttatgatgcttgtggatagttaactgttttttttttagtcaaaatgatcatgctacgaaaagatgcttctgagagaatgtaatgagtaactgatttttcttcctgagtcgcccttgccaaatatgttactgtattaattaatctaatattgagtgattatttgtaaaattatgaatatgggaaatccatctatctacagcctaagttacacataagtttcagaaagtctgattagactaaagagatatttcttctgggacagccttcttcttggtaattttgaagttctttttacaagttccttcctcagtttcagttctttccagtgttttgtagctcactgtcactcactgaatagagaaacgtgtgccctatacttcctgtgacaatcattttgctgacagaatgatggatgtttaaaatattgcacaaagtactttaaagaaaggtctgttaggaccagaagcagagacaccacttttcaaaggacttcttggtttcagcataacctaagacagggaattgggagccatcatatgtcacagtgttcagaattcaagcatatttaagggcattttctttgattctcaaagttcagcattcattttgaattgagaagcctatacatttagctgacaaagtgcttatagaatttcttaacaactgaaccattcaaaaggattttttttgtttaaaactggatttcaatgtaagcaaatgaagaaaaaaatatagatttcatttccatagcttcttatccctgtattgaggtaataaattgttttactgacaatttttcctttttctacactaaaacaatatgtgatatatttcccctcttgaagaggcaattcattaaactctcaaattttctatagaatcaagatagaacctttagatactccaactcaccaaaatgtaaaaaaactaacaaaaatatttggtcttcaataatgctaaatatctacatttttagaatttatcaacatttaactagataattgggcatgtcttaattatgcatgtacttatccatactaataaaattgacaatgctagtgcatacttattggtttagtcctattatcaggatataatcatctgtgaggaggatattttaaatactgtaaatgataacagttaatgatatacacatttagactgagttgcacactggcagggagaccaaaaacattacttccatacttgtgtcatgattctttttttttgagagagtctcactctgtcgccaggctggagtacagtggcatgatctcggctcactgcaacctctgcctcccgggttcaagcaattctcctgcctcagccacccaagtagctgggactacaggtgcgtgccaccacgcccagctaaattttgtatttttagtggagacggggtttcaccatgttggccaggatggtctcaatctcctgaccctgcgatctgcccacctcagcctcccaaagtgctgggattacaggcgtaagccaccgggcctggcctgttttatgattcttaatagttacttggtttaaatcacatttgatactatccttctgaaaagtctgagacagatctacaaactacagtcaaaattatagattaagaggaatgaatgcacctatttggctttaagttgaagatgaattatttctcatgctcattttcttgcggcagttatcttagaaagacccccaaaggctttgtgattgtaagcactgtcatgatcacagaatgcaagcttctggtaccatgatcctcaacttagagaggaagaaaccaagacagagagcttaactcacttctctcagggaaaattaggagttgagcacaggacaggaaatgggctttgccacttttagctccaggcttttctaaccagacttgatttcctcatgttctagaaagatcactaatggtcaagtggaacaagcactacacgactaacccctattggggtttttaacttaagggaggctaatttttaatttaaactgctcgagatatgagttctgcaaaaggtggtccgcatccttggccctctggacattatcactaaattgcttgtgcctgttaacaagaatactgaccagaatgctcttcatgtagcttatacagttggttcacttcatgcggttcttgacatgtttatttctacccttaatgcaatgaaatgtttcattaataaaaaaccactttatataaaa

SEQ ID NO: 72956 - DNA, 3436 bp, Homo sapiens
gatctcctagaggtatcccacacgacgcctactggtttgccatacactgtgctgggctcgagtcatctttgttgggaagatgactggtaacccagcacagtgtattagaccatgatacatttgtggacattaatcctttgactggaataatcctaaaagcagccaagaggttccaaatcaacatttatgtcaaaaaattagatgactttgttgaaacgggagacattagaaccatggttttcccagtgatgtacctcaatgagagtgttcacattgataaagagacggcgagtcgactgaagtctatgattaacactactttgatcatcaccaacataccctacatcatcatggcgctgggtgtgttctttggtttggtttttacctggcttgcatgcaaaggacagggatccatggatgagggaacagcggatgaaagagcacccctcattcgaacctaaacattgcctttgcttggtgaagaaactgtgtgagctgtcctgacctggacgatgacgtggggaaaccctccacctccttgcaggcttgttgcctgttgaaagaaggaaaaagacacggcgctggcaagtgataggaacattctggccagaggttaaagagcaggctgacatggctggccattaagctttataaaatcatgtgggctctgaaattgttcttttatgtgtctagcaagtatttaataaacccttgtatagtaattttgttgttgttgggtgctggtagctccagaattttgtgaccactattgtgggtaaaatgtctctgcatcacttgttaatgctactggtctaacttcattcagtatgcttcattcaccgaactttgtgctcaaaatgcgtatataccattttatgttgtattcctccatttcacttgcaaaacagaagtaaataagagttcgggacccagggtaaaatggtagcttcatccaatatatcattcaaatgcatctgatttctaaaacatattacattttatgctgatcttcagttcataattcttccaggaaaactcagtcttccaactgcaataaaatactgggtagaatcaaatgggaaaggggttgggtggggcaatacccatgagttgatagtgataagctcctaaggatttttaacttgtacttttgtgaacgaagagaatgcataaataatgttggtgaggataaagtacagatatttcatgtagaattaattgctagttatgatgcttgtggatagttaactgttttttttttagtcaaaatgatcatgctacgaaaagatgcttctgagagaatgtaatgagtaactgatttttcttcctgagtcgcccttgccaaatatgttactgtattaattaatctaatattgagtgattatttgtaaaattatgaatatgggaaatccatctatctacagcctaagttacacataagtttcagaaagtctgattagactaaagagatatttcttctgggacagccttcttcttggtaattttgaagttctttttacaagttccttcctcagtttcagttctttccagtgttttgtagctcactgtcactcactgaatagagaaacgtgtgccctatacttcctgtgacaatcattttgctgacagaatgatggatgtttaaaatattgcacaaagtactttaaagaaaggtctgttaggaccagaagcagagacaccacttttcaaaggacttcttggtttcagcataacctaagacagggaattgggagccatcatatgtcacagtgttcagaattcaagcatatttaagggcattttctttgattctcaaagttcagcattcattttgaattgagaagcctatacatttagctgacaaagtgcttatagaatttcttaacaactgaaccattcaaaaggattttttttgtttaaaactggatttcaatgtaagcaaatgaagaaaaaaatatagatttcatttccatagcttcttatccctgtattgaggtaataaattgttttactgacaatttttcctttttctacactaaaacaatatgtgatatatttcccctcttgaagaggcaattcattaaactctcaaattttctatagaatcaagatagaacctttagatactccaactcaccaaaatgtaaaaaaactaacaaaaatatttggtcttcaataatgctaaatatctacatttttagaatttatcaacatttaactagataattgggcatgtcttaattatgcatgtacttatccatactaataaaattgacaatgctagtgcatacttattggtttagtcctattatcaggatataatcatctgtgaggaggatattttaaatactgtaaatgataacagttaatgatatacacatttagactgagttgcacactggcagggagaccaaaaacattacttccatacttgtgtcatgattctttttttttgagagagtctcactctgtcgccaggctggagtacagtggcatgatctcggctcactgcaacctctgcctcccgggttcaagcaattctcctgcctcagccacccaagtagctgggactacaggtgcgtgccaccacgcccagctaaattttgtatttttagtggagacggggtttcaccatgttggccaggatggtctcaatctcctgaccctgcgatctgcccacctcagcctcccaaagtgctgggattacaggcgtaagccaccgggcctggcctgttttatgattcttaatagttacttggtttaaatcacatttgatactatccttctgaaaagtctgagacagatctacaaactacagtcaaaattatagattaagaggaatgaatgcacctatttggctttaagttgaagatgaattatttctcatgctcattttcttgcggcagttatcttagaaagacccccaaaggctttgtgattgtaagcactgtcatgatcacagaatgcaagcttctggtaccatgatcctcaacttagagaggaagaaaccaagacagagagcttaactcacttctctcagggaaaattaggagttgagcacaggacaggaaatgggctttgccacttttagctccaggcttttctaaccagacttgatttcctcatgttctagaaagatcactaatggtcaagtggaacaagcactacacgactaacccctattggggtttttaacttaagggaggctaatttttaatttaaactgctcgagatatgagttctgcaaaaggtggtccgcatccttggccctctggacattatcactaaattgcttgtgcctgttaacaagaatactgaccagaatgctcttcatgtagcttatacagttggttcacttcatgcggttcttgacatgtttatttctacccttaatgcaatgaaatgtttcattaataaaaaaccactttatataaaa

SEQ ID NO: 72957 - DNA, 2335 bp, Homo sapiens
  misc_feature (2080)..(2080): n is a, c, g, or t
  misc_feature (2087)..(2087): n is a, c, g, or t
  misc_feature (2089)..(2089): n is a, c, g, or t
  misc_feature (2100)..(2100): n is a, c, g, or t
tgcctcgcggggttgcggcgagcccggcccgcgaacgtcacgtccctgcgcgctccctgcactctcccgagctgcgctaggcgggcgccacggctgcccggcgaaggaaaccgaaaccgagtccgggcccgtccctccgcggccccatccgcccggtgcacccggggtcgcgctcgccaggccgcggagcccagagctgcgcgcacgaaccgtgcgccgggagggcgtgggcgtggcgccgaagggtcccgggtcttcgacgcctctgcggcggctcctccctccttgcagttggatccctggcgggtgcggcccggcccggcccgtgagcggcgcacagaatgggccgatgctgcttctacacggcggggacgttgtccctgctcctgctggtgaccagcgtcacgctgctggtggcccgggtcttccagaaggctgtagaccagagtatcgagaagaaaattgtgttaaggaatggtactgaggcatttgactcctgggagaagccccctctgcctgtgtatactcagttctatttcttcaatgtcaccaatccagaggagatcctcagaggggagacccctcgggtggaagaagtggggccatacacctacagggaactcagaaacaaagcaaatattcaatttggagataatggaacaacaatatctgctgttagcaacaaggcctatgtttttgaacgagaccaatctgttggagaccctaaaattgacttaattagaacattaaatattcctgtattgactgtcatagagtggtcccaggtgcacttcctcagggagatcatcgaggccatgttgaaagcctatcagcagaagctctttgtgactcacacagttgacgaattgctctggggctacaaagatgaaatcttgtcccttatccatgttttcaggcccgatatctctccctattttggcctattctatgagaaaaatgggactaatgatggagactatgtttttctaactggagaagacagttaccttaactttacaaaaattgtggaatggaatgggaaaacgtcacttgactggtggataacagacaagtgcaatatgattaatggaacagatggagattcttttcacccactaataaccaaagatgaggtcctttatgtcttcccatctgacttttgcaggtcagtgtatattactttcagtgactatgagagtgtacagggactgcctgcctttcggtataaagttcctgcagaaatattagccaatacgtcagacaatgccggcttctgtatacctgagggaaactgcctgggctcaggagttctgaatgtcagcatctgcaagaatggtgcacccatcattatgtctttcccacacttttaccaagcagatgagaggtttgtttctgccatagaaggcatgcacccaaatcaggaagaccatgagacatttgtggacattaatcctttgactggaataatcctaaaagcagccaagaggttccaaatcaacatttatgtcaaaaaattagatgactttgttgaaacgggagacattagaaccatggttttcccagtgatgtacctcaatgagagtgttcacattgataaagagacggcgagtcgactgaagtctatgattaacactactttgatcatcaccaacataccctacatcatcatggcgctgggtgtgttctttggtttggtttttacctggcttgcatgcaaaggacagggatccatggatgagggaacagcggatgaaagagcacccctcattcgaacctaaacattgcctttgcttggtgaagaaactgtgtgagctgtcctgacctggacgatgacgtggggaaaccctccacctccttgcaggcttgttgcctgttgaaagaaggaaaaagacacggcgctggcaagtgataggaacattctggccagaggttaaagagcaggctgacatggctggccattaagctttataaaatcatgtgggctctgaaattgttcttttatgtgtctagcaagtatttaataaacccttgtatagtaaaaaaaaaaaaaaagaaaaaaaaagaaaaaaaaaaaaaaaanaaacaangnagaaaaaacanaacaagagagcacacagcacgcagcacgggggcacgagagacggcgcgagagagagaaagacaaaaggcaaaagcggaggcggggagcggggaccccgtaggaataaaaaacgaacgcgggggaagaagagcgcacccacagagaccaccggccggaaagaagagaaaggggagggggcacaccagcgaaaaagagcgggcgcggagaggccaaggagtggagcagaaaaaccgg

SEQ ID NO: 72958 - DNA, 1856 bp, Homo sapiens
  misc_feature (77)..(77): n is a, c, g, or t
acgcccgggcagccacggcggcggggccgcggcgggcgccggctcagcccgcccctttctcccgccgcctccccgcnccgccccgcgccgcgccggccgctgtcagctccctcagcgtccggccgaggcgcggtgtatgctgagccgctgccgcagccggctgctccacgtcctgggccttagcttcctgctgcagacccgccggccgattctcctctgctctccacgtctcatgaagccgctggtcgtgttcgtcctcggcggccccggcgccggcaaggggacccagtgcgcccgcatcgtcgagaaatatggctacacacacctttctgcaggagagctgcttcgtgatgaaaggaagaacccagattcacagtatggtgaacttattgaaaagtacattaaagaaggaaagattgtaccagttgagataaccatcagtttattaaagagggaaatggatcagacaatggctgccaatgctcagaagaataaattcttgattgatgggtttccaagaaatcaagacaaccttcaaggatggaacaagaccatggatgggaaggcagatgtatctttcgttctcttttttgactgtaataatgagatttgtattgaacgatgtcttgagaggggaaagagtagtggtaggagtgatgacaacagagagagcttggaaaagagaattcagacctaccttcagtcaacaaagccaattattgacttatatgaagaaatggggaaagtcaagaaaatagatgcttctaaatctgttgatgaagtttttgatgaagttgtgcagatttttgacaaggaaggctaattctaaacctgaaagcatccttgaaatcatgcttgaatattgctttgatagctgctatcatgacccctttttaaggcaattctaatctttcataactacatctcaattagtggctggaaagtacatggtaaaacaaagtaaatttttttatgttcttttttttggtcacaggagtagacagtgaattcaggtttaacttcaccttagttatggtgctcaccaaacgaagggtatcagctatttttttttaaattcaaaaagaatatcccttttatagtttgtgccttctgtgagcaaaactttttagtacgcgtatatatccctctagtaatcacaacattttaggatttagggatacccgcttcctctttttcttgcaagttttaaatttccaaccttaagtgaatttgtggaccaaatttcaaaggaactttttgtgtagtcagttcttgcacaatgtgtttggtaaacaaactcaaaatggattcttaggagcattttagtgtttattaaataactgaccatttgctgtagaaagatgagaaaacttaagctttgttttactacaacttgtacaaagttgtatgacagggcatattctttgcttccaagatttgggttgggggcactaggggttcagagcctggcagaattgtcagctttagtctgacataatctaagggtatggggcaaggatcacatctaatgcttgtgttccttatactctattatatagtgttattcatgattcagctgatcttaacaaaattcgtagcagtggaaccttgaaatgcatgtggctagatttatgctaaaatgattctcagttagcattttagtaacacttcaaaggtttttttttgtttgttttctagacttaataaaagcttaggattaattagaagaagcaatctagttaaatttcccatttgtattttattttcttgaatacttttttcatagttatttgtttaaaaagatttaaaaatcattgcactttggtcagaaaaataataaatatatcttataaatg

SEQ ID NO: 72959 - DNA, 1938 bp, Homo sapiens
atatgatggatgagaaatgcagaccagccccacatcatggtgttaccatttctcagcagataataggcacagtattttccagattccagatgtgctgaggcagaacaaggagtacacagatacagacagaaacccatcccaaaccacaaatggacaaaaatctacaaggcaatggaagcaggagactcttttcgcctaagttagatggatttctttagctgaagctttttgagaagatagaatgtttctgtcttataaattccttgatgatgccaagaaactcagacatcataaaggattttcgctttccagaattttcagtaagaatgacagatgtttctcagataattttcaggcatcaccacttcttctgttgtgattgttattctctggctcctctttacttgattgcaaatttaaaagaacactggcattttagaaatatgtaagctttgtatttgagcctttgcaagtaaagaataaaaagagaatagtttacaattcagcccacagaatacgttagaacactatagaatgctgagtttaggagaaggttcactccatattaatcttttattgtacacgattatggttagaaaacgatttgagctatgttcaacatcagccatctgtatatttgacataatgaacatgagtcacagagtttcaattttaattacagtttttgttttgtgaagctttaatatatgtttgcagtgctgtgcatgttggttgggaagcattttgtaacttgaaaaggagaaaggaacttggaattcaggtttctcaaattaccaaaatccttctgaggaaaaattgtattatgttggcatgtgctttttttttttcgattggcagtgttgatggaagtctcatctatgttatcttcagaacacatttagagactcctacacctctgaaaacttgagagtcagtactgtttggttaatttatacattaatcaggtgtgtatcaattatcagcaatgtgcaaagctccatgtatgccactcccggtattgcaaaaaattataatccacatttcctgcccttttccagttatataacaatatctgagggatgccaaaaatcttgtgtggggtaaatttccagttgaatggtataaaattacatcatttggtacacagggtcaaatagggcaaataattttgtctttgtataatagatttgatatttaaagtcactggaaataggacaagttaatggatgtttttatattttaatagaatcatttatttctatgtgttatgaaattcacttaatgataaatttttcaacatacttgccattagaaaacaaagtattgctaagtactataacatattggccactaaaattcatattgagattatcttggtttcttggaagagataggaatgagttcttatctagtgttgcaggccagcaaatacagaggtggtttaatcaaacagctctagtatgaagcaagagtaaagactaaggtttcgagagcattcctactcacataagtgaagaaatctgtcagataggaatctaaatatttatagtgagattgtgaaagcaaccttaaagttttgaagaagactgatgagactaggtgctttgcttcctttcatcaggtatctttctgtggcatttgagaacagaaaccaagaaacatggtaattactaaattatgaggctttgctttttgtttgcttttaagtagaaaaacatgttggcaacattgagttttggagttgattgagataatatgacttaactagttttgtcattccatttgttaaagatacagtcaccaagaatgttttgagttttttgaaagaccccaatttaagccttgcttatttttaaattatttccattcagtgatgttggatgtatatcagttatttagtaaataatctcaataaattttgtgctgtggcctttgcta

SEQ ID NO: 72960 - DNA, 985 bp, Homo sapiens
  misc_feature (77)..(77): n is a, c, g, or t
acgcccgggcagccacggcggcggggccgcggcgggcgccggctcagcccgcccctttctcccgccgcctccccgcnccgccccgcgccgcgccggccgctgtcagctccctcagcgtccggccgaggcgcggtgtatgctgagccgctgccgcagccggctgctccacgtcctgggccttagcttcctgctgcagacccgccggccgattctcctctgctctccacgtctcatgaagccgctggtcgtgttcgtcctcggcggccccggcgccggcaaggggacccagtgcgcccgcatcgtcgagaaatatggctacacacacctttctgcaggagagctgcttcgtgatgaaaggaagaacccagattcacagtatggtgaacttattgaaaagtacattaaagaaggaaagattgtaccagttgagataaccatcagtttattaaagagggaaatggatcagacaatggctgccaatgctcagaagaataaattcttgattgatgggtttccaagaaatcaagacaaccttcaaggatggaacaagaccatggatgggaaggcagatgtatctttcgttctcttttttgactgtaataatgaggtaatgaaaatcttcatctgcccacataggctttaagcaactgttagtcaactattagaaaaaacaaaggattttttaacttatattttatattggcagcagtgttttttgaattggtagattggatggacggaacagcactgtcttgctgttggagtattaaaaactatttggcattagcagccttgtggagctaaattttcctttattttcaaaataacaagaatcagttttgatttttaaaaaataagaattgacatacataataatattaggtaatgaagctgaactactttcttaggtagacattattatcaaagagtattttgccttagggtgttgtttactggaagagaaacacgtttctgagaagttggg

SEQ ID NO: 72961 - DNA, 553 bp, Homo sapiens
  misc_feature (553)..(553): n is a, c, g, or t
agcagtggtatcaacgcagagtgcccattacggcgggagattaataaaagcttaggattaattagaagaagcaatctagttaaatttcccatttgtattttattttcttgaatacttttttcatagttatttgtttaaaaagatttaaaaatcattgcactttggtcagaaaaataataaatatatcttataaatgaaaaaaaaaaaacaaaaaaaaaaaaaaaaattgtgtgtggggcggccggggcccggaaaaagtttttaaaccctttcgttgggggcgcgcgggcggggccccagtaggtgtaatggtggcactatgggcgtcatacagcgtggttcccaagaggaagaaatcgctcgggcctagcgaactagtgtgggtgtggggtttctccacccaatataaaaaaaaaagcgccggcggggaaacaaccgcggggttttctggaaaccaaattccagagatagggaggtccggaaaggcacatagggtttcttaccacgcgcgggtcccagagggagcggatataaatcagcgcaggggggggan

SEQ ID NO: 72962 - DNA, 3274 bp, Homo sapiens
  misc_feature (77)..(77): n is a, c, g, or t
  misc_feature (3274)..(3274): n is a, c, g, or t
acgcccgggcagccacggcggcggggccgcggcgggcgccggctcagcccgcccctttctcccgccgcctccccgcnccgccccgcgccgcgccggccgctgtcagctccctcagcgtccggccgaggcgcggtgtatgctgagccgctgccgcagccggctgctccacgtcctgggccttagcttcctgctgcagacccgccggccgattctcctctgctctccacgtctcatgaagccgctggtcgtgttcgtcctcggcggccccggcgccggcaaggggacccagtgcgcccgcatcgtcgagaaatatggctacacacacctttctgcaggagagctgcttcgtgatgaaaggaagaacccagattcacagtatggtgaacttattgaaaagtacattaaagaaggaaagattgtaccagttgagataaccatcagtttattaaagagggaaatggatcagacaatggctgccaatgctcagaagaataaattcttgattgatgggtttccaagaaatcaagacaaccttcaaggatggaacaagaccatggatgggaaggcagatgtatctttcgttctcttttttgactgtaataatgagatttgtattgaacgatgtcttgagaggggaaagagtagtggtaggagtgatgacaacagagagagcttggaaaagagaattcagacctaccttcagtcaacaaagccaattattgacttatatgaagaaatggggaaagtcaagaaaatagatgcttctaaatctgttgatgaagtttttgatgaagttgtgcagatttttgacaaggaaggctaattctaaacctgaaagcatccttgaaatcatgcttgaatattgctttgatagctgctatcatgacccctttttaaggcaattctaatctttcataactacatctcaattagtggctggaaagtacatggtaaaacaaagtaaatttttttatgttcttttttttggtcacaggagtagacagtgaattcaggtttaacttcaccttagttatggtgctcaccaaacgaagggtatcagctatttttttttaaattcaaaaagaatatcccttttatagtttgtgccttctgtgagcaaaactttttagtacgcgtatatatccctctagtaatcacaacattttaggatttagggatacccgcttcctctttttcttgcaagttttaaatttccaaccttaagtgaatttgtggaccaaatttcaaaggaactttttgtgtagtcagttcttgcacaatgtgtttggtaaacaaactcaaaatggattcttaggagcattttagtgtttattaaataactgaccatttgctgtagaaagatgagaaaacttaagctttgttttactacaacttgtacaaagttgtatgacagggcatattctttgcttccaagatttgggttgggggcactaggggttcagagcctggcagaattgtcagctttagtctgacataatctaagggtatggggcaaggatcacatctaatgcttgtgttccttatactctattatatagtgttattcatgattcagctgatcttaacaaaattcgtagcagtggaaccttgaaatgcatgtggctagatttatgctaaaatgattctcagttagcattttagtaacacttcaaaggtttttttttgtttgttttctagacttaataaaagcttaggattaattagaagaagcaatctagttaaatttcccatttgtattttattttcttgaatacttttttcatagttatttgtttaaaaagatttaaaaatcattgcactttggtcagaaaaataataaatatatcttataaatgtttgattcccttccttgctatttttattcagtagatttttgtttggcatcatgttgaagcaccgaaagataaatgatttttaaaaggctatagagtccaaaggaatattcttttacaccaattcttcctttaaaaatctctgaggaatttgttttcgccttacttttttttcttctgtcacaatgctaagtggtatccgaggttcttaatatgagatttaaaatcttaaaatgtttcttattttcagcacttacatcatttggtacacagggtcaaatagggcaaataattttgtctttgtataatagatttgatatttaaagtcactggaaataggacaagttaatggatgtttttatattttaatagaatcatttatttctatgtgttatgaaattcacttaatgataaatttttcaacatacttgccattagaaaacaaagtattgctaagtactataacatattggccactaaaattcatattgagattatcttggtttcttggaagagataggaatgagttcttatctagtgttgcaggccagcaaatacagaggtggtttaatcaaacagctctagtatgaagcaagagtaaagactaaggtttcgagagcattcctactcacataagtgaagaaatctgtcagataggaatctaaatatttatagtgagattgtgaaagcaaccttaaagttttgaagaagactgatgagactaggtgctttgcttcctttcatcaggtatctttctgtggcatttgagaacagaaaccaagaaacatggtaattactaaattatgaggctttgctttttgtttgcttttaagtagaaaaacatgttggcaacattgagttttggagttgattgagataatatgacttaactagttttgtcattccatttgttaaagatacagtcaccaagaatgttttgagttttttgaaagaccccaatttaagccttgcttatttttaaattatttccattcagtgatgttggatgtatatcagttatttagtaaataatctcaataaattttgtgctgtggcctttgctaaaaaaaaaaaaacaaaaaaaaaaaaaaaaattgtgtgtggggcggccggggcccggaaaaagtttttaaaccctttcgttgggggcgcgcgggcggggccccagtaggtgtaatggtggcactatgggcgtcatacagcgtggttcccaagaggaagaaatcgctcgggcctagcgaactagtgtgggtgtggggtttctccacccaatataaaaaaaaaagcgccggcggggaaacaaccgcggggttttctggaaaccaaattccagagatagggaggtccggaaaggcacatagggtttcttaccacgcgcgggtcccagagggagcggatataaatcagcgcaggggggggan

SEQ ID NO: 72963 - DNA, 3053 bp, Homo sapiens
  misc_feature (77)..(77): n is a, c, g, or t
acgcccgggcagccacggcggcggggccgcggcgggcgccggctcagcccgcccctttctcccgccgcctccccgcnccgccccgcgccgcgccggccgctgtcagctccctcagcgtccggccgaggcgcggtgtatgctgagccgctgccgcagccggctgctccacgtcctgggccttagcttcctgctgcagacccgccggccgattctcctctgctctccacgtctcatgaagccgctggtcgtgttcgtcctcggcggccccggcgccggcaaggggacccagtgcgcccgcatcgtcgagaaatatggctacacacacctttctgcaggagagctgcttcgtgatgaaaggaagaacccagattcacagtatggtgaacttattgaaaagtacattaaagaaggaaagattgtaccagttgagataaccatcagtttattaaagagggaaatggatcagacaatggctgccaatgctcagaagaataaattcttgattgatgggtttccaagaaatcaagacaaccttcaaggatggaacaagaccatggatgggaaggcagatgtatctttcgttctcttttttgactgtaataatgagatttgtattgaacgatgtcttgagaggggaaagagtagtggtaggagtgatgacaacagagagagcttggaaaagagaattcagacctaccttcagtcaacaaagccaattattgacttatatgaagaaatggggaaagtcaagaaaatagatgcttctaaatctgttgatgaagtttttgatgaagttgtgcagatttttgacaaggaaggctaattctaaacctgaaagcatccttgaaatcatgcttgaatattgctttgatagctgctatcatgacccctttttaaggcaattctaatctttcataactacatctcaattagtggctggaaagtacatggtaaaacaaagtaaatttttttatgttcttttttttggtcacaggagtagacagtgaattcaggtttaacttcaccttagttatggtgctcaccaaacgaagggtatcagctatttttttttaaattcaaaaagaatatcccttttatagtttgtgccttctgtgagcaaaactttttagtacgcgtatatatccctctagtaatcacaacattttaggatttagggatacccgcttcctctttttcttgcaagttttaaatttccaaccttaagtgaatttgtggaccaaatttcaaaggaactttttgtgtagtcagttcttgcacaatgtgtttggtaaacaaactcaaaatggattcttaggagcattttagtgtttattaaataactgaccatttgctgtagaaagatgagaaaacttaagctttgttttactacaacttgtacaaagttgtatgacagggcatattctttgcttccaagatttgggttgggggcactaggggttcagagcctggcagaattgtcagctttagtctgacataatctaagggtatggggcaaggatcacatctaatgcttgtgttccttatactctattatatagtgttattcatgattcagctgatcttaacaaaattcgtagcagtggaaccttgaaatgcatgtggctagatttatgctaaaatgattctcagttagcattttagtaacacttcaaaggtttttttttgtttgttttctagacttaataaaagcttaggattaattagaagaagcaatctagttaaatttcccatttgtattttattttcttgaatacttttttcatagttatttgtttaaaaagatttaaaaatcattgcactttggtcagaaaaataataaatatatcttataaatgtttgattcccttccttgctatttttattcagtagatttttgtttggcatcatgttgaagcaccgaaagataaatgatttttaaaaggctatagagtccaaaggaatattcttttacaccaattcttcctttaaaaatctctgaggaatttgttttcgccttacttttttttcttctgtcacaatgctaagtggtatccgaggttcttaatatgagatttaaaatcttaaaatgtttcttattttcagcacttacatcatttggtacacagggtcaaatagggcaaataattttgtctttgtataatagatttgatatttaaagtcactggaaataggacaagttaatggatgtttttatattttaatagaatcatttatttctatgtgttatgaaattcacttaatgataaatttttcaacatacttgccattagaaaacaaagtattgctaagtactataacatattggccactaaaattcatattgagattatcttggtttcttggaagagataggaatgagttcttatctagtgttgcaggccagcaaatacagaggtggtttaatcaaacagctctagtatgaagcaagagtaaagactaaggtttcgagagcattcctactcacataagtgaagaaatctgtcagataggaatctaaatatttatagtgagattgtgaaagcaaccttaaagttttgaagaagactgatgagactaggtgctttgcttcctttcatcaggtatctttctgtggcatttgagaacagaaaccaagaaacatggtaattactaaattatgaggctttgctttttgtttgcttttaagtagaaaaacatgttggcaacattgagttttggagttgattgagataatatgacttaactagttttgtcattccatttgttaaagatacagtcaccaagaatgttttgagttttttgaaagaccccaatttaagccttgcttatttttaaattatttccattcagtgatgttggatgtatatcagttatttagtaaataatctcaataaattttgtgctgtggcctttgctactttaaaaaaaaaaaaaaaactcaagggggggccgggccccaattcccttaagggggcgattaaaatacagggcccggtttaacacgtggacgggaaaccctgggttccccaattaacgcttggacaattcctttt

SEQ ID NO: 72964 - DNA, 2923 bp, Homo sapiens
  misc_feature (77)..(77): n is a, c, g, or t
  misc_feature (2895)..(2897): n is a, c, g, or t
  misc_feature (2900)..(2903): n is a, c, g, or t
  misc_feature (2905)..(2905): n is a, c, g, or t
acgcccgggcagccacggcggcggggccgcggcgggcgccggctcagcccgcccctttctcccgccgcctccccgcnccgccccgcgccgcgccggccgctgtcagctccctcagcgtccggccgaggcgcggtgtatgctgagccgctgccgcagccggctgctccacgtcctgggccttagcttcctgctgcagacccgccggccgattctcctctgctctccacgtctcatgaagccgctggtcgtgttcgtcctcggcggccccggcgccggcaaggggacccagtgcgcccgcatcgtcgagaaatatggctacacacacctttctgcaggagagctgcttcgtgatgaaaggaagaacccagattcacagtatggtgaacttattgaaaagtacattaaagaaggaaagattgtaccagttgagataaccatcagtttattaaagagggaaatggatcagacaatggctgccaatgctcagaagaataaattcttgattgatgggtttccaagaaatcaagacaaccttcaaggatggaacaagaccatggatgggaaggcagatgtatctttcgttctcttttttgactgtaataatgagatttgtattgaacgatgtcttgagaggggaaagagtagtggtaggagtgatgacaacagagagagcttggaaaagagaattcagacctaccttcagtcaacaaagccaattattgacttatatgaagaaatggggaaagtcaagaaaatagatgcttctaaatctgttgatgaagtttttgatgaagttgtgcagatttttgacaaggaaggctaattctaaacctgaaagcatccttgaaatcatgcttgaatattgctttgatagctgctatcatgacccctttttaaggcaattctaatctttcataactacatctcaattagtggctggaaagtacatggtaaaacaaagtaaatttttttatgttcttttttttggtcacaggagtagacagtgaattcaggtttaacttcaccttagttatggtgctcaccaaacgaagggtatcagctatttttttttaaattcaaaaagaatatcccttttatagtttgtgccttctgtgagcaaaactttttagtacgcgtatatatccctctagtaatcacaacattttaggatttagggatacccgcttcctctttttcttgcaagttttaaatttccaaccttaagtgaatttgtggaccaaatttcaaaggaactttttgtgtagtcagttcttgcacaatgtgtttggtaaacaaactcaaaatggattcttaggagcattttagtgtttattaaataactgaccatttgctgtagaaagatgagaaaacttaagctttgttttactacaacttgtacaaagttgtatgacagggcatattctttgcttccaagatttgggttgggggcactaggggttcagagcctggcagaattgtcagctttagtctgacataatctaagggtatggggcaaggatcacatctaatgcttgtgttccttatactctattatatagtgttattcatgattcagctgatcttaacaaaattcgtagcagtggaaccttgaaatgcatgtggctagatttatgctaaaatgattctcagttagcattttagtaacacttcaaaggtttttttttgtttgttttctagacttaataaaagcttaggattaattagaagaagcaatctagttaaatttcccatttgtattttattttcttgaatacttttttcatagttatttgtttaaaaagatttaaaaatcattgcactttggtcagaaaaataataaatatatcttataaatgtttgattcccttccttgctatttttattcagtagatttttgtttggcatcatgttgaagcaccgaaagataaatgatttttaaaaggctatagagtccaaaggaatattcttttacaccaattcttcctttaaaaatctctgaggaatttgttttcgccttacttttttttcttctgtcacaatgctaagtggtatccgaggttcttaatatgagatttaaaatcttaaaatgtttcttattttcagcacttacatcatttggtacacagggtcaaatagggcaaataattttgtctttgtataatagatttgatatttaaagtcactggaaataggacaagttaatggatgtttttatattttaatagaatcatttatttctatgtgttatgaaattcacttaatgataaatttttcaacatacttgccattagaaaacaaagtattgctaagtactataacatattggccactaaaattcatattgagattatcttggtttcttggaagagataggaatgagttcttatctagtgttgcaggccagcaaatacagaggtggtttaatcaaacagctctagtatgaagcaagagtaaagactaaggtttcgagagcattcctactcacataagtgaagaaatctgtcagataggaatctaaatatttatagtgagattgtgaaagcaaccttaaagttttgaagaagactgatgagactaggtgctttgcttcctttcatcaggtatctttctgtggcatttgagaacagaaaccaagaaacatggtaattactaaattatgaggctttgctttttgtttgcttttaagtagaaaaacatgttggcaacattgagttttggagttgattgagataatatgacttaactagttttgtcattccatttgttaaagatacagtcaccaagaatgttttgagttttttgaaagaaaatttattgagattatttactaaataattgatatacatccaacatcactgaatggaaataatttaaaaataagcaaggcttaaattnnntcnnnncnacatcactgaatgtcgac

SEQ ID NO: 72965 - DNA, 2980 bp, Homo sapiens
  misc_feature (77)..(77): n is a, c, g, or t
  misc_feature (2952)..(2954): n is a, c, g, or t
  misc_feature (2957)..(2960): n is a, c, g, or t
  misc_feature (2962)..(2962): n is a, c, g, or t
acgcccgggcagccacggcggcggggccgcggcgggcgccggctcagcccgcccctttctcccgccgcctccccgcnccgccccgcgccgcgccggccgctgtcagctccctcagcgtccggccgaggcgcggtgtatgctgagccgctgccgcagccggctgctccacgtcctgggccttagcttcctgctgcagacccgccggccgattctcctctgctctccacgtctcatgaagccgctggtcgtgttcgtcctcggcggccccggcgccggcaaggggacccagtgcgcccgcatcgtcgagaaatatggctacacacacctttctgcaggagagctgcttcgtgatgaaaggaagaacccagattcacagtatggtgaacttattgaaaagtacattaaagaaggaaagattgtaccagttgagataaccatcagtttattaaagagggaaatggatcagacaatggctgccaatgctcagaagaataaattcttgattgatgggtttccaagaaatcaagacaaccttcaaggatggaacaagaccatggatgggaaggcagatgtatctttcgttctcttttttgactgtaataatgagatttgtattgaacgatgtcttgagaggggaaagagtagtggtaggagtgatgacaacagagagagcttggaaaagagaattcagacctaccttcagtcaacaaagccaattattgacttatatgaagaaatggggaaagtcaagaaaatagatgcttctaaatctgttgatgaagtttttgatgaagttgtgcagatttttgacaaggaaggctaattctaaacctgaaagcatccttgaaatcatgcttgaatattgctttgatagctgctatcatgacccctttttaaggcaattctaatctttcataactacatctcaattagtggctggaaagtacatggtaaaacaaagtaaatttttttatgttcttttttttggtcacaggagtagacagtgaattcaggtttaacttcaccttagttatggtgctcaccaaacgaagggtatcagctatttttttttaaattcaaaaagaatatcccttttatagtttgtgccttctgtgagcaaaactttttagtacgcgtatatatccctctagtaatcacaacattttaggatttagggatacccgcttcctctttttcttgcaagttttaaatttccaaccttaagtgaatttgtggaccaaatttcaaaggaactttttgtgtagtcagttcttgcacaatgtgtttggtaaacaaactcaaaatggattcttaggagcattttagtgtttattaaataactgaccatttgctgtagaaagatgagaaaacttaagctttgttttactacaacttgtacaaagttgtatgacagggcatattctttgcttccaagatttgggttgggggcactaggggttcagagcctggcagaattgtcagctttagtctgacataatctaagggtatggggcaaggatcacatctaatgcttgtgttccttatactctattatatagtgttattcatgattcagctgatcttaacaaaattcgtagcagtggaaccttgaaatgcatgtggctagatttatgctaaaatgattctcagttagcattttagtaacacttcaaaggtttttttttgtttgttttctagacttaataaaagcttaggattaattagaagaagcaatctagttaaatttcccatttgtattttattttcttgaatacttttttcatagttatttgtttaaaaagatttaaaaatcattgcactttggtcagaaaaataataaatatatcttataaatgtttgattcccttccttgctatttttattcagtagatttttgtttggcatcatgttgaagcaccgaaagataaatgatttttaaaaggctatagagtccaaaggaatattcttttacaccaattcttcctttaaaaatctctgaggaatttgttttcgccttacttttttttcttctgtcacaatgctaagtggtatccgaggttcttaatatgagatttaaaatcttaaaatgtttcttattttcagcacttacatcatttggtacacagggtcaaatagggcaaataattttgtctttgtataatagatttgatatttaaagtcactggaaataggacaagttaatggatgtttttatattttaatagaatcatttatttctatgtgttatgaaattcacttaatgataaatttttcaacatacttgccattagaaaacaaagtattgctaagtactataacatattggccactaaaattcatattgagattatcttggtttcttggaagagataggaatgagttcttatctagtgttgcaggccagcaaatacagaggtggtttaatcaaacagctctagtatgaagcaagagtaaagactaaggtttcgagagcattcctactcacataagtgaagaaatctgtcagataggaatctaaatatttatagtgagattgtgaaagcaaccttaaagttttgaagaagactgatgagactaggtgctttgcttcctttcatcaggtatctttctgtggcatttgagaacagaaaccaagaaacatggtaattactaaattatgaggctttgctttttgtttgcttttaagtagatagttttgtcattccatttgttaaagatacagtcaccaagaatgttttgagttttttgaaagaccccaatttaagccttgcttatttttaaattatttccattcagtgatgttggatgtatatcagttatttagtaaataatctcaataaattttgtgctgtggcctttgctaaaaatttattgagattatttactaaataattgatatacatccaacatcactgaatggaaataatttaaaaataagcaaggcttaaattnnntcnnnncnacatcactgaatgtcgac

SEQ ID NO: 72966 - DNA, 2863 bp, Homo sapiens
  misc_feature (77)..(77): n is a, c, g, or t
acgcccgggcagccacggcggcggggccgcggcgggcgccggctcagcccgcccctttctcccgccgcctccccgcnccgccccgcgccgcgccggccgctgtcagctccctcagcgtccggccgaggcgcggtgtatgctgagccgctgccgcagccggctgctccacgtcctgggccttagcttcctgctgcagacccgccggccgattctcctctgctctccacgtctcatgaagccgctggtcgtgttcgtcctcggcggccccggcgccggcaaggggacccagtgcgcccgcatcgtcgagaaatatggctacacacacctttctgcaggagagctgcttcgtgatgaaaggaagaacccagattcacagtatggtgaacttattgaaaagtacattaaagaaggaaagattgtaccagttgagataaccatcagtttattaaagagggaaatggatcagacaatggctgccaatgctcagaagaataaattcttgattgatgggtttccaagaaatcaagacaaccttcaaggatggaacaagaccatggatgggaaggcagatgtatctttcgttctcttttttgactgtaataatgagatttgtattgaacgatgtcttgagaggggaaagagtagtggtaggagtgatgacaacagagagagcttggaaaagagaattcagacctaccttcagtcaacaaagccaattattgacttatatgaagaaatggggaaagtcaagaaaatagatgcttctaaatctgttgatgaagtttttgatgaagttgtgcagatttttgacaaggaaggctaattctaaacctgaaagcatccttgaaatcatgcttgaatattgctttgatagctgctatcatgacccctttttaaggcaattctaatctttcataactacatctcaattagtggctggaaagtacatggtaaaacaaagtaaatttttttatgttcttttttttggtcacaggagtagacagtgaattcaggtttaacttcaccttagttatggtgctcaccaaacgaagggtatcagctatttttttttaaattcaaaaagaatatcccttttatagtttgtgccttctgtgagcaaaactttttagtacgcgtatatatccctctagtaatcacaacattttaggatttagggatacccgcttcctctttttcttgcaagttttaaatttccaaccttaagtgaatttgtggaccaaatttcaaaggaactttttgtgtagtcagttcttgcacaatgtgtttggtaaacaaactcaaaatggattcttaggagcattttagtgtttattaaataactgaccatttgctgtagaaagatgagaaaacttaagctttgttttactacaacttgtacaaagttgtatgacagggcatattctttgcttccaagatttgggttgggggcactaggggttcagagcctggcagaattgtcagctttagtctgacataatctaagggtatggggcaaggatcacatctaatgcttgtgttccttatactctattatatagtgttattcatgattcagctgatcttaacaaaattcgtagcagtggaaccttgaaatgcatgtggctagatttatgctaaaatgattctcagttagcattttagtaacacttcaaaggtttttttttgtttgttttctagacttaataaaagcttaggattaattagaagaagcaatctagttaaatttcccatttgtattttattttcttgaatacttttttcatagttatttgtttaaaaagatttaaaaatcattgcactttggtcagaaaaataataaatatatcttataaatgtttgattcccttccttgctatttttattcagtagatttttgtttggcatcatgttgaagcaccgaaagataaatgatttttaaaaggctatagagtccaaaggaatattcttttacaccaattcttcctttaaaaatctctgaggaatttgttttcgccttacttttttttcttctgtcacaatgctaagtggtatccgaggttcttaatatgagatttaaaatcttaaaatgtttcttattttcagcacttacatcatttggtacacagggtcaaatagggcaaataattttgtctttgtataatagatttgatatttaaagtcactggaaataggacaagttaatggatgtttttatattttaatagaatcatttatttctatgtgttatgaaattcacttaatgataaatttttcaacatacttgccattagaaaacaaagtattgctaagtactataacatattggccactatctagtgttgcaggccagcaaatacagaggtggtttaatcaaacagctctagtatgaagcaagagtaaagactaaggtttcgagagcattcctactcacataagtgaagaaatctgtcagataggaatctaaatatttatagtgagattgtgaaagcaaccttaaagttttgaagaagactgatgagactaggtgctttgcttcctttcatcaggtatctttctgtggcatttgagaacagaaaccaagaaacatggtaattactaaattatgaggctttgctttttgtttgcttttaagtagaaaaacatgttggcaacattgagttttggagttgattgagataatatgacttaactagttttgtcattccatttgttaaagatacagtcaccaagaatgttttgagttttttgaaagaccccaatttaagccttgcttatttttaaattatttccattcagtgatgttggatgtatatcagttatttagtaaataatctcaataaattttgtgctgtggcctttgcta

SEQ ID NO: 72967 - DNA, 2578 bp, Homo sapiens
ctttttattacagtttgaaaaaaaataagcaggaaaaactgagtcatgaatgaattcttattatgctctgtacttatttaacctagtttatataaattgaaccacatgtttacgtttaaaaggactttgcatgttgattaatgaattagacacattgggtttattgcagggtttttttggtcatctctttaaactcttgttttctttgcaggttaaaagaatggcaaattcatatctatatttttaataactttgtatctctttttagatttgtattgaacgatgtcttgagaggggaaagagtagtggtaggagtgatgacaacagagagagcttggaaaagagaattcagacctaccttcagtcaacaaagccaattattgacttatatgaagaaatggggaaagtcaagaaaatagatgcttctaaatctgttgatgaagtttttgatgaagttgtgcagatttttgacaaggaaggctaattctaaacctgaaagcatccttgaaatcatgcttgaatattgctttgatagctgctatcatgacccctttttaaggcaattctaatctttcataactacatctcaattagtggctggaaagtacatggtaaaacaaagtaaatttttttatgttcttttttttggtcacaggagtagacagtgaattcaggtttaacttcaccttagttatggtgctcaccaaacgaagggtatcagctatttttttttaaattcaaaaagaatatcccttttatagtttgtgccttctgtgagcaaaactttttagtacgcgtatatatccctctagtaatcacaacattttaggatttagggatacccgcttcctctttttcttgcaagttttaaatttccaaccttaagtgaatttgtggaccaaatttcaaaggaactttttgtgtagtcagttcttgcacaatgtgtttggtaaacaaactcaaaatggattcttaggagcattttagtgtttattaaataactgaccatttgctgtagaaagatgagaaaacttaagctttgttttactacaacttgtacaaagttgtatgacagggcatattctttgcttccaagatttgggttgggggcactaggggttcagagcctggcagaattgtcagctttagtctgacataatctaagggtatggggcaaggatcacatctaatgcttgtgttccttatactctattatatagtgttattcatgattcagctgatcttaacaaaattcgtagcagtggaaccttgaaatgcatgtggctagatttatgctaaaatgattctcagttagcattttagtaacacttcaaaggtttttttttgtttgttttctagacttaataaaagcttaggattaattagaagaagcaatctagttaaatttcccatttgtattttattttcttgaatacttttttcatagttatttgtttaaaaagatttaaaaatcattgcactttggtcagaaaaataataaatatatcttataaatgtttgattcccttccttgctatttttattcagtagatttttgtttggcatcatgttgaagcaccgaaagataaatgatttttaaaaggctatagagtccaaaggaatattcttttacaccaattcttcctttaaaaatctctgaggaatttgttttcgccttacttttttttcttctgtcacaatgctaagtggtatccgaggttcttaatatgagatttaaaatcttaaaatgtttcttattttcagcacttacatcatttggtacacagggtcaaatagggcaaataattttgtctttgtataatagatttgatatttaaagtcactggaaataggacaagttaatggatgtttttatattttaatagaatcatttatttctatgtgttatgaaattcacttaatgataaatttttcaacatacttgccattagaaaacaaagtattgctaagtactataacatattggccactaaaattcatattgagattatcttggtttcttggaagagataggaatgagttcttatctagtgttgcaggccagcaaatacagaggtggtttaatcaaacagctctagtatgaagcaagagtaaagactaaggtttcgagagcattcctactcacataagtgaagaaatctgtcagataggaatctaaatatttatagtgagattgtgaaagcaaccttaaagttttgaagaagactgatgagactaggtgctttgcttcctttcatcaggtatctttctgtggcatttgagaacagaaaccaagaaacatggtaattactaaattatgaggctttgctttttgtttgcttttaagtagaaaaacatgttggcaacattgagttttggagttgattgagataatatgacttaactagttttgtcattccatttgttaaagatacagtcaccaagaatgttttgagttttttgaaagaccccaatttaagccttgcttatttttaaattatttccattcagtgatgttggatgtatatcagttatttagtaaataatctcaataaattttgtgctgtggcctttgcta

SEQ ID NO: 72968 - DNA, 2243 bp, Homo sapiens
gcgagggccgctcgcgatctagaactaggtcaacaaagccaattattgacttatatgaagaaatggggaaagtcaagaaaatagatgcttctaaatctgttgatgaagtttttgatgaagttgtgcagatttttgacaaggaaggctaattctaaacctgaaagcatccttgaaatcatgcttgaatattgctttgatagctgctatcatgacccctttttaaggcaattctaatctttcataactacatctcaattagtggctggaaagtacatggtaaaacaaagtaaatttttttatgttcttttttttggtcacaggagtagacagtgaattcaggtttaacttcaccttagttatggtgctcaccaaacgaagggtatcagctatttttttttaaattcaaaaagaatatcccttttatagtttgtgccttctgtgagcaaaactttttagtacgcgtatatatccctctagtaatcacaacattttaggatttagggatacccgcttcctctttttcttgcaagttttaaatttccaaccttaagtgaatttgtggaccaaatttcaaaggaactttttgtgtagtcagttcttgcacaatgtgtttggtaaacaaactcaaaatggattcttaggagcattttagtgtttattaaataactgaccatttgctgtagaaagatgagaaaacttaagctttgttttactacaacttgtacaaagttgtatgacagggcatattctttgcttccaagatttgggttgggggcactaggggttcagagcctggcagaattgtcagctttagtctgacataatctaagggtatggggcaaggatcacatctaatgcttgtgttccttatactctattatatagtgttattcatgattcagctgatcttaacaaaattcgtagcagtggaaccttgaaatgcatgtggctagatttatgctaaaatgattctcagttagcattttagtaacacttcaaaggtttttttttgtttgttttctagacttaataaaagcttaggattaattagaagaagcaatctagttaaatttcccatttgtattttattttcttgaatacttttttcatagttatttgtttaaaaagatttaaaaatcattgcactttggtcagaaaaataataaatatatcttataaatgtttgattcccttccttgctatttttattcagtagatttttgtttggcatcatgttgaagcaccgaaagataaatgatttttaaaaggctatagagtccaaaggaatattcttttacaccaattcttcctttaaaaatctctgaggaatttgttttcgccttacttttttttcttctgtcacaatgctaagtggtatccgaggttcttaatatgagatttaaaatcttaaaatgtttcttattttcagcacttacatcatttggtacacagggtcaaatagggcaaataattttgtctttgtataatagatttgatatttaaagtcactggaaataggacaagttaatggatgtttttatattttaatagaatcatttatttctatgtgttatgaaattcacttaatgataaatttttcaacatacttgccattagaaaacaaagtattgctaagtactataacatattggccactaaaattcatattgagattatcttggtttcttggaagagataggaatgagttcttatctagtgttgcaggccagcaaatacagaggtggtttaatcaaacagctctagtatgaagcaagagtaaagactaaggtttcgagagcattcctactcacataagtgaagaaatctgtcagataggaatctaaatatttatagtgagattgtgaaagcaaccttaaagttttgaagaagactgatgagactaggtgctttgcttcctttcatcaggtatctttctgtggcatttgagaacagaaaccaagaaacatggtaattactaaattatgaggctttgctttttgtttgcttttaagtagaaaaacatgttggcaacattgagttttggagttgattgagataatatgacttaactagttttgtcattccatttgttaaagatacagtcaccaagaatgttttgagttttttgaaagaccccaatttaagccttgcttatttttaaattatttccattcagtgatgttggatgtatatcagttatttagtaaataatctcaataaattttgtgctgtggcctttgcta

SEQ ID NO: 72969 - DNA, 2381 bp, Homo sapiens
agcggctgcctagtatcttccgtactcttcgtcgactgctgactaatgagacttggctagttgaacgcactgtcgtctgcaggagggagacgacgacgctcgtgtgtatgcgtacgctgactgacaagagagagagcttggaaaagagaattcagacctaccttcagtcaacaaagccaattattgacttatatgaagaaatggggaaagtcaagaaaatagatgcttctaaatctgttgatgaagtttttgatgaagttgtgcagatttttgacaaggaaggctaattctaaacctgaaagcatccttgaaatcatgcttgaatattgctttgatagctgctatcatgacccctttttaaggcaattctaatctttcataactacatctcaattagtggctggaaagtacatggtaaaacaaagtaaatttttttatgttcttttttttggtcacaggagtagacagtgaattcaggtttaacttcaccttagttatggtgctcaccaaacgaagggtatcagctatttttttttaaattcaaaaagaatatcccttttatagtttgtgccttctgtgagcaaaactttttagtacgcgtatatatccctctagtaatcacaacattttaggatttagggatacccgcttcctctttttcttgcaagttttaaatttccaaccttaagtgaatttgtggaccaaatttcaaaggaactttttgtgtagtcagttcttgcacaatgtgtttggtaaacaaactcaaaatggattcttaggagcattttagtgtttattaaataactgaccatttgctgtagaaagatgagaaaacttaagctttgttttactacaacttgtacaaagttgtatgacagggcatattctttgcttccaagatttgggttgggggcactaggggttcagagcctggcagaattgtcagctttagtctgacataatctaagggtatggggcaaggatcacatctaatgcttgtgttccttatactctattatatagtgttattcatgattcagctgatcttaacaaaattcgtagcagtggaaccttgaaatgcatgtggctagatttatgctaaaatgattctcagttagcattttagtaacacttcaaaggtttttttttgtttgttttctagacttaataaaagcttaggattaattagaagaagcaatctagttaaatttcccatttgtattttattttcttgaatacttttttcatagttatttgtttaaaaagatttaaaaatcattgcactttggtcagaaaaataataaatatatcttataaatgtttgattcccttccttgctatttttattcagtagatttttgtttggcatcatgttgaagcaccgaaagataaatgatttttaaaaggctatagagtccaaaggaatattcttttacaccaattcttcctttaaaaatctctgaggaatttgttttcgccttacttttttttcttctgtcacaatgctaagtggtatccgaggttcttaatatgagatttaaaatcttaaaatgtttcttattttcagcacttacatcatttggtacacagggtcaaatagggcaaataattttgtctttgtataatagatttgatatttaaagtcactggaaataggacaagttaatggatgtttttatattttaatagaatcatttatttctatgtgttatgaaattcacttaatgataaatttttcaacatacttgccattagaaaacaaagtattgctaagtactataacatattggccactaaaattcatattgagattatcttggtttcttggaagagataggaatgagttcttatctagtgttgcaggccagcaaatacagaggtggtttaatcaaacagctctagtatgaagcaagagtaaagactaaggtttcgagagcattcctactcacataagtgaagaaatctgtcagataggaatctaaatatttatagtgagattgtgaaagcaaccttaaagttttgaagaagactgatgagactaggtgctttgcttcctttcatcaggtatctttctgtggcatttgagaacagaaaccaagaaacatggtaattactaaattatgaggctttgctttttgtttgcttttaagtagaaaaacatgttggcaacattgagttttggagttgattgagataatatgacttaactagttttgtcattccatttgttaaagatacagtcaccaagaatgttttgagttttttgaaagaccccaatttaagccttgcttatttttaaattatttccattcagtgatgttggatgtatatcagttatttagtaaataatctcaataaattttgtgctgtggcctttgcta

SEQ ID NO: 72970 - DNA, 2359 bp, Homo sapiens
gatttttgtatttttagtagagacggggttttgccatgttggccaggctggtcttgaactcctgaactcaagtggtcttcccacctcgacctcccaaagtgctgggattacagatgtgagccaccgcgccccgccaaatttgattatttttaataagaacttagctgtatggtattttaacagtacctgcttttaaaattattatcatctttttcctttacaggtttttgatgaagttgtgcagatttttgacaaggaaggctaattctaaacctgaaagcatccttgaaatcatgcttgaatattgctttgatagctgctatcatgacccctttttaaggcaattctaatctttcataactacatctcaattagtggctggaaagtacatggtaaaacaaagtaaatttttttatgttcttttttttggtcacaggagtagacagtgaattcaggtttaacttcaccttagttatggtgctcaccaaacgaagggtatcagctatttttttttaaattcaaaaagaatatcccttttatagtttgtgccttctgtgagcaaaactttttagtacgcgtatatatccctctagtaatcacaacattttaggatttagggatacccgcttcctctttttcttgcaagttttaaatttccaaccttaagtgaatttgtggaccaaatttcaaaggaactttttgtgtagtcagttcttgcacaatgtgtttggtaaacaaactcaaaatggattcttaggagcattttagtgtttattaaataactgaccatttgctgtagaaagatgagaaaacttaagctttgttttactacaacttgtacaaagttgtatgacagggcatattctttgcttccaagatttgggttgggggcactaggggttcagagcctggcagaattgtcagctttagtctgacataatctaagggtatggggcaaggatcacatctaatgcttgtgttccttatactctattatatagtgttattcatgattcagctgatcttaacaaaattcgtagcagtggaaccttgaaatgcatgtggctagatttatgctaaaatgattctcagttagcattttagtaacacttcaaaggtttttttttgtttgttttctagacttaataaaagcttaggattaattagaagaagcaatctagttaaatttcccatttgtattttattttcttgaatacttttttcatagttatttgtttaaaaagatttaaaaatcattgcactttggtcagaaaaataataaatatatcttataaatgtttgattcccttccttgctatttttattcagtagatttttgtttggcatcatgttgaagcaccgaaagataaatgatttttaaaaggctatagagtccaaaggaatattcttttacaccaattcttcctttaaaaatctctgaggaatttgttttcgccttacttttttttcttctgtcacaatgctaagtggtatccgaggttcttaatatgagatttaaaatcttaaaatgtttcttattttcagcacttacatcatttggtacacagggtcaaatagggcaaataattttgtctttgtataatagatttgatatttaaagtcactggaaataggacaagttaatggatgtttttatattttaatagaatcatttatttctatgtgttatgaaattcacttaatgataaatttttcaacatacttgccattagaaaacaaagtattgctaagtactataacatattggccactaaaattcatattgagattatcttggtttcttggaagagataggaatgagttcttatctagtgttgcaggccagcaaatacagaggtggtttaatcaaacagctctagtatgaagcaagagtaaagactaaggtttcgagagcattcctactcacataagtgaagaaatctgtcagataggaatctaaatatttatagtgagattgtgaaagcaaccttaaagttttgaagaagactgatgagactaggtgctttgcttcctttcatcaggtatctttctgtggcatttgagaacagaaaccaagaaacatggtaattactaaattatgaggctttgctttttgtttgcttttaagtagaaaaacatgttggcaacattgagttttggagttgattgagataatatgacttaactagttttgtcattccatttgttaaagatacagtcaccaagaatgttttgagttttttgaaagaccccaatttaagccttgcttatttttaaattatttccattcagtgatgttggatgtatatcagttatttagtaaataatctcaataaattttgtgctgtggcctttgcta

SEQ ID NO: 72971 - DNA, 1185 bp, Homo sapiens
gcgtccatagtagtgtacaagataagactatagagaacatcatctgcactctctggtgtcagaaaccaagtaacctatagatcataagtcgtctatgagaattagcttctagactataccctatacctctgcctcagttcgtgtcattccaggtacgatctgagtcaaggcatcatgttgaagcaccgaaagataaatgatttttaaaaggctatagagtccaaaggaatattcttttacaccaattcttcctttaaaaatctctgaggaatttgttttcgccttacttttttttcttctgtcacaatgctaagtggtatccgaggttcttaatatgagatttaaaatcttaaaatgtttcttattttcagcacttacatcatttggtacacagggtcaaatagggcaaataattttgtctttgtataatagatttgatatttaaagtcactggaaataggacaagttaatggatgtttttatattttaatagaatcatttatttctatgtgttatgaaattcacttaatgataaatttttcaacatacttgccattagaaaacaaagtattgctaagtactataacatattggccactaaaattcatattgagattatcttggtttcttggaagagataggaatgagttcttatctagtgttgcaggccagcaaatacagaggtggtttaatcaaacagctctagtatgaagcaagagtaaagactaaggtttcgagagcattcctactcacataagtgaagaaatctgtcagataggaatctaaatatttatagtgagattgtgaaagcaaccttaaagttttgaagaagactgatgagactaggtgctttgcttcctttcatcaggtatctttctgtggcatttgagaacagaaaccaagaaacatggtaattactaaattatgaggctttgctttttgtttgcttttaagtagaaaaacatgttggcaacattgagttttggagttgattgagataatatgacttaactagttttgtcattccatttgttaaagatacagtcaccaagaatgttttgagttttttgaaagaccccaatttaagccttgcttatttttaaattatttccattcagtgatgttggatgtatatcagttatttagtaaataatctcaataaattttgtgctgtggcctttgcta

SEQ ID NO: 72972 - DNA, 177 bp, Homo sapiens
acgatgtcttgagaggggaaagagtagtggtaggagtgatgacaacagagagagcttggaaaagaggtacttggcagtttttacatacaaccacttcaatcccagacctgccttatttggtacaggaataaaagagtcacatttaaacatgtaaaatggcttgtttaagatgttagg

SEQ ID NO: 72973 - DNA, 332 bp, Homo sapiens
ggtgctttgcttcctttcatcaggtatctttctgtggcatttgagaacagaaaccaagaaacatggtaattactaaattatgaggctttgctttttgtttgcttttaagtagaaaaacatgttggcaacattgagttttggagttgattgagataatatgacttaactagttttgtcattccatttgttaaagatacagtcaccaagaatgttttgagttttttgaaagaccccaatttaagccttgcttatttttaaattatttccattcagtgatgttggatgtatatcagttatttagtaaataatctcaataaattttgtgctgtggc

SEQ ID NO: 72974 - DNA, 2917 bp, Homo sapiens
  misc_feature (77)..(77): n is a, c, g, or t
acgcccgggcagccacggcggcggggccgcggcgggcgccggctcagcccgcccctttctcccgccgcctccccgcnccgccccgcgccgcgccggccgctgtcagctccctcagcgtccggccgaggcgcggtgtatgctgagccgctgccgcagccggctgctccacgtcctgggccttagcttcctgctgcagacccgccggccgattctcctctgctctccacgtctcatgaagccgctggtcgtgttcgtcctcggcggccccggcgccggcaaggggacccagtgcgcccgcatcgtcgagaaatatggctacacacacctttctgcaggagagctgcttcgtgatgaaaggaagaacccagattcacagtatggtgaacttattgaaaagtacattaaagaaggaaagattgtaccagttgagataaccatcagtttattaaagagggaaatggatcagacaatggctgccaatgctcagaagaataaattcttgattgatgggtttccaagaaatcaagacaaccttcaaggatggaacaagaccatggatgggaaggcagatgtatctttcgttctcttttttgactgtaataatgagatttgtattgaacgatgtcttgagaggggaaagagtagtggtaggagtgatgacaacagagagagcttggaaaagagaattcagacctaccttcagtcaacaaagccaattattgacttatatgaagaaatggggaaagtcaagaaaatagatgcttctaaatctgttgatgaagtttttgatgaagttgtgcagatttttgacaaggaaggctaattctaaacctgaaagcatccttgaaatcatgcttgaatattgctttgatagctgctatcatgacccctttttaaggcaattctaatctttcataactacatctcaattagtggctggaaagtacatggtaaaacaaagtaaatttttttatgttcttttttttggtcacaggagtagacagtgaattcaggtttaacttcaccttagttatggtgctcaccaaacgaagggtatcagctatttttttttaaattcaaaaagaatatcccttttatagtttgtgccttctgtgagcaaaactttttagtacgcgtatatatccctctagtaatcacaacattttaggatttagggatacccgcttcctctttttcttgcaagttttaaatttccaaccttaagtgaatttgtggaccaaatttcaaaggaactttttgtgtagtcagttcttgcacaatgtgtttggtaaacaaactcaaaatggattcttaggagcattttagtgtttattaaataactgaccatttgctgtagaaagatgagaaaacttaagctttgttttactacaacttgtacaaagttgtatgacagggcatattctttgcttccaagatttgggttgggggcactaggggttcagagcctggcagaattgtcagctttagtctgacataatctaagggtatggggcaaggatcacatctaatgcttgtgttccttatactctattatatagtgttattcatgattcagctgatcttaacaaaattcgtagcagtggaaccttgaaatgcatgtggctagatttatgctaaaatgattctcagttagcattttagtaacacttcaaaggtttttttttgtttgttttctagacttaataaaagcttaggattaattagaagaagcaatctagttaaatttcccatttgtattttattttcttgaatacttttttcatagttatttgtttaaaaagatttaaaaatcattgcactttggtcagaaaaataataaatatatcttataaatgtttgattcccttccttgctatttttattcagtagatttttgtttggcatcatgttgaagcaccgaaagataaatgatttttaaaaggctatagagtccaaaggaatattcttttacaccaattcttcctttaaaaatctctgaggaatttgttttcgccttacttttttttcttctgtcacaatgctaagtggtatccgaggttcttaatatgagatttaaaatcttaaaatgtttcttattttcagcacttacatcatttggtacacagggtcaaatagggcaaataattttgtctttgtataatagatttgatatttaaagtcactggaaataggacaagttaatggatgtttttatattttaatagaatcatttatttctatgtgttatgaaattcacttaatgataaatttttcaacatacttgccattagaaaacaaagtattgctaagtactataacatattggccactaaaattcatattgagattatcttggtttcttggaagagataggaatgagttcttatctagtgttgcaggccagcaaatacagaggtggtttaatcaaacagctctagtatgaagcaagagtaaagactaaggtttcgagagcattcctactcacataagtgaagaaatctgtcagataggaatctaaatatttatagtgagattgtgaaagcaaccttaaagttttgaagaagactgatgagactaggtgctttgcttcctttcatcaggtatctttctgtggcatttgagaacagaaaccaagaaacatggtaattactaaattatgaggctttgctttttgtttgcttttaagtagaaaaacatgttggcaacattgagttttggagttgattgagataatatgacttaactagttttgtcattccatttgttaaagatacagtcaccaagaatgttttgagttttttgaaagaccccaatttaagccttgcttatttttaaattatttccattcagtgatgttggatgtatatcagttatttagtaaataatctcaataaattttgtgctgtggcctttgcta

SEQ ID NO: 72975 - DNA, 780 bp, Homo sapiens
  misc_feature (77)..(77): n is a, c, g, or t
acgcccgggcagccacggcggcggggccgcggcgggcgccggctcagcccgcccctttctcccgccgcctccccgcnccgccccgcgccgcgccggccgctgtcagctccctcagcgtccggccgaggcgcggtgtatgctgagccgctgccgcagccggctgctccacgtcctgggccttagcttcctgctgcagacccgccggccgattctcctctgctctccacgtctcatgaagccgctggtcgtgttcgtcctcggcggccccggcgccggcaaggggacccagtgcgcccgcatcgtcgagggatgacatcttgctatggtgcataggctgatctcaaactcctggcctcgagcaaccctctcgtcttgaccttccaaagtgctgagattacaggcatgagccacagtgcgtagtccctgtttttagaagtttgttcttcaagagattcttctagttgtaacatctaataatgatattttgctgtggctgttagtatagtatagtatgtgtagatgtcatttttggtagcatacatattatttctgttttataaataaacagatctaagaaagattaaataaattacccactgtcacactgggttgtgacagagttataaaactttagttttagttataaaaccttaagcactctagttcagtgttctgagtgtgtgatttcatgtaaggttcaggttcttgtgatctttgctgagttctttgtgtttctctaaatttatttccccattagtttgataattttgcaaatgctca

SEQ ID NO: 72976 - DNA, 2959 bp, Homo sapiens
  misc_feature (77)..(77): n is a, c, g, or t
acgcccgggcagccacggcggcggggccgcggcgggcgccggctcagcccgcccctttctcccgccgcctccccgcnccgccccgcgccgcgccggccgctgtcagctccctcagcgtccggccgaggcgcggtgtatgctgagccgctgccgcagccggctgctccacgtcctgggccttagcttcctgctgcagacccgccggccgattctcctctgctctccacgtctcatgaagccgctggtcgtgttcgtcctcggcggccccggcgccggcaaggggacccagtgcgcccgcatcgtcgagaaatatggctacacacacctttctgcaggagagctgcttcgtgatgaaaggaagaacccagattcacagtatggtgaacttattgaaaagtacattaaagaaggaaagattgtaccagttgagataaccatcagtttattaaagagggaaatggatcagacaatggctgccaatgctcagaagaataaattcttgattgatgggtttccaagaaatcaagacaaccttcaaggatggaacaagaccatggatgggaaggcagatgtatctttcgttctcttttttgactgtaataatgagatttgtattgaacgatgtcttgagaggggaaagagtagtggtaggagtgatgacaacagagagagcttggaaaagagaattcagacctaccttcagtcaacaaagccaattattgacttatatgaagaaatggggaaagtcaagaaaatagatgcttctaaatctgttgatgaagtttttgatgaagttgtgcagatttttgacaaggaaggctaattctaaacctgaaagcatccttgaaatcatgcttgaatattgctttgatagctgctatcatgacccctttttaaggcaattctaatctttcataactacatctcaattagtggctggaaagtacatggtaaaacaaagtaaatttttttatgttcttttttttggtcacaggagtagacagtgaattcaggtttaacttcaccttagttatggtgctcaccaaacgaagggtatcagctatttttttttaaattcaaaaagaatatcccttttatagtttgtgccttctgtgagcaaaactttttagtacgcgtatatatccctctagtaatcacaacattttaggatttagggatacccgcttcctctttttcttgcaagttttaaatttccaaccttaagtgaatttgtggaccaaatttcaaaggaactttttgtgtagtcagttcttgcacaatgtgtttggtaaacaaactcaaaatggattcttaggagcattttagtgtttattaaataactgaccatttgctgtagaaagatgagaaaacttaagctttgttttactacaacttgtacaaagttgtatgacagggcatattctttgcttccaagatttgggttgggggcactaggggttcagagcctggcagaattgtcagctttagtctgacataatctaagggtatggggcaaggatcacatctaatgcttgtgttccttatactctattatatagtgttattcatgattcagctgatcttaacaaaattcgtagcagtggaaccttgaaatgcatgtggctagatttatgctaaaatgattctcagttagcattttagtaacacttcaaaggtttttttttgtttgttttctagacttaataaaagcttaggattaattagaagaagcaatctagttaaatttcccatttgtattttattttcttgaatacttttttcatagttatttgtttaaaaagatttaaaaatcattgcactttggtcagaaaaataataaatatatcttataaatgtttgattcccttccttgctatttttattcagtagatttttgtttggcatcatgttgaagcaccgaaagataaatgatttttaaaaggctatagagtccaaaggaatattcttttacaccaattcttcctttaaaaatctctgaggaatttgttttcgccttacttttttttcttctgtcacaatgctaagtggtatccgaggttcttaatatgagatttaaaatcttaaaatgtttcttattttcagcacttacatcatttggtacacagggtcaaatagggcaaataattttgtctttgtataatagatttgatatttaaagtcactggaaataggacaagttaatggatgtttttatattttaatagaatcatttatttctatgtgttatgaaattcacttaatgataaatttttcaacatacttgccattagaaaacaaagtattgctaagtactataacatattggccactaaaattcatattgagattatcttggtttcttggaagagataggaatgagttcttatctagtgttgcaggccagcaaatacagaggtggtttaatcaaacagctctagtatgaagcaagagtaaagactaaggtttcgagagcattcctactcacataagtgaagaaatctgtcagataggaatctaaatatttatagtgagattgtgaaagcaaccttaaagttttgaagaagactgatgagactaggtgctttgcttcctttcatcaggtatctttctgtggcatttgagaacagaaaccaagaaacatggtaattactaaattatgaggctttgctttttgtttgcttttaagtagaaaaacatgttggcaacattgagttttggagttgattgagataatatgacttaactagttttgtcattccatttgttaaagatacagtcaccaagaatgttttgagttttttgaaagaccccaatttaagccttgcttatttttaaattatttccattcagtgatgttggatgtatatcagttatttagtaaataatctcaataaattttgtgctgtggcctttgctaaaaaaagggataaaaagttttgccctatagtgagtgtcgagc

SEQ ID NO: 72977 - DNA, 2863 bp, Homo sapiens
  misc_feature (77)..(77): n is a, c, g, or t
acgcccgggcagccacggcggcggggccgcggcgggcgccggctcagcccgcccctttctcccgccgcctccccgcnccgccccgcgccgcgccggccgctgtcagctccctcagcgtccggccgaggcgcggtgtatgctgagccgctgccgcagccggctgctccacgtcctgggccttagcttcctgctgcagacccgccggccgattctcctctgctctccacgtctcatgaagccgctggtcgtgttcgtcctcggcggccccggcgccggcaaggggacccagtgcgcccgcatcgtcgagaaatatggctacacacacctttctgcaggagagctgcttcgtgatgaaaggaagaacccagattcacagtatggtgaacttattgaaaagtacattaaagaaggaaagattgtaccagttgagataaccatcagtttattaaagagggaaatggatcagacaatggctgccaatgctcagaagaataaattcttgattgatgggtttccaagaaatcaagacaaccttcaaggatggaacaagaccatggatgggaaggcagatgtatctttcgttctcttttttgactgtaataatgagatttgtattgaacgatgtcttgagaggggaaagagtagtggtaggagtgatgacaacagagagagcttggaaaagagaattcagacctaccttcagtcaacaaagccaattattgacttatatgaagaaatggggaaagtcaagaaaatagatgcttctaaatctgttgatgaagtttttgatgaagttgtgcagatttttgacaaggaaggctaattctaaacctgaaagcatccttgaaatcatgcttgaatattgctttgatagctgctatcatgacccctttttaaggcaattctaatctttcataactacatctcaattagtggctggaaagtacatggtaaaacaaagtaaatttttttatgttcttttttttggtcacaggagtagacagtgaattcaggtttaacttcaccttagttatggtgctcaccaaacgaagggtatcagctatttttttttaaattcaaaaagaatatcccttttatagtttgtgccttctgtgagcaaaactttttagtacgcgtatatatccctctagtaatcacaacattttaggatttagggatacccgcttcctctttttcttgcaagttttaaatttccaaccttaagtgaatttgtggaccaaatttcaaaggaactttttgtgtagtcagttcttgcacaatgtgtttggtaaacaaactcaaaatggattcttaggagcattttagtgtttattaaataactgaccatttgctgtagaaagatgagaaaacttaagctttgttttactacaacttgtacaaagttgtatgacagggcatattctttgcttccaagatttgggttgggggcactaggggttcagagcctggcagaattgtcagctttagtctgacataatctaagggtatggggcaaggatcacatctaatgcttgtgttccttatactctattatatagtgttattcatgattcagctgatcttaacaaaattcgtagcagtggaaccttgaaatgcatgtggctagatttatgctaaaatgattctcagttagcattttagtaacacttcaaaggtttttttttgtttgttttctagacttaataaaagcttaggattaattagaagaagcaatctagttaaatttcccatttgtattttattttcttgaatacttttttcatagttatttgtttaaaaagatttaaaaatcattgcactttggtcagaaaaataataaatatatcttataaatgtttgattcccttccttgctatttttattcagtagatttttgtttggcatcatgttgaagcaccgaaagataaatgatttttaaaaggctatagagtccaaaggaatattcttttacaccaattcttcctttaaaaatctctgaggaatttgttttcgccttacttttttttcttctgtcacaatgctaagtggtatccgaggttcttaatatgagatttaaaatcttaaaatgtttcttattttcagcacttacatcatttggtacacagggtcaaatagggcaaataattttgtctttgtataatagatttgatatttaaagtcactggaaataggacaagttaatggatgtttttatattttaatagaatcatttatttctatgtgttatgaaattcacttaatgataaatttttcaacatacttgccattagaaaacaaagtattgctaagtactataacatattggccactaaaattcatattgagattatcttggtttcttggaagagataggaatgagttcttatctagtgttgcaggccagcaaatacagaggtggtttaatcaaacagctctagtatgaagcaagagtaaagactaaggtttcgagagcattcctactcacataagtgaagaaatctgtcagataggaatctaaatatttatagtgagattgtgaaagcaaccttaaagttttgaagaagactgatgagactaggtgctttgcttcctttcatcaggtatctttctgtggcatttgagaacagaaaccaagaaacatggtaattactaaattatgaggctttgctttttgtttgcttttaagtagatagttttgtcattccatttgttaaagatacagtcaccaagaatgttttgagttttttgaaagaccccaatttaagccttgcttatttttaaattatttccattcagtgatgttggatgtatatcagttatttagtaaataatctcaataaattttgtgctgtggcctttgcta

SEQ ID NO: 72978 - DNA, 2859 bp, Homo sapiens
  misc_feature (77)..(77): n is a, c, g, or t
acgcccgggcagccacggcggcggggccgcggcgggcgccggctcagcccgcccctttctcccgccgcctccccgcnccgccccgcgccgcgccggccgctgtcagctccctcagcgtccggccgaggcgcggtgtatgctgagccgctgccgcagccggctgctccacgtcctgggccttagcttcctgctgcagacccgccggccgattctcctctgctctccacgtctcatgaagccgctggtcgtgttcgtcctcggcggccccggcgccggcaaggggacccagtgcgcccgcatcgtcgagaaatatggctacacacacctttctgcaggagagctgcttcgtgatgaaaggaagaacccagattcacagtatggtgaacttattgaaaagaaatggatcagacaatggctgccaatgctcagaagaataaattcttgattgatgggtttccaagaaatcaagacaaccttcaaggatggaacaagaccatggatgggaaggcagatgtatctttcgttctcttttttgactgtaataatgagatttgtattgaacgatgtcttgagaggggaaagagtagtggtaggagtgatgacaacagagagagcttggaaaagagaattcagacctaccttcagtcaacaaagccaattattgacttatatgaagaaatggggaaagtcaagaaaatagatgcttctaaatctgttgatgaagtttttgatgaagttgtgcagatttttgacaaggaaggctaattctaaacctgaaagcatccttgaaatcatgcttgaatattgctttgatagctgctatcatgacccctttttaaggcaattctaatctttcataactacatctcaattagtggctggaaagtacatggtaaaacaaagtaaatttttttatgttcttttttttggtcacaggagtagacagtgaattcaggtttaacttcaccttagttatggtgctcaccaaacgaagggtatcagctatttttttttaaattcaaaaagaatatcccttttatagtttgtgccttctgtgagcaaaactttttagtacgcgtatatatccctctagtaatcacaacattttaggatttagggatacccgcttcctctttttcttgcaagttttaaatttccaaccttaagtgaatttgtggaccaaatttcaaaggaactttttgtgtagtcagttcttgcacaatgtgtttggtaaacaaactcaaaatggattcttaggagcattttagtgtttattaaataactgaccatttgctgtagaaagatgagaaaacttaagctttgttttactacaacttgtacaaagttgtatgacagggcatattctttgcttccaagatttgggttgggggcactaggggttcagagcctggcagaattgtcagctttagtctgacataatctaagggtatggggcaaggatcacatctaatgcttgtgttccttatactctattatatagtgttattcatgattcagctgatcttaacaaaattcgtagcagtggaaccttgaaatgcatgtggctagatttatgctaaaatgattctcagttagcattttagtaacacttcaaaggtttttttttgtttgttttctagacttaataaaagcttaggattaattagaagaagcaatctagttaaatttcccatttgtattttattttcttgaatacttttttcatagttatttgtttaaaaagatttaaaaatcattgcactttggtcagaaaaataataaatatatcttataaatgtttgattcccttccttgctatttttattcagtagatttttgtttggcatcatgttgaagcaccgaaagataaatgatttttaaaaggctatagagtccaaaggaatattcttttacaccaattcttcctttaaaaatctctgaggaatttgttttcgccttacttttttttcttctgtcacaatgctaagtggtatccgaggttcttaatatgagatttaaaatcttaaaatgtttcttattttcagcacttacatcatttggtacacagggtcaaatagggcaaataattttgtctttgtataatagatttgatatttaaagtcactggaaataggacaagttaatggatgtttttatattttaatagaatcatttatttctatgtgttatgaaattcacttaatgataaatttttcaacatacttgccattagaaaacaaagtattgctaagtactataacatattggccactaaaattcatattgagattatcttggtttcttggaagagataggaatgagttcttatctagtgttgcaggccagcaaatacagaggtggtttaatcaaacagctctagtatgaagcaagagtaaagactaaggtttcgagagcattcctactcacataagtgaagaaatctgtcagataggaatctaaatatttatagtgagattgtgaaagcaaccttaaagttttgaagaagactgatgagactaggtgctttgcttcctttcatcaggtatctttctgtggcatttgagaacagaaaccaagaaacatggtaattactaaattatgaggctttgctttttgtttgcttttaagtagaaaaacatgttggcaacattgagttttggagttgattgagataatatgacttaactagttttgtcattccatttgttaaagatacagtcaccaagaatgttttgagttttttgaaagaccccaatttaagccttgcttatttttaaattatttccattcagtgatgttggatgtatatcagttatttagtaaataatctcaataaattttgtgctgtggcctttgcta

SEQ ID NO: 72979 - DNA, 713 bp, Homo sapiens
  misc_feature (77)..(77): n is a, c, g, or t
acgcccgggcagccacggcggcggggccgcggcgggcgccggctcagcccgcccctttctcccgccgcctccccgcnccgccccgcgccgcgccggccgctgtcagctccctcagcgtccggccgaggcgcggtgtatgctgagccgctgccgcagccggctgctccacgtcctgggccttagcttcctgctgcagacccgccggccgattctcctctgctctccacgtctcatgaagccgctggtcgtgttcgtcctcggcggccccggcgccggcaaggggacccagtgcgcccgcatcgtcgagaaatatggctacacacacctttctgcaggagagctgcttcgtgatgaaaggaagaacccagattcacagtatggtgaacttattgaaaagtacattaaagaaggaaagattgtaccagttgagataaccatcagtttattaaagagggaaatggatcagacaatggctgccaatgctcagaagaataaattcttgattgatgggtttccaagaaatcaagacaaccttcaaggatggaacaagaccatggatgggaaggcagatgtatctttcgttctcttttttgactgtaataatgagatttgtattgaacgatgtcttgagaggggaaagagtagtggtaggagtgatgacaacagagagagcttggaaaagagccgcgaatttagtagtagtagacggccgc

SEQ ID NO: 72980 - DNA, 123 bp, Homo sapiens
gtttgagacttccttctttttgcactcaacgttgttactaagattcatctacatttttttagttcattcctttttccatattgcatataattccatgggtgactataccctgatttcttcatc

SEQ ID NO: 72981 - DNA, 551 bp, Homo sapiens
acagcatggccataagttccctgggtgttctttttgtctcgtatatcccagagttgaggaagccagcaatctgaaaatgccaatggacacagacaaaggaagcctcaacaaaagcctgccttctaaagccaaaagaccaaaaaagaggcagaataggaagacaaaaaattttttaaacaataaccacactagaccagccaaataccacaggggaaaacaaacaaacaaacaaaactggctacaactccactcgtgccagcaaaggtcaagtgtggagcccagacttctacactcatgtggctgcaatgacgcaacacagtatcccttgccaagatggtgtcagaggaggccaaggatggagctgagcttttcatatcccctgaccagtaaggagccacctctcactctgggtttcagtagagtccacatggagagtctggctttccacacccacccaagagtaacaaggggtccctcctcctcccagtggggttggtgtcaaagaggtttgcagcagttggacatgcatgcacaaaaagaaaaaattaaac

SEQ ID NO: 72982 - DNA, 623 bp, Homo sapiens
gtttaaacaaatgaaaaagaagaatataatcagagttccagaagcctccttcttccattcaattacccctcacctttcagcataacttagtacattgacttctgacattacacatatgttagttttgccagttttaaaactttatgtatatgaaaccacacagtaagcttttattttttttggagacagggtctcactctgccgcccaggcagagtgccatcttggctcactgcaacctcagcctcccaagtagctgggactacaggcacatgccaccatgcccggctcattttttgtcattttagtagaaacggggtttcaacatgttggctaggctggtctcgaactcctgacctcaagtgacccacccgcctcggcctcccaaagtgctgggattacaggtgtgagccaccacgcttggtccccatgcagtaagctttaaaaaaaaaattctggtaaaatatacataacataaaatttaccctttttgccattttaaacatacagttcagtggtattaagtaccctcacattgttatgtggcatcaccaccactcatctctagaacgttttcatcttcccaaactctattgattaaacgttaactccctattcccctttc

SEQ ID NO: 72983 - DNA, 2346 bp, Homo sapiens
  misc_feature (2)..(2): n is a, c, g, or t
  misc_feature (6)..(6): n is a, c, g, or t
  misc_feature (8)..(9): n is a, c, g, or t
cngttncnntcctcaaaggattggctaaaagcaagcaactggattgaacaccctaagaagaaagattcacactgcaccaggagacatcagaaagaatgaaaactctgccgctgtttgtgtgcatctgtgcactgagtgcttgcttctcgttcagtgaaggtcgagaaagggatcatgaactacgtcacagaaggcatcatcaccaatcacccaaatctcactttgaattaccacattatcctggactgctagctcaccagaagccgttcattagaaagtcctataaatgtctgcacaaacgctgtaggcctaagcttccaccttcacctaataacccccccaaattcccaaatcctcaccagccacctaaacatccagataaaaatagcagtgtggtcaaccctaccttagtggctacaacccaaattccatctgtgactttcccatcagcttccaccaaaattactacccttccaaatgtgacttttcttccccagaatgccaccaccatatcttcaagagaaaatgttaacacaagctcttctgtagctacattagcaccagtgaattccccagctccacaagacaccacagctgccccacccacaccttctgcaactacaccagctccaccatcttcctcagctccaccagagaccacagctgccccacccacaccttctgcaactacacaagctccaccatcttcctcagctccaccagagaccacagctgccccacccacacctcctgcaactacaccagctccaccatcttcctcagctccaccagagaccacagctgccccacccacaccttctgcaactacaccagctccactatcttcctcagctccaccagagaccacagctgtcccacccacaccttctgcaactaccctagacccatcatccgcctcagctccaccagagaccacagctgccccacccacaccttctgcaactacaccagctccaccgtcttccccagctccacaagagaccacagctgccccaattaccacacctaattcttccccaactactcttgcacctgacacttctgaaacttcagctgcacccacacaccagactactacttcggtcactactcaaactactactactaaacaaccaacttcagctcctggccaaaataaaatttctcgatttcttttatatatgaagaatctactaaacagaattattgacgacatggtggagcaatagtatatgtatgtgtaaagtgttctgtcatttacaagatgtgattcatgagtgcagaactaccacctttcttttagcaccaatcccaacatgaaattatattactcagatttaaagcactatcattaatctttcaatctaattattcaccaccacaagacctattaacaagacaaaatgcctctatcccacaagccagatgcaggtctggggttcaaaataactctttggatcctacagagatagcctactgagggcaaagaaagtccttagataaagagagaatattgtatgggccatcaaccatttacttttccctgaatgttagaaactacaaaaccactaccttgtacccccatcaaaatcccacctgaaccatctaatcctataaacataaaggggtaaaattggaactctccagatgaacaaagacatctaaatatctgtagatagaaacatttatctatctaaatatattgatagacctgtcattgtattgattaatgacaaaaccctttagataattatcttccattttaaataaaattttatttcacaaatatgagccaagaaagaggaaagttgatttgaagtgaggattagaagtgaatgacaataaagtctggcagccaagcacgaaccaagactggcactatttttcttagtgtatataattgtttaaactgcaaggttgacatttattgtgttgtgtctaagttaatttcgatctaatgtacctgattctagcctctgtgaacaacaagaatatgtttgtgtatgttcacatggtgcttataatatttcactatcaattcaattaattcacataaattccatgtgaaatgtattcaacaatggaatattttctaaaacatttagtatacatttgaatgtattttaaaccatgccaaactactgctttaatgtcaagtttgcagaattgtctctgaaaataaaaaccctgactttagttgtaaaacaataaaagttagctacttggtatacggagatgttaatttgggatatggaggcatttttatcttctgtcactactacttaaaactctgatgattatgttagatttttttgctaactaataaagatttcaaatggcaattta

SEQ ID NO: 72984 - DNA, 1085 bp, Homo sapiens
ggagcaacaggcagttttaatgaatgcctgaaggcagaccttcaggccatttcaggccgaggcctaaaatggcatcagccccaaatgaggacgggcaggggttttacagtctcctgtaaacaggaagtgtttcagtctgtgtatctactgctacgtgatacccggtaggcctctctctgggtcttcagaacagctctctccccgcttctgctatcttgctgacgcacgctgatgacgtaagccgccttgcgccttgggactgggcctgagaagggaggagttattcaggcctccgccagcttctaggccctggggatggtctttcacctccctctttctgatctctttttcatgctcctccttgctccaaagaaaagccggatggcaaaagagcccagaacctattggaactgacaaaatcaagtcacggcgcctacaaagatgaggggcagattctggctgccttttaatttcgtccttcacctgatatctgtgccagagaatgataaaaatcataataaaggaaataatggaagaggagacttatgttactggggacatctaacataattattttcctgattcagtggcatggttcagtcttccaggagttctgctacagagaagagagtaacccccatccatcatggccaaagcacccagtcaggctccgctctggatccagcccgacaaatgcaacccttgaatagggtttgtgcaagcaaactggatgacgaccgaagaaaccctgtcgcttctgagaagacacccaatccaagaatgtgagttctggaaatgtcattaaatgtcagttatatacaaaaaaaaaaaaaaaaaaaaaaaaaaaaaaaaaaaaaaaaaagggggggggggccaaagagtttctcctggggggagcccgaggttttcgccgcgcccccggttttgttgtaccgaagggggcccctttggaggagaggcgcgtattattatgccacagcgccgggcccgggcgtttaacaccgtcgcgtgcggggaaagcggccacgcgggaccgctgtgcggaaggccctcctcggcggcggcgcacattgtgcgcacctcac

SEQ ID NO: 72985 - DNA, 404 bp, Homo sapiens
ggagcaacaggcagttttaatgaatgcctgaaggcagaccttcaggccatttcaggccgaggcctaaaatggcatcagccccaaatgaggacgggcaggggttttacagtctcctgtaaacaggaagtgtttcagtctgtgtatctactgctacgtgatacccggtaggcctctctctgggtcttcagaacagctctctccccgcttctgctatcttgctgacgcacgctgatgacgtaagccgccttgcgccttgggactgggcctgagaagggaggagttattcaggcctccgccagcttctaggccctggggatggtctttcacctccctctttctgatctctttttccggacgcgtgggtccggacgcgtgggcgacgcgtgggtcgacccacgcgtccg

SEQ ID NO: 72986 - DNA, 940 bp, Homo sapiens
ggagcaacaggcagttttaatgaatgcctgaaggcagaccttcaggccatttcaggccgaggcctaaaatggcatcagccccaaatgaggacgggcaggggttttacagtctcctgtaaacaggaagtgtttcagtctgtgtatctactgctacgtgatacccggtaggcctctctctgggtcttcagaacagctctctccccgcttctgctatcttgctgacgcacgctgatgacgtaagccgccttgcgccttgggactgggcctgagaagggaggagttattcaggcctccgccagcttctaggccctggggatggtctttcacctccctctttctgatctctttttcatgctcctccttgctccaaagaaaagccggatggcaaaagagcccagaacctattggaactgacaaaatcaagtcacggcgcctacaaagatgaggggcagattctggctgccttttaatttcgtccttcacctgatatctgtgccagagaatgataaaaatcataataaaggaaataatggaagaggagacttatgttactggggacatctaacataattattttcctgattcagtggcatggttcagtcttccaggagttctgctacagagaagagagtaacccccatccatcatggccaaagcacccagtcaggctccgctctggatccagcccgacaaatgcaacccttgaatagggtttgtgcaagcaaactggatgacgaccgaagaaaccctgtcgcttctgagaagacacccaatccaagaatatacagtcgaatgtaatttggaatttacgagtcttatcacattctcattctgcttgagcaattcaagatataagaaaaacagactgtctacatttcttcagagttcctccaactattggcttaaaattcctgaaattaaaattatagttctttgacat

SEQ ID NO: 72987 - DNA, 426 bp, Homo sapiens
ccgcttctgctatcttgctgacgcacgctgatgacgtaagccgccttgcgccttgggactgggcctgagaagggaggagttattcaggcctccgccagcttctaggccctggggatggtctttcacctccctctttctgatctctttttcatgctcctccttgctccaaagaaaagccggatggcaaaagagcccagaacctattggtgagttccacgtacgtcagcctccctgggaaaagtcaggcagagatgaaactggagggtgaaaagctatgagggtgaaagtggattgagtgggcccagtggaagacgcacagcaccgtggattccccttgcaagcttaaggcccgctagttggaatttaaggaaaagaaaacaataatttttttttttttttgagacggagtttcgctctcgtcacccg

SEQ ID NO: 72988 - DNA, 990 bp, Homo sapiens
ggagcaacaggcagttttaatgaatgcctgaaggcagaccttcaggccatttcaggccgaggcctaaaatggcatcagccccaaatgaggacgggcaggggttttacagtctcctgtaaacaggaagtgtttcagtctgtgtatctactgctacgtgatacccggtaggcctctctctgggtcttcagaacagctctctccccgcttctgctatcttgctgacgcacgctgatgacgtaagccgccttgcgccttgggactgggcctgagaagggaggagttattcaggcctccgccagcttctaggccctggggatggtctttcacctccctctttctgatctctttttcatgctcctccttgctccaaagaaaagccggatggcaaaagagcccagaacctattggaactgacaaaatcaagtcacggcgcctacaaagatgaggggcagattctggctgccttttaatttcgtccttcacctgatatctgtgccagagaatgtcttccaggagttctgctacagagaagagagtaacccccatccatcatggccaaagcacccagtcaggctccgctctggatccagcccgacaaatgcaacccttgaatagggtttgtgcaagcaaactggatgacgaccgaagaaaccctgtcgcttctgagaagacacccaatccaagaatgtgagttctggaaatgtcattaaatgtcagttatatacaaaaaaaaaaaaaaaaaaaaaaaaaaaaaaaaaaaaaaaaaagggggggggggccaaagagtttctcctggggggagcccgaggttttcgccgcgcccccggttttgttgtaccgaagggggcccctttggaggagaggcgcgtattattatgccacagcgccgggcccgggcgtttaacaccgtcgcgtgcggggaaagcggccacgcgggaccgctgtgcggaaggccctcctcggcggcggcgcacattgtgcgcacctcac

SEQ ID NO: 72989 - DNA, 346 bp, Homo sapiens
agaaaaataacaacccaataaaaacagtgagcaaaggacatgaacagacacttttcagaagaagacatgcatatggccaacaatcacatgaagaaaagctcaacatcactgattattacagaaaagtgaatcaaaaccacaataagataccatctcacaacagtcagtgtggctcttaccttatttttcctaaaaaatatggctttgttatgcctaatctaccttctttagtggtagatatgtgaatatgtggggaaagggtagatatgaagtctcaattacacaatttccagaaaaaaactgcactcatcaactgcctgtcttctctgttcagatttttgtgcaa

SEQ ID NO: 72990 - DNA, 704 bp, Homo sapiens
agtggcacaatctcggctcactgtaccctccgcctcccaggttcaagcagttctcatgcctcagcctcccaagtagctgggattgcaggtgcctgccgccacgcccggctaatttttgtattaatagagacagggtttcaccgtgttgggcaggctggtcctgaactcctgacctcaagtgatccacccgcctcggcctcccaaagtgctgggattacaggcgtgagccaccacacctggcctaggagttaagagtattaaatgttaagaacagaccaagtccatcaaacagctccacacccttgttccatgttctggattggggagttgtgggggtggaggtgtagaacttttaaaaagcttcttaaaataagttgctgtgaatacttcaggtatataaaaaaacattggttgacaataagccagtgttctgccattcttacctgcttatcaagacaaaacctgctcaagtccctgcccagctgcattccaagtgttttcaagtttggtggtaagacctgacctgaggcttcttataacctttactcagtgggaatatgcatacagttcactacagaaatatttgtgtttacttagaggaagtgccctggatctgggggcgggggggggcggggggaatgggtcttttctaaattgttaaaagcagttcatgccattattcttaataaacatttctaatatgc

SEQ ID NO: 72991 - DNA, 883 bp, Homo sapiens
tgtggaaccctgtattattagttccagtcctggaggcctgcctcctgagtttcccagctagttgggacaggccccaatatcccttcttcctgtaacccaaacagtcatgaatttgctttggcaggtggatggagacttgggaacttccacctcacccactaagccaggcccaggctatggggcattgtggctaaaccccaccaggtggatacttggtctgaggacgcatcttattctgggcctttagggagctaaggcagtgagaattggcaggaggactgctgtgaatgccttgtaggtcgggggattggagggggtcctctgctccctgtctctcaggatggcaatgtacctctcacccccagtgtcagctgaggtaggatccataatcagtaatattcctgcaacaaaatgttcctaagtggaatcaatgaagaccaaaatttatttgtataacaactctaaacctgctctgctctgctgtgtttacaatgtgctttgtgatcatccagcccagggagtcccagtctctggctgtctatctgctctaaggaagagagcccacagttctctatagtgccatagtctgtgatgaataaagttccagatttgaggtcaacccccgaccacccttaaagtgcttgttggtctcctgctttggtttgtcttcagcatccaactgatgcacatttgtcaagaacccagaggcttcttataacctttactcagtgggaatatgcatacagttcactacagaaatatttgtgtttacttagaggaagtgccctggatctgggggcgggggggggcggggggaatgggtcttttctaaattgttaaaagcagttcatgccattattcttaataaacatttctaatatgc

SEQ ID NO: 72992 - DNA, 696 bp, Homo sapiens
tgtggaaccctgtattattagttccagtcctggaggcctgcctcctgagtttcccagctagttgggacaggccccaatatcccttcttcctgtaacccaaacagtcatgaatttgctttggcaggtggatggagacttgggaacttccacctcacccactaagccaggcccaggctatggggcattgtggctaaaccccaccaggtggatacttggtctgaggacgcatcttattctgggcctttagggagctaaggcagtgagaattggcaggaggactgctgtgaatgccttgtaggtcgggggattggagggggtcctctgctccctgtctctcaggatggcaatgtacctctcacccccagtgtcagctgaggtaggatccataatcagtaatattcctgcaacaaaatgttcctaagtggaatcaatgaagaccaaaatttatttgtataacaactctaaacctgccagctgcattccaagtgttttcaagtttggtggtaagacctgacctgaggcttcttataacctttactcagtgggaatatgcatacagttcactacagaaatatttgtgtttacttagaggaagtgccctggatctgggggcgggggggggcggggggaatgggtcttttctaaattgttaaaagcagttcatgccattattcttaataaacatttctaatatgc

SEQ ID NO: 72993 - DNA, 1141 bp, Homo sapiens
tgtggaaccctgtattattagttccagtcctggaggcctgcctcctgagtttcccagctagttgggacaggccccaatatcccttcttcctgtaacccaaacagtcatgaatttgctttggcaggtggatggagacttgggaacttccacctcacccactaagccaggcccaggctatggggcattgtggctaaaccccaccaggtggatacttggtctgaggacgcatcttattctgggcctttagggagctaaggcagtgagaattggcaggaggactgctgtgaatgccttgtaggtcgggggattggagggggtcctctgctccctgtctctcaggatggcaatgtacctctcacccccagtgtcagctgaggtaggatccataatcagtaatattcctgcaacaaaatgttcctaagtggaatcaatgaagaccaaaatttatttgtataacaactctaaacctgctctgctctgctgtgtttacaatgtgctttgtgatcatccagcccagggagtcccagtctctggctgtctatctgctctaaggaagagagcccacagttctctatagtgccatagtctgtgatgaataaagttccagatttgaggtcaacccccgaccacccttaaagtgcttgttggtctcctgctttggtttgtcttcagcatccaactgatgcacatttgtcaagaacccactgaggctagaaaccccccaaacactcaaggtaccttgagaacatgtatcccaagacctgcaaagaccaaacacatggcctgtaactacttttcactttcaagccctggaacttgtctgtaccaaaaatctttctgaaccattcaccaaatctcttgtcaagggccagaataaattaagagattggcttttggttttcaattaggctttcaagtcctaagcccaacccctcctatcccacctaggcagaaatcacttcagatccttgcttcctagtttaatttcttctctgcctcagttataacatccataaaatggaaataataatacccacctcacacaggggttaggagtgtttttttgttggtttttttccagcctgggcaacagcgagactccatctcaaaaaaaaaggaaatgtgtatcaggaccatgatt

SEQ ID NO: 72994 - DNA, 1116 bp, Homo sapiens
tgtggaaccctgtattattagttccagtcctggaggcctgcctcctgagtttcccagctagttgggacaggccccaatatcccttcttcctgtaacccaaacagtcatgaatttgctttggcaggtggatggagacttgggaacttccacctcacccactaagccaggcccaggctatggggcattgtggctaaaccccaccaggtggatacttggtctgaggacgcatcttattctgggcctttagggagctaaggcagtgagaattggcaggaggactgctgtgaatgccttgtaggtcgggggattggagggggtcctctgctccctgtctctcaggatggcaatgtacctctcacccccagtgtcagctgaggtaggatccataatcagtaatattcctgcaacaaaatgttcctaagtggaatcaatgaagaccaaaatttatttgtataacaactctaaacctgctctgctctgctgtgtttacaatgtgctttgtgatcatccagcccagggagtcccagtctctggctgtctatctgctctaaggaagagagcccacagttctctatagtgccatagtctgtgatgaataaagttccagatttgaggtcaacccccgaccacccttaaagtgcttgttggtctcctgctttggtttgtcttcagcatccaactgatgcacatttgtcaagaacccactgaggctagaaaccccccaaacactcaaggtaccttgagaacatgtatcccaagacctgcaaagaccaaacacatggcctgtaactacttttcactttcaagccctggaacttgtctgtaccaaaaatctttctgaaccattcaccaaatctcttgtcaagggccagaataaattaagagattggcttttggttttcaattaggctttcaatttggtggtaagacctgacctgaggcttcttataacctttactcagtgggaatatgcatacagttcactacagaaatatttgtgtttacttagaggaagtgccctggatctgggggcgggggggggcggggggaatgggtcttttctaaattgttaaaagcagttcatgccattattcttaataaacatttctaatatgc

SEQ ID NO: 72995 - DNA, 1166 bp, Homo sapiens
tgtggaaccctgtattattagttccagtcctggaggcctgcctcctgagtttcccagctagttgggacaggccccaatatcccttcttcctgtaacccaaacagtcatgaatttgctttggcaggtggatggagacttgggaacttccacctcacccactaagccaggcccaggctatggggcattgtggctaaaccccaccaggtggatacttggtctgaggacgcatcttattctgggcctttagggagctaaggcagtgagaattggcaggaggactgctgtgaatgccttgtaggtcgggggattggagggggtcctctgctccctgtctctcaggatggcaatgtacctctcacccccagtgtcagctgaggtaggatccataatcagtaatattcctgcaacaaaatgttcctaagtggaatcaatgaagaccaaaatttatttgtataacaactctaaacctgctctgctctgctgtgtttacaatgtgctttgtgatcatccagcccagggagtcccagtctctggctgtctatctgctctaaggaagagagcccacagttctctatagtgccatagtctgtgatgaataaagttccagatttgaggtcaacccccgaccacccttaaagtgcttgttggtctcctgctttggtttgtcttcagcatccaactgatgcacatttgtcaagaacccactgaggctagaaaccccccaaacactcaaggtaccttgagaacatgtatcccaagacctgcaaagaccaaacacatggcctgtaactacttttcactttcaagccctggaacttgtctgtaccaaaaatctttctgaaccattcaccaaatctcttgtcaagggccagaataaattaagagattggcttttggttttcaattaggctttcaagtcctaagcccaacccctcctatcccacctaggcagaaatcacttcagatccttgcttcctagtttaatttgaggcttcttataacctttactcagtgggaatatgcatacagttcactacagaaatatttgtgtttacttagaggaagtgccctggatctgggggcgggggggggcggggggaatgggtcttttctaaattgttaaaagcagttcatgccattattcttaataaacatttctaatatgc

SEQ ID NO: 72996 - DNA, 855 bp, Homo sapiens
ttgctttttttcaggaaagggaagtggaggcttaaaccttggtaatttctttgcaagccgtaagggctacagtcgaaaagggtttgaccggcttagcactgagggcagtgaccaagagaaagaggatgatggagtgaatcagaagaggagtattcagcacctctgcctgcgctcgcaccttcctcctcctgaaaaccaagctttgatttagattgagtaagatttacccagaatgtcagattcctttccctttagcacgtttaaagttctgtgtatttaattgtaaactgtactagtctgtgtgggactgtacacactttatttacttcgttttggttaagttggcttctgtttctagttgaggagtttcctaaaagttcataacagtgccattgtctttatatgaacatagactagagaaaccgtcctctttttccatcataattctaatctaacaatggaagatttgcccatttacacttttgagactttttggtggatgtaaataaccccattctttgcttgaacacagtattttcccaatagcactttcattgccagtgtctttctttggtgcctttcctgttcagcattcttagcctgtggcaataaagagaaactttgtgctacatgacgacaaagctgctaaatctcctatttttttaaaatcactaacattatattgcaatgaaggaaataaaaaagtctctatttaaattcttttttaaattttcttcagttggtgtgtttttgggatgtcttatttttagatggttacactgttagaacactattttcagaatctgaatgtaatttgtgtaataaagtgttttcagagcaaagaatcagagtgta

SEQ ID NO: 72997 - DNA, 897 bp, Homo sapiens
taacagtaggaatcttttcataaccacacctcagtttgttcccagtgggcttagagggaggacctgatgattgattccaggatacttgtacttctaataacatttttcatgaatcatgagaaaatttccacagatacttcccttagaaaatttgctataaactctgtatcattggtagcacaaatttgagcgaggccttgtcaattttaaggtggaaataggaaggaccacaacatgacccgtaagtcaagaaggtagacatttcatatccagcttccttgcttagtctcctttcagtatttggcaataaaagctcgtgccgaattcggcacgagtagtctgtgtgggactgtacacactttatttacttcgttttggttaagttggcttctgtttctagttgaggagtttcctaaaagttcataacagtgccattgtctttatatgaacatagactagagaaaccgtcctctttttccatcataattctaatctaacaatggaagatttgcccatttacacttttgagactttttggtggatgtaaataaccccattctttgcttgaacacagtattttcccaatagcactttcattgccagtgtctttctttggtgcctttcctgttcagcattcttagcctgtggcaataaagagaaactttgtgctacatgacgacaaagctgctaaatctcctatttttttaaaatcactaacattatattgcaatgaaggaaataaaaaagtctctatttaaattcttttttaaattttcttcagttggtgtgtttttgggatgtcttatttttagatggttacactgttagaacactattttcagaatctgaatgtaatttgtgtaataaagtgttttcagagcaaagaatcagagtgta

SEQ ID NO: 72998 - DNA, 1015 bp, Homo sapiens
tgaaaagtctcaacatgtccagcagtttatacatccaaggttggattctggcagatcaatgccagataatttagattgtgaagaatgacagtctgaggaatgtaagcctgaattcttttttttatttttaattctttttttgtttgcttgtttgtttttttgagacaagatcttgctctgttgcccagactagagtgcagtagtgtgatcatagctcactgcagcctcagatggctcaaggaatcctcccacctcagcctcccaagtagctggggctgcagttgtgcatcagcatgcccagctcacatacaaagtattttaaatattgtaattaagaattaaaccaatgacagagaatagaggcctaaaaagatcactatacagatagaactagggcactctagagcaatggggaaaggcaatcctttaaacaaaaggttctaagacaattaggtagacatagagggaaaaaatgaaactgtttcctacaactcacaccgcaaaattctattccatgcgcattaaagttttaactgtaaaagccaggtgaggtggcatccctgtagtcgcagttactcaggaggctgaggtaggagaatcacttaaggccaggagtttgaggctgcagtgcactatgatagcacctgtgaatagccaccgtactccagcctgggcaatatactaaggtcctggctctacaaacatggagggggaaaaaaaagtttaactataaaaaataaaactacaaaagtttgaaactatgttcctgatattatgacatcactgtacggagggatttcaaaaacaagatacaaacctattaactgtaaggaaacattagtaaacatgactaccttaaaactgagaatttgtgttcatctaaaggcattccaaacagaatgtaaaagcaagccacagagtagaagatgaattgcaactttaaaaaatgaataaaggattaatattcagaaagtaggagctcctacagataattttttaaagatagcccagccaa

SEQ ID NO: 72999 - DNA, 384 bp, Homo sapiens
cggctaatttttgtatttttagtagagacggggtttcaccatgttggccaggctggtctcgaagtcctgacctcaggtgatccacccgcctcggccccccaaaatgctgggattacaggcgtgagccactgcgccctgccaaggacacatttttgtatcaaatggttaatgataaaattagacttaaaataacgtgaaaccttcaaatatcaaggggagaaaaacaggaaatgggtatctttgtttaaaaagcaagatgctataaacagcatatggtaacatactgtttttattaaacaaatttaaaatattagataatggtagataggttatatgataaccttataaacgtcatttcagtcggaaataaacttattaaacatt

SEQ ID NO: 73000 - DNA, 336 bp, Homo sapiens
ctctggaaggttgctagtagaatggacatgagaaaacacatgtttagtaatagtctttactccacagaatgtattcaacataaaaatgttatgattttttttcatatatcgttttaacactgaagcttttaagtgtccattaacagtgaacttaaaatattgaggtagacatttacatcaaattgagattgtcggatgtacattggtagaagaaattggtctagttacattttttaggctaaaaataactgctgacatttgtatattagactatcttgtgccataaaacggaagtttagaaaatttaggaaacaccttaccaaagtaggaaatttg

SEQ ID NO: 73001 - DNA, 2039 bp, Homo sapiens
  misc_feature (239)..(239): n is a, c, g, or t
  misc_feature (1469)..(1469): n is a, c, g, or t
  misc_feature (1566)..(1566): n is a, c, g, or t
  misc_feature (1656)..(1656): n is a, c, g, or t
  misc_feature (1799)..(1799): n is a, c, g, or t
  misc_feature (1968)..(1968): n is a, c, g, or t
gtcaacatcccagttgatgtcacagccaacagcctgcatcaagtgcctgacacgagccttggaagaggcggcaagggtggcagttcagggacagactgcctgggctggcgttctgatttgccgaaggtagtaagcaactatctctgtgaccttgaacaaagtactgaactgcatctctgtaaaatggggagaataatcattctacttcataggattgttatacgctataagcgctaacntatgtacaaccctgagacctgagcctagctcacaataagggctctgagtttgctgttgttattgttgttgttgattattacggttgttgttgtttttattgttattagaaagactccactttgtcaggctgctctgtctccatcctattgccctctccaggtgcctatacagagtcagcccttgtgctgctcatttacaaatagctgcttggtgtctcccctcatctccactcctctggattccagaacttcccacacaggagcccagccctggacagtgacggtgacccatggagaatgcatcatgcctgtcagggtcctgttggttcagcggctggggaggcagtgccctgctgggaacgatcacttcccatgaagatggatggctttctctgtcccggcgacactaactgcgagagatgggggaacctgctgcaggagggaaggggcagtttgtattaagtggtcactgggcccagtggggaagtatgaggggggcatggaggcttatttcactgtttcaataacaccagccttgcagactgacaagacttctcccctcggagagctaactgctcagccgtccacgtgtttctttgcacactggtaaagcccaggggttaccggcatgcattttggaatcagctggcttgtgaataagtccttgctttgccgtttccttggctgctaaatttggacccactatttaacttccctttggtctctgtttcttaatgaaataatagtatccaccttgttaagttacgctgtgaagtctgagagacctgcatgtgaagccctaagagaggctggagagcaggggtgccaaacgtgttcagtaatggatcagcagatcaatcttttgggctctgtggtccgtaagatctctgttgcagatactcaactctgccagtgtagccccaaagcagccatagataatagatacataatcaggcatggttgtgttctaataaaactttacataaaaagcaggcaacggtgagattttgcctgtgggttgtagtttgtaagccctggactaaagcctagtcctcaagagcaggggccatggatcccggctgcacctgggtttagatctcagctctgacactcacaagctgtgtgagctttcttcacctgctggcagttgtaagaattttgtgagtcatacattgataggccaaggacttgcaatggtgtttaggaaacgttaaacacaacttaagtgtntgctctcattttcattattacagagtgagtataaaacaggtcccaggccaggtgcggtggctcatgcctgccttggcctcccacagtgtggggattncagtcttgagccaccgggcccgtccatgaggtaaaatctttaaagtgcctgtcatcttagtaggtgctaaatacaggttactactagacntcataacttcaaattctgtacgtggacctgttcttttgtctcttctgagtacagtctcctgaagattgttctgaccaaacctttctatggagaaaacagagctgttattgctttaagtgatttgtagggtgttttggtttcantaaaatgtgtatggagaggtgacattgtcttagggatcaaaaagattaaacagcaaacctgctatttttctgtgtacactttcaggaaaatcatttcaatttatgttttaaaagacgctaagtgacagcgatgcctcatttgaaatcagaaagaatgaactttcattcnacacaaccatatgctttctttgatggcttgaatggttagggaatatgtgacattaaattcagcagtttccc

SEQ ID NO: 73002 - DNA, 650 bp, Homo sapiens
cacttcagaaatgatattgtgtacttccatcaggagatatgtaatatcttcttgtctctttttgtgatataaacagcctttaaggatcattgttcagaacattatttcattaaggtttgtaaaatataaaagacccccttttatcagtcatttgccttctttgaggaatagttcctacaggaaaggcaagatagatgcttggatatttcccttatttaccagttttcaaaataatgagttgctcactatcaccctgcaaaagttaccatgaggtttggtttttgtttattttgtttgtagtattactgtgagctaacaggaatttaaacatatttgagatatttcagtcaattgaggttatgtatccttcttggtatacaaattgtgccattttcggtcagtgaaagcctcttcaagtggatttcccaggtcctttggttgtgaccttaatataagtgtttgatagttttcctgctctctgataggcaagatagtctgtgtgtttatactgattcttggaatttagattaagtacaacaaggtttttacttcgttttatcattttcacacctgtaccttctttctcccacaccaaaaatcccatttctcaatattgttaagaatttattctttgtcctatgtcatactcc

SEQ ID NO: 73003 - DNA, 258 bp, Homo sapiens
agatacctcatttttcccccaactaactcagtatgcttttccacttcaaggcactgcccaatcctgtagctgcagatttaaataatacacaaaataattgtagatgaaacttaaatgaaaccaaaatgaagaaaacaaaataagttctttagtcataatgtctaccacaaataaaagcaattcagagattttcaatggtaggaattacctttatctttacaataacaagtttctattcttaaaatggaatggtctgca

SEQ ID NO: 73004 - DNA, 582 bp, Homo sapiens
agggttattgtatttcaggttcatggcttcccttaggatatgagctcagaatgtttggtttcttgtaagagatacacatatttttattataaatgtatgaatattgaacacataattatgtgaacattgatcacctccatgaatgactctctgcaagagacttctatatgcaaagtaccacagcaggtggagctacaatgaaggttcaggacttgtgtctcccaataaataacatctcatatgtaaaatgctcatctcctggatgagcatcctggtgatgtgatcctcatctgtttccccagaacaataaaaataagctatccttcatgtacaaagaaaatgtggcgaacccagtattggtggcacgtgactttgacatttcttgtttctttcagctgtagtaatagctcttttctgaattatctattgttgaactgtccaatatggtagccactatataaatgttactattgagcacttgaaattaggctagtccaattgagatgtgctgtcagtttaaaacacatactgatttccgaatcagcaccaaaaaagaatacaaataatatttattacatgttg

SEQ ID NO: 73005 - DNA, 320 bp, Homo sapiens
ggcagaggttgtagtgagccaagattgtgccattgcactccagcctgggcaacgagagcaagactccttctcaaaaaaaaaaaaaaaaaaaaaaaaagattaattaagttcctgtcagccaattttactgcccccatttcacagatgaggagcttgaggcttagagagagaagtcacctgcccagggtcacacagcaaatgaatggaggaaccagattccaaaccctcatctgattgactaccaaactagtcattatgttcacctgtatagatggttaaccatctgcagggcagttgtccttacccaacaaacattcctg

SEQ ID NO: 73006 - DNA, 194 bp, Homo sapiens
agctccccacgtcggtttccctgtttgatgatgaagatgaagaggataatctttttgggcgtacagctgctaagaggcagacattgtgtctacaagctcagagagaagagaaagcaaaagcctccgagctctccaaaaagaaagcatctgccctgttgttcagcagtgatgaggaggtgagctgaggtttctgc

SEQ ID NO: 73007 - DNA, 253 bp, Homo sapiens
ctgggccctacacatgcttcaagttacaggatctgggtgatggtcccggccaatgtcctccagtaacccccagctgagcctggcctccccagcagatgtttcctgcaatggaaagttgctggccagggctccacatggaggcgtggagtagggaggggaggtggcagggcactgctgttaggatgaaatctgaaatgtgagactcaagttgccagggacttcttggagacactctcacacctcaccaacccat

SEQ ID NO: 73008 - DNA, 416 bp, Homo sapiens
ttgcaattgacaagcatcttagtctctccgggctggtataacaaaatagcatagatggtgggcttagaaacagcagtcatttatttctcagatctaggggcggggaggccataatcaaggcaccggcagacccggcatctggtgagggcccgctcctggttcatagacagcaccctctgccatgtcctcacacggtggaacagggaggggcctctcggcgtctccttcatagaggaaccaatcccttccccgagggctcccgctcatggccaatcacttcccaaagaccccgcttcctaatactaccaccttggcgtgaggattttaaccgatggattgggggaaacacaaacgttccagccgtagcacgttatttggccgaaacccagaataccaggaggccagccctcgctctg

SEQ ID NO: 73009 - DNA, 294 bp, Homo sapiens
agcctctcagtagtttgtttgtttgtttgttttactccagcctgggcgacaagagcgaaactccatctcaaaataaaataaaaataaataaattgacacagtcagtgcctcgctcccacccccacctccagcatagcaccatgacagtcttctcacataacaagtcccaaaacacaccatcggcatccagaaagtgagagtaactcgttacagttgagacctctcactcccggtcattatctcatttcaatccaagaggtagacttcttcatcgcccctgacatacacatgagg

SEQ ID NO: 73010 - DNA, 357 bp, Homo sapiens
gtatttgcaaaatgcatttcttcacagaaattaatatcctgtgcaaatgctggctaattgattattactctttcataaaggcttaattaggtaggaaacccagtacctgcagcgagagaggaagaaaagtctttcctagggctagatcctgacccaaggttttggattttaatggggcagagttgtctgttttctattaaacacatacttgggagtaagtagacttgcccatctcctgttttatactgatcttttcacgaatgtgaacctttttcttgaaagagtaaatatctttaaatttttctgtagccttccctgttacaagttaaatgttcctacttctctagagtatttcga

SEQ ID NO: 73011 - DNA, 474 bp, Homo sapiens
ccagaaaccaagcctcctgtattcttgtgggcagcccacatgcgggttgaaactttgggtgcacccacctcttttacagctgcagccacggctctactcaattccccttcaccgccaatctgtcctcaccaatcagccctctcccaccgaatcacactcttcctcaaactcagtttatttgctttgccagtacaggaactaagtcaacaagagggctggcgtgcagtatgtcctgtcaaacgggcggctgctaaatgagaacacgtaatccaaacatgcatctccgcagtgagtgcacagcatgatcctccaacattcctttgcgattaggggtcattgtgcttccccacattcgggtcagaagattctacccaggagggaagacctgggacaggcaccaggatcatgcattttgggctcctggaggcactggatatctctgtgacaggcaccaggatcatgcattttgggctc

SEQ ID NO: 73012 - DNA, 3844 bp, Homo sapiens
tgagatggagtttcactcttgttggccaggctggagtgcaatggcacaatctcagcttactgcaacctccgcctcccgggttcaagcgattctcctgcctcagcctctcaagtagctgggattacaggcatgtgccaccacccctggctaactaatttcttttctatttagtagagatggggtttcaccatgttggtcaggctggtcttgaactcctgacctcaggtgatccacttgccttggcctcccaaagtgctaggattacagccgtgaaactgtgcctggctgattctttttttgttgttggatttttgaaacagggtctcccttggtcgcccaggctggagtgcagtggtgcgatcttggctcactataacctccacctcctggtttcaagtgatcctcccactttagcctcctgagtagctgtgattacaggcgtgcaccaccacacccggctaatttttgtatttttattagagacagggtttcaccatgttggccaggctgttctcaaactcctggactcaagggatccgcctgcctccacttcccaaagtcccgagattacaggtgtgagtcaccatgcctgaccttataattcttaagtcattttttctggtccatttcttccttagggtcctcacaacaaatctgcattaggcggtacaataatccttaacttcatgattcacaaaaggaagatgaagtgattcatgatttagaaaggggaagtagtaagcccactgcacactcctggatgatgatcctaaatccagatacagtaaaaatggggtatgggaaggtagaatacaaaatttggtttaaattaattatctaaatatctaaaaacatttttggatacattgttgatgtgaatgtaagactgtacagacttcctagaaaacagtttgggttccatcttttcatttccccagtgcagttttctgtagaaatggaatccgaggatttaagtggcagagaattgacaattgattccataatgaacaaagtgagagacattaaaaataagtttaaaaatgaagaccttactgatgaactaagcttgaataaaatttctgctgatactacagataactcgggaactgttaaccaaattatgatgatggcaaacaacccagaggactggttgagtttgttgctcaaactagagaaaaacagtgttccgctaagtgatgctcttttaaataaattgattggtcgttacagtcaagcaattgaagcgcttcccccagataaatatggccaaaatgagagttttgctagaattcaagtgagatttgctgaattaaaagctattcaagagccagatgatgcacgtgactactttcaaatggccagagcaaactgcaagaaatttgcttttgttcatatatcttttgcacaatttgaactgtcacaaggtaatgtcaaaaaaagtaaacaacttcttcaaaaagctgtagaacgtggagcagtaccactagaaatgctggaaattgccctgcggaatttaaacctccaaaaaaagcagctgctttcagaggaggaaaagaagaatttatcagcatctacggtattaactgcccaagaatcattttccggttcacttgggcatttacagaataggaacaacagttgtgattccagaggacagactactaaagccaggtttttatatggagagaacatgccaccacaagatgcagaaataggttaccggaattcattgagacaaactaacaaaactaaacagtcatgcccatttggaagagtcccagttaaccttctaaatagcccagattgtgatgtgaagacagatgattcagttgtaccttgttttatgaaaagacaaacctctagatcagaatgccgagatttggttgtgcctggatctaaaccaagtggaaatgattcctgtgaattaagaaatttaaagtctgttcaaaatagtcatttcaaggaacctctggtgtcagatgaaaagagttctgaacttattattactgattcaataaccctgaagaataaaacggaatcaagtcttctagctaaattagaagaaactaaagagtatcaagaaccagaggttccagagagtaaccagaaacagtggcaagctaagagaaagtcagagtgtattaaccagaatcctgctgcatcttcaaatcactggcagattccggagttagcccgaaaagttaatacagagcagaaacataccacttttgagcaacctgtcttttcagtttcaaaacagtcaccaccaatatcaacatctaaatggtttgacccaaaatctatttgtaagacaccaagcagcaataccttggatgattacatgagctgttttagaactccagttgtaaagaatgactttccacctgcttgtcagttgtcaacaccttatggccaacctgcctgtttccagcagcaacagcatcaaatacttgccactccacttcaaaatttacaggttttagcatcttcttcagcaaatgaatgcatttcggttaaaggaagaatttattccatattaaagcagataggaagtggaggttcaagcaaggtatttcaggtgttaaatgaaaagaaacagatatatgctataaaatatgtgaacttagaagaagcagataaccaaactcttgatagttaccggaacgaaatagcttatttgaataaactacaacaacacagtgataagatcatccgactttatgattatgaaatcacggaccagtacatctacatggtaatggagtgtggaaatattgatcttaatagttggcttaaaaagaaaaaatccattgatccatgggaacgcaagagttactggaaaaatatgttagaggcagttcacacaatccatcaacatggcattgttcacagtgatcttaaaccagctaactttctgatagttgatggaatgctaaagctaattgattttgggattgcaaaccaaatgcaaccagatacaacaagtgttgttaaagattctcaggttggcacagttaattatatgccaccagaagcaatcaaagatatgtcttcctccagagagaatgggaaatctaagtcaaagataagccccaaaagtgatgtttggtccttaggatgtattttgtactatatgacttacgggaaaacaccatttcagcagataattaatcagatttctaaattacatgccataattgatcctaatcatgaaattgaatttcccgatattccagagaaagatcttcaagatgtgttaaagtgttgtttaaaaagggacccaaaacagaggatatccattcctgagctcctggctcatccatatgttcaaattcaaactcatccagttaaccaaatggccaagggaaccactgaagaaatgaaatatgttctgggccaacttgttggtctgaattctcctaactccattttgaaagctgctaaaactttatatgaacactatagtggtggtgaaagtcataattcttcatcctccaagacttttgaaaaaaaaaggggaaaaaaatgatttgcagttattcgtaatgtcagataggaggtataaaatatattggactgttatactcttgaatccctgtggaaatctacatttgaagacaacatcactctgaagtgttatcagcaaaaaaaattcagtgagattatctttaaaagaaaactgtaaaaatagcaaccacttatggcactgtatatattgtagacttgttttctctgttttatgctcttgtgtaatctacttgacatcattttactcttggaatagtgggtggatagcaagtatattctaaaaaactttgtaaataaagttttgtggctaaaatga

SEQ ID NO: 73013 - DNA, 1231 bp, Homo sapiens
gattttcagagtgagagaaaagaggctcctgggattcagtcttttagcgaacactaaactgagcatttgaatgtaaaggctttgcaattctacaagaatagcactcaactattttaagtatttataggtccggttcacggacgtgttatgcaccatttaagccattttctacatggtttacttgggcagagcatagaatgcaatgtgccaagaggcaagtgcaacccacgtcactcatatttctttggtgtaagtggcaagcttttggtcaggagcttgaactgagaaagcaagcagaaagcagagtaagctcaggcagtagaaaaatgggcagaacggttcagatgtacatgttacagcttttattaacatctcggcttcccatcataatgcctattaatttcaacagtgggtacactttgggcatcaaaaagaacataaacatcacatgctattatttgacaaggcagttttataacttgtcaccaggaagtgctggtgaggaaggaaatatttcacggaagcattatttaaaaataaataaatgtaatttttaaaatactgtcagcatagctaacataaaaggcacccttggttaccctactttcattcttacttataaaatcccaaccttaactgttctgtgatggagagagagatactgctgttttgattggcccactgctaactgaaaactatcctgcaatcttgggtataaatcaaccttagcaacctttgacaatgagattttagatcctttggaaaacagaagtcatctagaaattcagccagtggatcctcctttcctgacacatcattctgcataaaattaggtgattgtcttcctctgctcttggcccaggatagaaacaggttgtataataaagtagttctccccttgcctttccataggccacctgtccctcagctaaatcagaaagataaaagttagatgcggccaggcgcagtggctcacaccggtaatcccagcactttgggaggccgaggcgggtggatcatgaggtcaagagatcgagaccatcctggccaacatggtgaaaccccctctccactaaaaatacaaaaattagccgggcgtggtgcgcatgcctgtagtccctactactcaggaggccaaggcaaaagaatcgcttgaacccggggggcggagtttgtggtgagccgagatcacaccactgcactccaacctggcgacagaacgagcttctgc

SEQ ID NO: 73014 - DNA, 533 bp, Homo sapiens
gatggctgctggaagtgaatagctcctctggaagatgagtggtgtctcctgaagctgagtatctgcgtgtctgtgaccttgtagtttctacttccagatgtggtcaagagaactgtgaatgtgtgtgcaccagaaacatccactgggacattcatagcacccttctcatgacatctccactccacaggccacccaaaatgagtgagagagtaaaatgtggagtgtctgcgcactgggatgctccacagcaatgggaatgaacagcctgctcagacacacatcaacttgggttgcctcagggaccttacgccaagcaggagatgccagacacagagtccatcctgagagagtctgttcctgtccaagctcagaaacacaggaagccacctgtgctgtagcagcacacggagatgcatcctttctggtccaccccacggccctcattgcagtcagggatcctctcccagaaagtccctgctgccagcccctgcccttccagggtgcactctggacgttgcttccgtgactggtct

SEQ ID NO: 73015 - DNA, 518 bp, Homo sapiens
ggtcactctagtcaataagcacaccaaaaattcccaagtctaatatatttctttgtttccttatttttattctcttctctctcaacttaccggagactcttgtatggccatcggaaaattaacctacttaacttgatttgcaacaaggctgagtccctctgtttgcctgagaaaatataatgggccagtttttttcagtcttcttttttaccatgtgaattccagaagcagtcagctcttataatcctaggagctccccaaatttctgaattttctatttccattcatttctgccctcaaatctgtcagtgcttgcctgtgcacatttcttatttataatctttgataagtgcaacaagtagtactttgttgttccttttttttttttccaccctgtcgctcaggctggagtgcagtggcacaatcttggctcactgcaacctctgccttccgggttcaagtgattctcctgtctcagcctccccagtagctggaactacaggcacccgccaccacgc

SEQ ID NO: 73016 - DNA, 239 bp, Homo sapiens
cttcgcaatataaataccctgtgtcatctgctaccaatagatttttgtaagtactagatttctcagcaacatttagtgccattgactacttttcctgcttgaaactcttctcattattttcatgatactgtctgtgctttcctcattagtgatctctgtgtcttttgcaaatgtttctcctttacaaccattaagtaatagaagttcgtagcattttgttcttaactcttctctagact

SEQ ID NO: 73017 - DNA, 1903 bp, Homo sapiens
ataacatcctgtgcgctgctgagctgagctggggcgcggccgcctgtctgcaccggcagcaccatgttgctcatggtcgtcagcatggcgtgtgttgggttcttcttggtccagagggccggtccacacgtgggtggtcaggacaagcccttcctgtctgcctggcccagcgctgtggtgcctcgaggaggacacgtgactcttcggtgtcactatcgtcataggtttaacaatttcatgctatacaaagaagacagaatccacgttcccatcttccatggcagattattccaggagagcttcaacatgagccctgtgaccacagcacatgcagggaactacacatgtcggggttcacacccacactcccccactgggtggtcggcacccagcaaccccgtggtgatcatggtcacaggaaaccacagaaaaccttccctcctggcccacccaggtcccctggtgaaatcaggagagagagtcatcctgcaatgttggtcagatatcatgtttgagcacttctttctgcacaaagaggggatctctaaggacccctcacgcctcgttggacagatccatgatggggtctccaaggccaatttctccatcggtcccatgatgcttgcccttgcagggacctacagatgctacggttctgttactcacaccccctatcagttgtcagctcccagtgatcccctggacatcgtggtcacaggtccatatgagaaaccttctctctcagcccagccgggccccaaggttcaggcaggagagagcgtgaccttgtcctgtagctcccggagctcctatgacatgtaccatctatccagggaggggggagcccatgaacgtaggctccctgcagtgcgcaaggtcaacagaacattccaggcagatttccctctgggccctgccacccacggagggacctacagatgcttcggctctttccgtcactctccctacgagtggtcagacccgagtgacccactgcttgtttctgtcacaggaaacccttcaagtagttggccttcacccacagaaccaagctccaaatctggtaaccccagacacctgcacattctgattgggacctcagtggtcatcatcctcttcatcctcctcctcttctttctccttcatctctggtgctccaacaaaaaaaatgctgctgtaatggaccaagagcctgcagggaacagaacagccaacagcgaggactctgatgaacaagaccctgaggaggtgacatacgcacagttggatcactgcgttttcacacagagaaaaatcactcgcccttctcagaggcccaagacaccccctacagataccatcttgtacacggaacttccaaatgctaagcccagatccaaagttgtctcctgcccatgagcaccacagtcaggccttgaggacgtcttctagggagacaacagccctgtctcaaaaccgagttgccagctcccatgtaccagcagctggaatctgaaggcgtgagtcttcatcttagggcatcgctcctcctcacgccacaaatctggtgcctctctcttgcttacaaatgtctaggtccccactgcctgctggaaagaaaacacactcctttgcttagcccacagttctccatttcacttgacccctgcccacctctccaacctaactggcttacttcctagtctacttgaggctgcaatcacactgaggaactcacaattccaaacatacaagaggctccctcttgacgtggcacttacccacgtgctgttccaccttccctcatgctgtttcacctttcttcggactattttccagccttctgtcagcagtgaaacttataaaattttttgtgatttcaatgtagctgtctcctcttcaaataaacatgtctgccctccaa

SEQ ID NO: 73018 - DNA, 1852 bp, Homo sapiens
ataacatcctgtgcgctgctgagctgagctggggcgcggccgcctgtctgcaccggcagcaccatgttgctcatggtcgtcagcatggcgtgtgttgggttcttcttggtccagagggccggtccacacgtgggtggtcaggacaagcccttcctgtctgcctggcccagcgctgtggtgcctcgaggaggacacgtgactcttcggtgtcactatcgtcataggtttaacaatttcatgctatacaaagaagacagaatccacgttcccatcttccatggcagattattccaggagagcttcaacatgagccctgtgaccacagcacatgcagggaactacacatgtcggggttcacacccacactcccccactgggtggtcggcacccagcaaccccgtggtgatcatggtcacaggaaaccacagaaaaccttccctcctggcccacccaggtcccctggtgaaatcaggagagagagtcatcctgcaatgttggtcagatatcatgtttgagcacttctttctgcacaaagaggggatctctaaggacccctcacgcctcgttggacagatccatgatggggtctccaaggccaatttctccatcggtcccatgatgcttgcccttgcagggacctacagatgctacggttctgttactcacaccccctatcagttgtcagctcccagtgatcccctggacatcgtggtcacaggtccatatgagaaaccttctctctcagcccagccgggccccaaggttcaggcaggagagagcgtgaccttgtcctgtagctcccggagctcctatgacatgtaccatctatccagggaggggggagcccatgaacgtaggctccctgcagtgcgcaaggtcaacagaacattccaggcagatttccctctgggccctgccacccacggagggacctacagatgcttcggctctttccgtcactctccctacgagtggtcagacccgagtgacccactgcttgtttctgtcacaggtaaccccagacacctgcacattctgattgggacctcagtggtcatcatcctcttcatcctcctcctcttctttctccttcatctctggtgctccaacaaaaaaaatgctgctgtaatggaccaagagcctgcagggaacagaacagccaacagcgaggactctgatgaacaagaccctgaggaggtgacatacgcacagttggatcactgcgttttcacacagagaaaaatcactcgcccttctcagaggcccaagacaccccctacagataccatcttgtacacggaacttccaaatgctaagcccagatccaaagttgtctcctgcccatgagcaccacagtcaggccttgaggacgtcttctagggagacaacagccctgtctcaaaaccgagttgccagctcccatgtaccagcagctggaatctgaaggcgtgagtcttcatcttagggcatcgctcctcctcacgccacaaatctggtgcctctctcttgcttacaaatgtctaggtccccactgcctgctggaaagaaaacacactcctttgcttagcccacagttctccatttcacttgacccctgcccacctctccaacctaactggcttacttcctagtctacttgaggctgcaatcacactgaggaactcacaattccaaacatacaagaggctccctcttgacgtggcacttacccacgtgctgttccaccttccctcatgctgtttcacctttcttcggactattttccagccttctgtcagcagtgaaacttataaaattttttgtgatttcaatgtagctgtctcctcttcaaataaacatgtctgccctccaa

SEQ ID NO: 73019 - DNA, 1618 bp, Homo sapiens
ataacatcctgtgcgctgctgagctgagctggggcgcggccgcctgtctgcaccggcagcaccatgttgctcatggtcgtcagcatggcgtgtgttgggttcttcttggtccagagggccggtccacacgtgggaaaccacagaaaaccttccctcctggcccacccaggtcccctggtgaaatcaggagagagagtcatcctgcaatgttggtcagatatcatgtttgagcacttctttctgcacaaagaggggatctctaaggacccctcacgcctcgttggacagatccatgatggggtctccaaggccaatttctccatcggtcccatgatgcttgcccttgcagggacctacagatgctacggttctgttactcacaccccctatcagttgtcagctcccagtgatcccctggacatcgtggtcacaggtccatatgagaaaccttctctctcagcccagccgggccccaaggttcaggcaggagagagcgtgaccttgtcctgtagctcccggagctcctatgacatgtaccatctatccagggaggggggagcccatgaacgtaggctccctgcagtgcgcaaggtcaacagaacattccaggcagatttccctctgggccctgccacccacggagggacctacagatgcttcggctctttccgtcactctccctacgagtggtcagacccgagtgacccactgcttgtttctgtcacaggaaacccttcaagtagttggccttcacccacagaaccaagctccaaatctggtaaccccagacacctgcacattctgattgggacctcagtggtcatcatcctcttcatcctcctcctcttctttctccttcatctctggtgctccaacaaaaaaaatgctgctgtaatggaccaagagcctgcagggaacagaacagccaacagcgaggactctgatgaacaagaccctgaggaggtgacatacgcacagttggatcactgcgttttcacacagagaaaaatcactcgcccttctcagaggcccaagacaccccctacagataccatcttgtacacggaacttccaaatgctaagcccagatccaaagttgtctcctgcccatgagcaccacagtcaggccttgaggacgtcttctagggagacaacagccctgtctcaaaaccgagttgccagctcccatgtaccagcagctggaatctgaaggcgtgagtcttcatcttagggcatcgctcctcctcacgccacaaatctggtgcctctctcttgcttacaaatgtctaggtccccactgcctgctggaaagaaaacacactcctttgcttagcccacagttctccatttcacttgacccctgcccacctctccaacctaactggcttacttcctagtctacttgaggctgcaatcacactgaggaactcacaattccaaacatacaagaggctccctcttgacgtggcacttacccacgtgctgttccaccttccctcatgctgtttcacctttcttcggactattttccagccttctgtcagcagtgaaacttataaaattttttgtgatttcaatgtagctgtctcctcttcaaataaacatgtctgccctccaa

SEQ ID NO: 73020 - DNA, 1482 bp, Homo sapiens
  misc_feature (121)..(122): n is a, c, g, or t
  misc_feature (233)..(236): n is a, c, g, or t
  misc_feature (306)..(306): n is a, c, g, or t
  misc_feature (405)..(405): n is a, c, g, or t
  misc_feature (682)..(682): n is a, c, g, or t
  misc_feature (947)..(947): n is a, c, g, or t
  misc_feature (976)..(976): n is a, c, g, or t
  misc_feature (1041)..(1041): n is a, c, g, or t
  misc_feature (1270)..(1270): n is a, c, g, or t
  misc_feature (1319)..(1320): n is a, c, g, or t
cactcgctggcttcccctcactccatctctgtgcccagagaaacaggggtactccaggggaatcctgtcctctgactgttcccagtagaaggcgggagcagaattttttcttttctctctnncccttctggttccccttcctctctgtgcccctcatcctttggattactcatcaaatgagcagcaacaacacccctagaccagctggtcctgtcctgggtcatctcgttgtnnnnagtttctagctggtataaggttaaagataccctttccagccccagcaaagccttaggcatttctgggatngctcctgactctgatgggcatcctcactcctcagacatttccaatctcccccacttcatgcagctttgcttccccttccccactggaagaaggaaacantcgctctcctttcccgttcacatgtctgatatttgctatgatattgaccttcacacacatcttagaggttctgtattttcctctcttttgacttctccctatcactactctactcaggcatagattcagtctagagctcttcaacagcaatgaaacggtaaacgaggggtaaacaaaacccagagatgtcatcaggtgcctgctaggagtcccacccgttcccctctagccctggcctgcccctccctaccagagtcttgattctccttcaaaactntggagaggttacatctggcagggtttggggacacctcttgcctccatctcaaacttccgctgcctccgagccacctttgactcctcctgggccccccttccaggtgcctcaagtgcagaggtcagccttcggttcaaattctatttctgggcttcagtgtccctgcaacctctataatagaaggaacagagtggtctatgtttctttctttctctgggagattggatgtagactcgggagacctgagttctggctctgtcttatnaattcaaattgtttaatctctctgagccncagtttacccacttggaaaagaagagttaggccacatggtctctgtcatcctgggattctgagtnaactgctccccttcagccagatcctaggggcatatccccccaacctgggacccaggcccccttcccttgcagcctctctcagttgtgagtgcacaggccagagggggttgagaggagccaagggggggcatgccgtgggacaaacgggctgtctagggccagtggctaaaggggcgggaggggaggagtcctcagggatcctgtttcaacaaacgtttctttcggaggnggggaaggcgggggagagggggagaaggacctatttaaagctaccctgnngctttggctttctctgtctgccagggtctccgactgtcccagacgggctggtgtgggcttgggatcctcctggtgacctctcccgctaaggtccctcagccactctgccccaagatgggccgtggggtgagtatccctaaagagcaggggtcgcagtctaga

SEQ ID NO: 73021 - DNA, 607 bp, Homo sapiens
  misc_feature (6)..(6): n is a, c, g, or t
ctcggnctctaccttgtctgcgaggaaaatggaagacctaaggcagacaggaaggaagcacaaaagacaagcattgggtcagacccataaaccacctcccaaaggctgtcatttcattgcactggaattttgctttatcagaagcaaggaagtaagggagtcattgccttgggcctgggaatctaagtgggagacaatattaatttggatccgattaattggagattactaactgtggacaaaagtttatctttgcacaatcaataaaaatggcatttttttagtaaattaagagcataaacaatattgctagaggtggcatgtttagtctaccaaaaacaatacttttcaggcactttagaaatatccttttagaagcagcgagtgcatgggctaattatcatcaatctttatgtatttgttaaagaaacatctacaggatctttattggtgaccttttgtaagacattagtttgaggtactacctatctacttgaaaataataaagtggcatttctttatgaaaaaaaaagaaatctcttccataattcagatttctacactttatacttgcctccctcctaaatcgtgatattgaaatatggtg

SEQ ID NO: 73022 - DNA, 6841 bp, Homo sapiens
  misc_feature (121)..(122): n is a, c, g, or t
  misc_feature (233)..(236): n is a, c, g, or t
  misc_feature (306)..(306): n is a, c, g, or t
  misc_feature (405)..(405): n is a, c, g, or t
  misc_feature (682)..(682): n is a, c, g, or t
  misc_feature (947)..(947): n is a, c, g, or t
  misc_feature (976)..(976): n is a, c, g, or t
  misc_feature (1041)..(1041): n is a, c, g, or t
  misc_feature (1270)..(1270): n is a, c, g, or t
  misc_feature (1319)..(1320): n is a, c, g, or t
cactcgctggcttcccctcactccatctctgtgcccagagaaacaggggtactccaggggaatcctgtcctctgactgttcccagtagaaggcgggagcagaattttttcttttctctctnncccttctggttccccttcctctctgtgcccctcatcctttggattactcatcaaatgagcagcaacaacacccctagaccagctggtcctgtcctgggtcatctcgttgtnnnnagtttctagctggtataaggttaaagataccctttccagccccagcaaagccttaggcatttctgggatngctcctgactctgatgggcatcctcactcctcagacatttccaatctcccccacttcatgcagctttgcttccccttccccactggaagaaggaaacantcgctctcctttcccgttcacatgtctgatatttgctatgatattgaccttcacacacatcttagaggttctgtattttcctctcttttgacttctccctatcactactctactcaggcatagattcagtctagagctcttcaacagcaatgaaacggtaaacgaggggtaaacaaaacccagagatgtcatcaggtgcctgctaggagtcccacccgttcccctctagccctggcctgcccctccctaccagagtcttgattctccttcaaaactntggagaggttacatctggcagggtttggggacacctcttgcctccatctcaaacttccgctgcctccgagccacctttgactcctcctgggccccccttccaggtgcctcaagtgcagaggtcagccttcggttcaaattctatttctgggcttcagtgtccctgcaacctctataatagaaggaacagagtggtctatgtttctttctttctctgggagattggatgtagactcgggagacctgagttctggctctgtcttatnaattcaaattgtttaatctctctgagccncagtttacccacttggaaaagaagagttaggccacatggtctctgtcatcctgggattctgagtnaactgctccccttcagccagatcctaggggcatatccccccaacctgggacccaggcccccttcccttgcagcctctctcagttgtgagtgcacaggccagagggggttgagaggagccaagggggggcatgccgtgggacaaacgggctgtctagggccagtggctaaaggggcgggaggggaggagtcctcagggatcctgtttcaacaaacgtttctttcggaggnggggaaggcgggggagagggggagaaggacctatttaaagctaccctgnngctttggctttctctgtctgccagggtctccgactgtcccagacgggctggtgtgggcttgggatcctcctggtgacctctcccgctaaggtccctcagccactctgccccaagatgggccgtggggctggccgtgagtactcacctgccgccaccacggcagagaatgggggcggcaagaagaaacagaaggagaaggaactggatgagctgaagaaggaggtggcaatggatgaccacaagctgtccttggatgagctgggccgcaaataccaagtggacctgtccaagggcctcaccaaccagcgggctcaggacgttctggctcgagatgggcccaacgccctcacaccacctcccacaacccctgagtgggtcaagttctgccgtcagcttttcggggggttctccatcctgctgtggattggggctatcctctgcttcctggcctacggcatccaggctgccatggaggatgaaccatccaacgacaatctatatctgggtgtggtgctggcagctgtggtcattgtcactggctgcttctcctactaccaggaggccaagagctccaagatcatggattccttcaagaacatggtacctcagcaagcccttgtgatccgggagggagagaagatgcagatcaacgcagaggaagtggtggtgggagacctggtggaggtgaagggtggagaccgcgtccctgctgacctccggatcatctcttctcatggctgtaaggtggataactcatccttaacaggagagtcggagccccagacccgctcccccgagttcacccatgagaaccccctggagacccgcaatatctgtttcttctccaccaactgtgttgaaggcactgccaggggcattgtgattgccacaggagaccggacggtgatgggccgcatagctactctcgcctcaggcctggaggttgggcggacacccatagcaatggagattgaacacttcatccagctgatcacaggggtcgctgtattcctgggggtctccttcttcgtgctctccctcatcctgggctacagctggctggaggcagtcatcttcctcatcggcatcatagtggccaacgtgcctgaggggcttctggccactgtcactgtgtgcctgaccctgacagccaagcgcatggcacggaagaactgcctggtgaagaacctggaggcggtggagacgctgggctccacgtccaccatctgctcggacaagacgggcaccctcacccagaaccgcatgaccgtcgcccacatgtggttcgacaaccaaatccatgaggctgacaccaccgaagatcagtctggggccacttttgacaaacgatcccctacgtggacggccctgtctcgaattgctggtctctgcaaccgcgccgtcttcaaggcaggacaggagaacatctccgtgtctaagcgggacacagctggtgatgcctctgagtcagctctgctcaagtgcattgagctctcctgtggctcagtgaggaaaatgagagacagaaaccccaaggtggcagagattcctttcaactctaccaacaagtaccagctgtctatccacgagcgagaagacagcccccagagccacgtgctggtgatgaagggggccccagagcgcattctggaccggtgctccaccatcctggtgcagggcaaggagatcccgctcgacaaggagatgcaagatgcctttcaaaatgcctacatggagctggggggacttggggagcgtgtgctgggattctgtcaactgaatctgccatctggaaagtttcctcggggcttcaaattcgacacggatgagctgaactttcccacggagaagctttgctttgtggggctcatgtctatgattgaccctccccgggctgctgtgccagatgctgtgggcaagtgccgaagcgcaggcatcaaggtgatcatggtaaccggggatcaccctatcacagccaaggccattgccaaaggcgtgggcatcatatcagagggtaacgagactgtggaggacattgcagcccggctcaacattcccatgagtcaagtcaaccccagagaagccaaggcatgcgtggtgcacggctctgacctgaaggacatgacatcggagcagctcgatgagatcctcaagaaccacacagagatcgtctttgctcgaacgtctccccagcagaagctcatcattgtggagggatgtcagaggcagggagccattgtggccgtgacgggtgacggggtgaacgactcccctgcattgaagaaggctgacattggcattgccatgggcatctctggctctgacgtctctaagcaggcagccgacatgatcctgctggatgacaactttgcctccatcgtcacgggggtggaggagggccgcctgatctttgacaacttgaagaaatccatcgcctacaccctgaccagcaacatccccgagatcacccccttcctgctgttcatcattgccaacatccccctacctctgggcactgtgaccatcctttgcattgacctgggcacagatatggtccctgccatctccttggcctatgaggcagctgagagtgatatcatgaagcggcagccacgaaactcccagacggacaagctggtgaatgagaggctcatcagcatggcctacggacagatcgggatgatccaggcactgggtggcttcttcacctactttgtgatcctggcagagaacggtttcctgccatcacggctactgggaatccgcctcgactgggatgaccggaccatgaatgatctggaggacagctatggacaggagtggacctatgagcagcggaaggtggtggagttcacgtgccacacggcattctttgccagcatcgtggtggtgcagtgggctgacctcatcatctgcaagacccgccgcaactcagtcttccagcagggcatgaagaacaagatcctgatttttgggctcctggaggagacggcgttggctgcctttctctcttactgcccaggcatgggtgtagccctccgcatgtacccgctcaaagtcacctggtggttctgcgccttcccctacagcctcctcatcttcatctatgatgaggtccgaaagctcatcctgcggcggtatcctggtggctgggtggagaaggagacatactactgaccccattggaagaagaaccaggcatggaaagatggggagctctggaggtgttgtggggatggtgatggagagggatggaaataacgggtggcattgggtggcaacatttggggagagataatgaggcaactcagcaggctaagttgcggggtatataaattggggtgatgaccccatagacctaactgtgaacaatcagattagacactatgtgttagagtccccccgaccagatccttttccatcccactccactatgttgtctattttttctgaggaattaagggttaccccaccctgcccactcccatcccttcaaccccacttcctactgtaatagatcagcatccaaaagcaggaacccatctaaaccagaaggaagccctctcagatcaccccagcctcactccatttcccacttccacccccgttagcttcctgcaggactctatccctggcttccccttcagaccttgcaatcacaaaaggttcttctggtgagtgcaagagcctgagactggaaaaggtggacttgtctcccagtcgaggctggtaagggaccttcagggagagctgggcagacaggtgggagatggaggtagggctggctggaggaaggaaacaacaaaggaagtgaggtagtgccaatgacaggacatttgacatgagtctccagatagatgtcgtggactccagctctacgtcccacattttagaataccccaccagcagaacaaactcagatctcatcagggtagcagcagaggcaggaccagaaggcaatcaagagcttccagaaatgccacacttgtgtgccacagagttccccgctgacccttggttaggggtcctcttagtccacaaggtccggatgtcactcatgtacttaataacacttcaccttctgtaatactaagtcctcagagctccatgctgttctgaaagggatggccacaagttctttcccagcctcttccattccctttcttttcatgcccatcccgatgaacctgcatcattccccgacactgccaagccaaccctggaaaaggagttcgctggccattggctagaatcagggtggagaagttccctgaaccttcctgtctcccagggacatgtatgcttccagggacaagcttaggtcatgaacatggtcagaacctttggacaagaggaaaaatactaagagatttgctttttctgggtgcggtggctcatgcctgtaatcccagcactttgggaggccgaggcaggtggatcatgaggtcaggagttcgaggcgagcctggccaacatggtgaaaccctgtctctactaaaagtacaaaaaattagccagtcatggtggcacacgcctgtaatctcagctactcaggaggctgaggcaggagaattgcttgaacctgtgaggaagaggttgcagtgagctgagatcgtgccattacactccagcctgggcgaaagggtgagactccatctcaaaaaaaaaaaaaatgatttgcttttgacgtcttaggtggcagggctgttccctccaggcaaatgcccttcaaaccgacgatcattgtgcccacttaccctgggctggagagttggtttcaggttcctacaggagatagctttctttcccttactccctatctaacacttttgctctgcaggcagccttgcccattctctaagcctggcttagaaggcactgggaatgtcctgtagagagagacctagataggtcatgcaagtgagaaagacatctgaggaaaatggaagacctaaggcagacaggaaggaagcacaaaagacaagcattgggtcagacccataaaccacctcccaaaggctgtcatttcattgcactggaattttgctttatcagaagcaaggaagtaagggagtcattgccttgggcctgggaatctaagtgggagacaatattaatttggatccgattaattggagattactaactgtggacaaaagtttatctttgcacaatcaataaaaatggcatttttttagtaaattaagagcataaacaatattgctagaggtggcatgtttagtctaccaaaaacaatacttttcaggcactttagaaatatccttttagaagcagcgagtgcatgggctaattatcatcaatctttatgtatttgttaaagaaacatctacaggatctttattggtgaccttttgtaagacattagtttgaggtactacctatctacttgaaaataataaagtggcatttctttatgaaaaaaaaagaaatctcttccataattcagatttctacactttatacttgcctccctcctaaatcgtgatattgaaatatggtg

SEQ ID NO: 73023 - DNA, 5636 bp, Homo sapiens
gcaagaatccatctcttaaaaaaaaatctaggactctcctagaatccttgataaaataatctgaaggaagagagatggggaaaaaacagttgaggtgtctttccagggagcttatccagactgcctccaggggagatgttatggccctaaccataggtgttgtctcaatccaatataattaggggtcaagcccagtcaaacccttctcagccctcaagccctccaagttgcatcacaaatgccacctcctccatgtggtctctcctgatggtcccccaccccttccaaccaggtgggactttccttctgggcattcttcccatgcccgggagctgaagggatgggcatggtgactggctgggttggctccggatgcgtgcccctacgcctctccttgctccctcagggcctcaccaaccagcgggctcaggacgttctggctcgagatgggcccaacgccctcacaccacctcccacaacccctgagtgggtcaagttctgccgtcagcttttcggggggttctccatcctgctgtggattggggctatcctctgcttcctggcctacggcatccaggctgccatggaggatgaaccatccaacgacaatctatatctgggtgtggtgctggcagctgtggtcattgtcactggctgcttctcctactaccaggaggccaagagctccaagatcatggattccttcaagaacatggtacctcagcaagcccttgtgatccgggagggagagaagatgcagatcaacgcagaggaagtggtggtgggagacctggtggaggtgaagggtggagaccgcgtccctgctgacctccggatcatctcttctcatggctgtaaggtggataactcatccttaacaggagagtcggagccccagacccgctcccccgagttcacccatgagaaccccctggagacccgcaatatctgtttcttctccaccaactgtgttgaaggcactgccaggggcattgtgattgccacaggagaccggacggtgatgggccgcatagctactctcgcctcaggcctggaggttgggcggacacccatagcaatggagattgaacacttcatccagctgatcacaggggtcgctgtattcctgggggtctccttcttcgtgctctccctcatcctgggctacagctggctggaggcagtcatcttcctcatcggcatcatagtggccaacgtgcctgaggggcttctggccactgtcactgtgtgcctgaccctgacagccaagcgcatggcacggaagaactgcctggtgaagaacctggaggcggtggagacgctgggctccacgtccaccatctgctcggacaagacgggcaccctcacccagaaccgcatgaccgtcgcccacatgtggttcgacaaccaaatccatgaggctgacaccaccgaagatcagtctggggccacttttgacaaacgatcccctacgtggacggccctgtctcgaattgctggtctctgcaaccgcgccgtcttcaaggcaggacaggagaacatctccgtgtctaagcgggacacagctggtgatgcctctgagtcagctctgctcaagtgcattgagctctcctgtggctcagtgaggaaaatgagagacagaaaccccaaggtggcagagattcctttcaactctaccaacaagtaccagctgtctatccacgagcgagaagacagcccccagagccacgtgctggtgatgaagggggccccagagcgcattctggaccggtgctccaccatcctggtgcagggcaaggagatcccgctcgacaaggagatgcaagatgcctttcaaaatgcctacatggagctggggggacttggggagcgtgtgctgggattctgtcaactgaatctgccatctggaaagtttcctcggggcttcaaattcgacacggatgagctgaactttcccacggagaagctttgctttgtggggctcatgtctatgattgaccctccccgggctgctgtgccagatgctgtgggcaagtgccgaagcgcaggcatcaaggtgatcatggtaaccggggatcaccctatcacagccaaggccattgccaaaggcgtgggcatcatatcagagggtaacgagactgtggaggacattgcagcccggctcaacattcccatgagtcaagtcaaccccagagaagccaaggcatgcgtggtgcacggctctgacctgaaggacatgacatcggagcagctcgatgagatcctcaagaaccacacagagatcgtctttgctcgaacgtctccccagcagaagctcatcattgtggagggatgtcagaggcagggagccattgtggccgtgacgggtgacggggtgaacgactcccctgcattgaagaaggctgacattggcattgccatgggcatctctggctctgacgtctctaagcaggcagccgacatgatcctgctggatgacaactttgcctccatcgtcacgggggtggaggagggccgcctgatctttgacaacttgaagaaatccatcgcctacaccctgaccagcaacatccccgagatcacccccttcctgctgttcatcattgccaacatccccctacctctgggcactgtgaccatcctttgcattgacctgggcacagatatggtccctgccatctccttggcctatgaggcagctgagagtgatatcatgaagcggcagccacgaaactcccagacggacaagctggtgaatgagaggctcatcagcatggcctacggacagatcgggatgatccaggcactgggtggcttcttcacctactttgtgatcctggcagagaacggtttcctgccatcacggctactgggaatccgcctcgactgggatgaccggaccatgaatgatctggaggacagctatggacaggagtggacctatgagcagcggaaggtggtggagttcacgtgccacacggcattctttgccagcatcgtggtggtgcagtgggctgacctcatcatctgcaagacccgccgcaactcagtcttccagcagggcatgaagaacaagatcctgatttttgggctcctggaggagacggcgttggctgcctttctctcttactgcccaggcatgggtgtagccctccgcatgtacccgctcaaagtcacctggtggttctgcgccttcccctacagcctcctcatcttcatctatgatgaggtccgaaagctcatcctgcggcggtatcctggtggctgggtggagaaggagacatactactgaccccattggaagaagaaccaggcatggaaagatggggagctctggaggtgttgtggggatggtgatggagagggatggaaataacgggtggcattgggtggcaacatttggggagagataatgaggcaactcagcaggctaagttgcggggtatataaattggggtgatgaccccatagacctaactgtgaacaatcagattagacactatgtgttagagtccccccgaccagatccttttccatcccactccactatgttgtctattttttctgaggaattaagggttaccccaccctgcccactcccatcccttcaaccccacttcctactgtaatagatcagcatccaaaagcaggaacccatctaaaccagaaggaagccctctcagatcaccccagcctcactccatttcccacttccacccccgttagcttcctgcaggactctatccctggcttccccttcagaccttgcaatcacaaaaggttcttctggtgagtgcaagagcctgagactggaaaaggtggacttgtctcccagtcgaggctggtaagggaccttcagggagagctgggcagacaggtgggagatggaggtagggctggctggaggaaggaaacaacaaaggaagtgaggtagtgccaatgacaggacatttgacatgagtctccagatagatgtcgtggactccagctctacgtcccacattttagaataccccaccagcagaacaaactcagatctcatcagggtagcagcagaggcaggaccagaaggcaatcaagagcttccagaaatgccacacttgtgtgccacagagttccccgctgacccttggttaggggtcctcttagtccacaaggtccggatgtcactcatgtacttaataacacttcaccttctgtaatactaagtcctcagagctccatgctgttctgaaagggatggccacaagttctttcccagcctcttccattccctttcttttcatgcccatcccgatgaacctgcatcattccccgacactgccaagccaaccctggaaaaggagttcgctggccattggctagaatcagggtggagaagttccctgaaccttcctgtctcccagggacatgtatgcttccagggacaagcttaggtcatgaacatggtcagaacctttggacaagaggaaaaatactaagagatttgctttttctgggtgcggtggctcatgcctgtaatcccagcactttgggaggccgaggcaggtggatcatgaggtcaggagttcgaggcgagcctggccaacatggtgaaaccctgtctctactaaaagtacaaaaaattagccagtcatggtggcacacgcctgtaatctcagctactcaggaggctgaggcaggagaattgcttgaacctgtgaggaagaggttgcagtgagctgagatcgtgccattacactccagcctgggcgaaagggtgagactccatctcaaaaaaaaaaaaaatgatttgcttttgacgtcttaggtggcagggctgttccctccaggcaaatgcccttcaaaccgacgatcattgtgcccacttaccctgggctggagagttggtttcaggttcctacaggagatagctttctttcccttactccctatctaacacttttgctctgcaggcagccttgcccattctctaagcctggcttagaaggcactgggaatgtcctgtagagagagacctagataggtcatgcaagtgagaaagacatctgaggaaaatggaagacctaaggcagacaggaaggaagcacaaaagacaagcattgggtcagacccataaaccacctcccaaaggctgtcatttcattgcactggaattttgctttatcagaagcaaggaagtaagggagtcattgccttgggcctgggaatctaagtgggagacaatattaatttggatccgattaattggagattactaactgtggacaaaagtttatctttgcacaatcaataaaaatggcatttttttagtaaattaagagcataaacaatattgctagaggtggcatgtttagtctaccaaaaacaatacttttcaggcactttagaaatatccttttagaagcagcgagtgcatgggctaattatcatcaatctttatgtatttgttaaagaaacatctacaggatctttattggtgaccttttgtaagacattagtttgaggtactacctatctacttgaaaataataaagtggcatttctttatgaaaaaaaaagaaatctcttccataattcagatttctacactttatacttgcctccctcctaaatcgtgatattgaaatatggtg

SEQ ID NO: 73024 - DNA, 6790 bp, Homo sapiens
  misc_feature (121)..(122): n is a, c, g, or t
  misc_feature (233)..(236): n is a, c, g, or t
  misc_feature (306)..(306): n is a, c, g, or t
  misc_feature (405)..(405): n is a, c, g, or t
  misc_feature (682)..(682): n is a, c, g, or t
  misc_feature (947)..(947): n is a, c, g, or t
  misc_feature (976)..(976): n is a, c, g, or t
  misc_feature (1041)..(1041): n is a, c, g, or t
  misc_feature (1270)..(1270): n is a, c, g, or t
  misc_feature (1319)..(1320): n is a, c, g, or t
cactcgctggcttcccctcactccatctctgtgcccagagaaacaggggtactccaggggaatcctgtcctctgactgttcccagtagaaggcgggagcagaattttttcttttctctctnncccttctggttccccttcctctctgtgcccctcatcctttggattactcatcaaatgagcagcaacaacacccctagaccagctggtcctgtcctgggtcatctcgttgtnnnnagtttctagctggtataaggttaaagataccctttccagccccagcaaagccttaggcatttctgggatngctcctgactctgatgggcatcctcactcctcagacatttccaatctcccccacttcatgcagctttgcttccccttccccactggaagaaggaaacantcgctctcctttcccgttcacatgtctgatatttgctatgatattgaccttcacacacatcttagaggttctgtattttcctctcttttgacttctccctatcactactctactcaggcatagattcagtctagagctcttcaacagcaatgaaacggtaaacgaggggtaaacaaaacccagagatgtcatcaggtgcctgctaggagtcccacccgttcccctctagccctggcctgcccctccctaccagagtcttgattctccttcaaaactntggagaggttacatctggcagggtttggggacacctcttgcctccatctcaaacttccgctgcctccgagccacctttgactcctcctgggccccccttccaggtgcctcaagtgcagaggtcagccttcggttcaaattctatttctgggcttcagtgtccctgcaacctctataatagaaggaacagagtggtctatgtttctttctttctctgggagattggatgtagactcgggagacctgagttctggctctgtcttatnaattcaaattgtttaatctctctgagccncagtttacccacttggaaaagaagagttaggccacatggtctctgtcatcctgggattctgagtnaactgctccccttcagccagatcctaggggcatatccccccaacctgggacccaggcccccttcccttgcagcctctctcagttgtgagtgcacaggccagagggggttgagaggagccaagggggggcatgccgtgggacaaacgggctgtctagggccagtggctaaaggggcgggaggggaggagtcctcagggatcctgtttcaacaaacgtttctttcggaggnggggaaggcgggggagagggggagaaggacctatttaaagctaccctgnngctttggctttctctgtctgccagggtctccgactgtcccagacgggctggtgtgggcttgggatcctcctggtgacctctcccgctaaggtccctcagccactctgccccaagatgggccgtggggctggccgtgagtactcacctgccgccaccacggcagagaatgggggcggcaagaagaaacagaaggagaaggaactggatgagctgaagaaggaggtggcaatggatgaccacaagctgtccttggatgagctgggccgcaaataccaagtggacctgtccaagggcctcaccaaccagcgggctcaggacgttctggctcgagatgggcccaacgccctcacaccacctcccacaacccctgagtgggtcaagttctgccgtcagcttttcggggggttctccatcctgctgtggattggggctatcctctgcttcctggcctacggcatccaggctgccatggaggatgaaccatccaacgacaatctatatctgggtgtggtgctggcagctgtggtcattgtcactggctgcttctcctactaccaggaggccaagagctccaagatcatggattccttcaagaacatggtacctcagcaagcccttgtgatccgggagggagagaagatgcagatcaacgcagaggaagtggtggtgggagacctggtggaggtgaagggtggagaccgcgtccctgctgacctccggatcatctcttctcatggctgtaaggtggataactcatccttaacaggagagtcggagccccagacccgctcccccgagttcacccatgagaaccccctggagacccgcaatatctgtttcttctccaccaactgtgttgaaggcactgccaggggcattgtgattgccacaggagaccggacggtgatgggccgcatagctactctcgcctcaggcctggaggttgggcggacacccatagcaatggagattgaacacttcatccagctgatcacaggggtcgctgtattcctgggggtctccttcttcgtgctctccctcatcctgggctacagctggctggaggcagtcatcttcctcatcggcatcatagtggccaacgtgcctgaggggcttctggccactgtcactgtgtgcctgaccctgacagccaagcgcatggcacggaagaactgcctggtgaagaacctggaggcggtggagacgctgggctccacgtccaccatctgctcggacaagacgggcaccctcacccagaaccgcatgaccgtcgcccacatgtggttcgacaaccaaatccatgaggctgacaccaccgaagatcagtctggggccacttttgacaaacgatcccctacgtggacggccctgtctcgaattgctggtctctgcaaccgcgccgtcttcaaggcaggacaggagaacatctccgtgtctaagcgggacacagctggtgatgcctctgagtcagctctgctcaagtgcattgagctctcctgtggctcagtgaggaaaatgagagacagaaaccccaaggtggcagagattcctttcaactctaccaacaagtaccagctgtctatccacgagcgagaagacagcccccagagccacgtgctggtgatgaagggggccccagagcgcattctggaccggtgctccaccatcctggtgcagggcaaggagatcccgctcgacaaggagatgcaagatgcctttcaaaatgcctacatggagctggggggacttggggagcgtgtgctgggattctgtcaactgaatctgccatctggaaagtttcctcggggcttcaaattcgacacggatgagctgaactttcccacggagaagctttgctttgtggggctcatgtctatgattgaccctccccgggctgctgtgccagatgctgtgggcaagtgccgaagcgcaggcatcaaggtgatcatggtaaccggggatcaccctatcacagccaaggccattgccaaaggcgtgggcatcatatcagagggtaacgagactgtggaggacattgcagcccggctcaacattcccatgagtcaagtcaaccccagagaagccaaggcatgcgtggtgcacggctctgacctgaaggacatgacatcggagcagctcgatgagatcctcaagaaccacacagagatcgtctttgctcgaacgtctccccagcagaagctcatcattgtggagggatgtcagaggcagggagccattgtggccgtgacgggtgacggggtgaacgactcccctgcattgaagaaggctgacattggcattgccatgggcatctctggctctgacgtctctaagcaggcagccgacatgatcctgctggatgacaactttgcctccatcgtcacgggggtggaggagggccgcctgatctttgacaacttgaagaaatccatcgcctacaccctgaccagcaacatccccgagatcacccccttcctgctgttcatcattgccaacatccccctacctctgggcactgtgaccatcctttgcattgacctgggcacagatatggtccctgccatctccttggcctatgaggcagctgagagtgatatcatgaagcggcagccacgaaactcccagacggacaagctggtgaatgagaggctcatcagcatggcctacggacagatcgagaacggtttcctgccatcacggctactgggaatccgcctcgactgggatgaccggaccatgaatgatctggaggacagctatggacaggagtggacctatgagcagcggaaggtggtggagttcacgtgccacacggcattctttgccagcatcgtggtggtgcagtgggctgacctcatcatctgcaagacccgccgcaactcagtcttccagcagggcatgaagaacaagatcctgatttttgggctcctggaggagacggcgttggctgcctttctctcttactgcccaggcatgggtgtagccctccgcatgtacccgctcaaagtcacctggtggttctgcgccttcccctacagcctcctcatcttcatctatgatgaggtccgaaagctcatcctgcggcggtatcctggtggctgggtggagaaggagacatactactgaccccattggaagaagaaccaggcatggaaagatggggagctctggaggtgttgtggggatggtgatggagagggatggaaataacgggtggcattgggtggcaacatttggggagagataatgaggcaactcagcaggctaagttgcggggtatataaattggggtgatgaccccatagacctaactgtgaacaatcagattagacactatgtgttagagtccccccgaccagatccttttccatcccactccactatgttgtctattttttctgaggaattaagggttaccccaccctgcccactcccatcccttcaaccccacttcctactgtaatagatcagcatccaaaagcaggaacccatctaaaccagaaggaagccctctcagatcaccccagcctcactccatttcccacttccacccccgttagcttcctgcaggactctatccctggcttccccttcagaccttgcaatcacaaaaggttcttctggtgagtgcaagagcctgagactggaaaaggtggacttgtctcccagtcgaggctggtaagggaccttcagggagagctgggcagacaggtgggagatggaggtagggctggctggaggaaggaaacaacaaaggaagtgaggtagtgccaatgacaggacatttgacatgagtctccagatagatgtcgtggactccagctctacgtcccacattttagaataccccaccagcagaacaaactcagatctcatcagggtagcagcagaggcaggaccagaaggcaatcaagagcttccagaaatgccacacttgtgtgccacagagttccccgctgacccttggttaggggtcctcttagtccacaaggtccggatgtcactcatgtacttaataacacttcaccttctgtaatactaagtcctcagagctccatgctgttctgaaagggatggccacaagttctttcccagcctcttccattccctttcttttcatgcccatcccgatgaacctgcatcattccccgacactgccaagccaaccctggaaaaggagttcgctggccattggctagaatcagggtggagaagttccctgaaccttcctgtctcccagggacatgtatgcttccagggacaagcttaggtcatgaacatggtcagaacctttggacaagaggaaaaatactaagagatttgctttttctgggtgcggtggctcatgcctgtaatcccagcactttgggaggccgaggcaggtggatcatgaggtcaggagttcgaggcgagcctggccaacatggtgaaaccctgtctctactaaaagtacaaaaaattagccagtcatggtggcacacgcctgtaatctcagctactcaggaggctgaggcaggagaattgcttgaacctgtgaggaagaggttgcagtgagctgagatcgtgccattacactccagcctgggcgaaagggtgagactccatctcaaaaaaaaaaaaaatgatttgcttttgacgtcttaggtggcagggctgttccctccaggcaaatgcccttcaaaccgacgatcattgtgcccacttaccctgggctggagagttggtttcaggttcctacaggagatagctttctttcccttactccctatctaacacttttgctctgcaggcagccttgcccattctctaagcctggcttagaaggcactgggaatgtcctgtagagagagacctagataggtcatgcaagtgagaaagacatctgaggaaaatggaagacctaaggcagacaggaaggaagcacaaaagacaagcattgggtcagacccataaaccacctcccaaaggctgtcatttcattgcactggaattttgctttatcagaagcaaggaagtaagggagtcattgccttgggcctgggaatctaagtgggagacaatattaatttggatccgattaattggagattactaactgtggacaaaagtttatctttgcacaatcaataaaaatggcatttttttagtaaattaagagcataaacaatattgctagaggtggcatgtttagtctaccaaaaacaatacttttcaggcactttagaaatatccttttagaagcagcgagtgcatgggctaattatcatcaatctttatgtatttgttaaagaaacatctacaggatctttattggtgaccttttgtaagacattagtttgaggtactacctatctacttgaaaataataaagtggcatttctttatgaaaaaaaaagaaatctcttccataattcagatttctacactttatacttgcctccctcctaaatcgtgatattgaaatatggtg

SEQ ID NO: 73025 - DNA, 3813 bp, Homo sapiens
gtatccaggctgtgccactgaatacccatgtaaccttggagatgtcacattcccttcctgagcctccattttctcaccacaaaattaggatgccatctccactgctgtaggagtgggatgtgagtaaagaaactagcccagggcctagcaaactgcacttacaactgcgatgatcccatggtgaggatttagactcacattctcaaggagaaatgggggaagtgagtactgaggagaggagaactgaagcaacaggggaagcaggctcagcagggagcctgcaggctgcggtggtgaagagaggcagggggcaggaggggctggtacaggtgccaggggtcagctgtctctgtccccacccaccctccagagaagccaaggcatgcgtggtgcacggctctgacctgaaggacatgacatcggagcagctcgatgagatcctcaagaaccacacagagatcgtctttgctcgaacgtctccccagcagaagctcatcattgtggagggatgtcagaggcagggagccattgtggccgtgacgggtgacggggtgaacgactcccctgcattgaagaaggctgacattggcattgccatgggcatctctggctctgacgtctctaagcaggcagccgacatgatcctgctggatgacaactttgcctccatcgtcacgggggtggaggagggccgcctgatctttgacaacttgaagaaatccatcgcctacaccctgaccagcaacatccccgagatcacccccttcctgctgttcatcattgccaacatccccctacctctgggcactgtgaccatcctttgcattgacctgggcacagatatggtccctgccatctccttggcctatgaggcagctgagagtgatatcatgaagcggcagccacgaaactcccagacggacaagctggtgaatgagaggctcatcagcatggcctacggacagatcgggatgatccaggcactgggtggcttcttcacctactttgtgatcctggcagagaacggtttcctgccatcacggctactgggaatccgcctcgactgggatgaccggaccatgaatgatctggaggacagctatggacaggagtggacctatgagcagcggaaggtggtggagttcacgtgccacacggcattctttgccagcatcgtggtggtgcagtgggctgacctcatcatctgcaagacccgccgcaactcagtcttccagcagggcatgaagaacaagatcctgatttttgggctcctggaggagacggcgttggctgcctttctctcttactgcccaggcatgggtgtagccctccgcatgtacccgctcaaagtcacctggtggttctgcgccttcccctacagcctcctcatcttcatctatgatgaggtccgaaagctcatcctgcggcggtatcctggtggctgggtggagaaggagacatactactgaccccattggaagaagaaccaggcatggaaagatggggagctctggaggtgttgtggggatggtgatggagagggatggaaataacgggtggcattgggtggcaacatttggggagagataatgaggcaactcagcaggctaagttgcggggtatataaattggggtgatgaccccatagacctaactgtgaacaatcagattagacactatgtgttagagtccccccgaccagatccttttccatcccactccactatgttgtctattttttctgaggaattaagggttaccccaccctgcccactcccatcccttcaaccccacttcctactgtaatagatcagcatccaaaagcaggaacccatctaaaccagaaggaagccctctcagatcaccccagcctcactccatttcccacttccacccccgttagcttcctgcaggactctatccctggcttccccttcagaccttgcaatcacaaaaggttcttctggtgagtgcaagagcctgagactggaaaaggtggacttgtctcccagtcgaggctggtaagggaccttcagggagagctgggcagacaggtgggagatggaggtagggctggctggaggaaggaaacaacaaaggaagtgaggtagtgccaatgacaggacatttgacatgagtctccagatagatgtcgtggactccagctctacgtcccacattttagaataccccaccagcagaacaaactcagatctcatcagggtagcagcagaggcaggaccagaaggcaatcaagagcttccagaaatgccacacttgtgtgccacagagttccccgctgacccttggttaggggtcctcttagtccacaaggtccggatgtcactcatgtacttaataacacttcaccttctgtaatactaagtcctcagagctccatgctgttctgaaagggatggccacaagttctttcccagcctcttccattccctttcttttcatgcccatcccgatgaacctgcatcattccccgacactgccaagccaaccctggaaaaggagttcgctggccattggctagaatcagggtggagaagttccctgaaccttcctgtctcccagggacatgtatgcttccagggacaagcttaggtcatgaacatggtcagaacctttggacaagaggaaaaatactaagagatttgctttttctgggtgcggtggctcatgcctgtaatcccagcactttgggaggccgaggcaggtggatcatgaggtcaggagttcgaggcgagcctggccaacatggtgaaaccctgtctctactaaaagtacaaaaaattagccagtcatggtggcacacgcctgtaatctcagctactcaggaggctgaggcaggagaattgcttgaacctgtgaggaagaggttgcagtgagctgagatcgtgccattacactccagcctgggcgaaagggtgagactccatctcaaaaaaaaaaaaaatgatttgcttttgacgtcttaggtggcagggctgttccctccaggcaaatgcccttcaaaccgacgatcattgtgcccacttaccctgggctggagagttggtttcaggttcctacaggagatagctttctttcccttactccctatctaacacttttgctctgcaggcagccttgcccattctctaagcctggcttagaaggcactgggaatgtcctgtagagagagacctagataggtcatgcaagtgagaaagacatctgaggaaaatggaagacctaaggcagacaggaaggaagcacaaaagacaagcattgggtcagacccataaaccacctcccaaaggctgtcatttcattgcactggaattttgctttatcagaagcaaggaagtaagggagtcattgccttgggcctgggaatctaagtgggagacaatattaatttggatccgattaattggagattactaactgtggacaaaagtttatctttgcacaatcaataaaaatggcatttttttagtaaattaagagcataaacaatattgctagaggtggcatgtttagtctaccaaaaacaatacttttcaggcactttagaaatatccttttagaagcagcgagtgcatgggctaattatcatcaatctttatgtatttgttaaagaaacatctacaggatctttattggtgaccttttgtaagacattagtttgaggtactacctatctacttgaaaataataaagtggcatttctttatgaaaaaaaaagaaatctcttccataattcagatttctacactttatacttgcctccctcctaaatcgtgatattgaaatatggtg

SEQ ID NO: 73026 - DNA, 6788 bp, Homo sapiens
  misc_feature (121)..(122): n is a, c, g, or t
  misc_feature (233)..(236): n is a, c, g, or t
  misc_feature (306)..(306): n is a, c, g, or t
  misc_feature (405)..(405): n is a, c, g, or t
  misc_feature (682)..(682): n is a, c, g, or t
  misc_feature (947)..(947): n is a, c, g, or t
  misc_feature (976)..(976): n is a, c, g, or t
  misc_feature (1041)..(1041): n is a, c, g, or t
  misc_feature (1270)..(1270): n is a, c, g, or t
  misc_feature (1319)..(1320): n is a, c, g, or t
cactcgctggcttcccctcactccatctctgtgcccagagaaacaggggtactccaggggaatcctgtcctctgactgttcccagtagaaggcgggagcagaattttttcttttctctctnncccttctggttccccttcctctctgtgcccctcatcctttggattactcatcaaatgagcagcaacaacacccctagaccagctggtcctgtcctgggtcatctcgttgtnnnnagtttctagctggtataaggttaaagataccctttccagccccagcaaagccttaggcatttctgggatngctcctgactctgatgggcatcctcactcctcagacatttccaatctcccccacttcatgcagctttgcttccccttccccactggaagaaggaaacantcgctctcctttcccgttcacatgtctgatatttgctatgatattgaccttcacacacatcttagaggttctgtattttcctctcttttgacttctccctatcactactctactcaggcatagattcagtctagagctcttcaacagcaatgaaacggtaaacgaggggtaaacaaaacccagagatgtcatcaggtgcctgctaggagtcccacccgttcccctctagccctggcctgcccctccctaccagagtcttgattctccttcaaaactntggagaggttacatctggcagggtttggggacacctcttgcctccatctcaaacttccgctgcctccgagccacctttgactcctcctgggccccccttccaggtgcctcaagtgcagaggtcagccttcggttcaaattctatttctgggcttcagtgtccctgcaacctctataatagaaggaacagagtggtctatgtttctttctttctctgggagattggatgtagactcgggagacctgagttctggctctgtcttatnaattcaaattgtttaatctctctgagccncagtttacccacttggaaaagaagagttaggccacatggtctctgtcatcctgggattctgagtnaactgctccccttcagccagatcctaggggcatatccccccaacctgggacccaggcccccttcccttgcagcctctctcagttgtgagtgcacaggccagagggggttgagaggagccaagggggggcatgccgtgggacaaacgggctgtctagggccagtggctaaaggggcgggaggggaggagtcctcagggatcctgtttcaacaaacgtttctttcggaggnggggaaggcgggggagagggggagaaggacctatttaaagctaccctgnngctttggctttctctgtctgccagggtctccgactgtcccagacgggctggtgtgggcttgggatcctcctggtgacctctcccgctaaggtccctcagccactctgccccaagatgggccgtggggctggccgtgagtactcacctgccgccaccacggcagagaatgggggcggcaagaagaaacagaaggagaaggaactggatgagctgaagaaggaggtggcaatggatgaccacaagctgtccttggatgagctgggccgcaaataccaagtggacctgtccaagggcctcaccaaccagcgggctcaggacgttctggctcgagatgggcccaacgccctcacaccacctcccacaacccctgagtgggtcaagttctgccgtcagcttttcggggggttctccatcctgctgtggattggggctatcctctgcttcctggcctacggcatccaggctgccatggaggatgaaccatccaacgacaatctatatctgggtgtggtgctggcagctgtggtcattgtcactggctgcttctcctactaccaggaggccaagagctccaagatcatggattccttcaagaacatggtacctcagcaagcccttgtgatccgggagggagagaagatgcagatcaacgcagaggaagtggtggtgggagacctggtggaggtgaagggtggagaccgcgtccctgctgacctccggatcatctcttctcatggctgtaaggtggataactcatccttaacaggagagtcggagccccagacccgctcccccgagttcacccatgagaaccccctggagacccgcaatatctgtttcttctccaccaactgtgttgaaggcactgccaggggcattgtgattgccacaggagaccggacggtgatgggccgcatagctactctcgcctcaggcctggaggttgggcggacacccatagcaatggagattgaacacttcatccagctgatcacaggggtcgctgtattcctgggggtctccttcttcgtgctctccctcatcctgggctacagctggctggaggcagtcatcttcctcatcggcatcatagtggccaacgtgcctgaggggcttctggccactgtcactgtgtgcctgaccctgacagccaagcgcatggcacggaagaactgcctggtgaagaacctggaggcggtggagacgctgggctccacgtccaccatctgctcggacaagacgggcaccctcacccagaaccgcatgaccgtcgcccacatgtggttcgacaaccaaatccatgaggctgacaccaccgaagatcagtctggggccacttttgacaaacgatcccctacgtggacggccctgtctcgaattgctggtctctgcaaccgcgccgtcttcaaggcaggacaggagaacatctccgtgtctaagcgggacacagctggtgatgcctctgagtcagctctgctcaagtgcattgagctctcctgtggctcagtgaggaaaatgagagacagaaaccccaaggtggcagagattcctttcaactctaccaacaagtaccagctgtctatccacgagcgagaagacagcccccagagccacgtgctggtgatgaagggggccccagagcgcattctggaccggtgctccaccatcctggtgcagggcaaggagatcccgctcgacaaggagatgcaagatgcctttcaaaatgcctacatggagctggggggacttggggagcgtgtgctgggattctgtcaactgaatctgccatctggaaagtttcctcggggcttcaaattcgacacggatgagctgaactttcccacggagaagctttgctttgtggggctcatgtctatgattgaccctccccgggctgctgtgccagatgctgtgggcaagtgccgaagcgcaggcatcaaggtgatcatggtaaccggggatcaccctatcacagccaaggccattgccaaaggcgtgggcatcatatcagagggtaacgagactgtggaggacattgcagcccggctcaacattcccatgagtcaagtcaaccccagagaagccaaggcatgcgtggtgcacggctctgacctgaaggacatgacatcggagcagctcgatgagatcctcaagaaccacacagagatcgtctttgctcgaacgtctccccagcagaagctcatcattgtggagggatgtcagaggcagggagccattgtggccgtgacgggtgacggggtgaacgactcccctgcattgaagaaggctgacattggcattgccatgggcatctctggctctgacgtctctaagcaggcagccgacatgatcctgctggatgacaactttgcctccatcgtcacgggggtggaggagggccgcctgatctttgacaacttgaagaaatccatcgcctacaccctgaccagcaacatccccgagatcacccccttcctgctgttcatcattgccaacatccccctacctctgggcactgtgaccatcctttgcattgacctgggcacagatatggtccctgccatctccttggcctatgaggcagctgagagtgatatcatgaagcggcagccacgaaactcccagacggacaagctggtgaatgagaggctcatcagcatggcctacggacagatcgggatgatccaggcactgggtggcttcttcacctactttgtgatcctggcagagaacggtttcctgccatcacggctactgggaatccgcctcgactgggatgaccggaccatgaatgatctggaggacagctatggacaggagtggacctatgagcagcggaaggtggtggagttcacgtgccacacggcattctttgccagcatcgtggtggtgcagtgggctgacctcatcatctgcaagacccgccgcaactcagtcttccagcagggcatgaagaacaagatcctgatttttgggctcctggaggagacggcgttggctgcctttctctcttactgcccaggcatgggtgtagccctccgcatgtacccgctcaaagtcacctggtggttctgcgccttcccctacagcctcctcatcttcatctatgatgaggtccgaaagctcatcctgcggcggtatcctggtggctgggtggagaaggagacatactactgaccccattggaagaagaaccaggcatggaaagatggggagctctggaggtgttgtggggatggtgatggagagggatggaaataacgggtggcattgggtggcaacatttggggagagataatgaggcaactcagcaggctaagttgcggggtatataaattggggtgatgaccccatagacctaactgtgaacaatcagattagacactatgtgttagagtccccccgaccagatccttttccatcccactccactatgttgtctattttttctgaggaattaagggttaccccaccctgcccactcccatcccttcaaccccacttcctactgtaatagatcagcatccaaaagcaggaacccatctaaaccagaaggaagccctctcagatcaccccagcctcactccatttcccacttccacccccgttagcttcctgcaggactctatccctggcttccccttcagaccttgcaatcacaaaaggttcttctggtgagtgcaagagcctgagactggaaaaggtggacttgtctcccagtcgaggctggtaagggaccttcagggagagctgggcagacaggtgggagatggaggtagggctggctggaggaaggaaacaacaaaggaagtgaggtagtgccaatgacaggacatttgacatgagtctccagatagatgtcgtggactccagctctacgtcccacattttagaataccccaccagcagaacaaactcagatctcatcagggtagcagcagaggcaggaccagaaggcaatcaagagcttccagaaatgccacacttgtgtgccacagagttccccgctgacccttggttaggggtcctcttagtccacaaggtccggatgtcactcatgtacttaataacacttcaccttctgtaatactaagtcctcagagctccatgctgttctgaaagggatggccacaagttctttcccagcctcttccattccctttcttttcatgcccatcccgatgaacctgcatcattccccgacactgccaagccaaccctggcttcctgtctcccagggacatgtatgcttccagggacaagcttaggtcatgaacatggtcagaacctttggacaagaggaaaaatactaagagatttgctttttctgggtgcggtggctcatgcctgtaatcccagcactttgggaggccgaggcaggtggatcatgaggtcaggagttcgaggcgagcctggccaacatggtgaaaccctgtctctactaaaagtacaaaaaattagccagtcatggtggcacacgcctgtaatctcagctactcaggaggctgaggcaggagaattgcttgaacctgtgaggaagaggttgcagtgagctgagatcgtgccattacactccagcctgggcgaaagggtgagactccatctcaaaaaaaaaaaaaatgatttgcttttgacgtcttaggtggcagggctgttccctccaggcaaatgcccttcaaaccgacgatcattgtgcccacttaccctgggctggagagttggtttcaggttcctacaggagatagctttctttcccttactccctatctaacacttttgctctgcaggcagccttgcccattctctaagcctggcttagaaggcactgggaatgtcctgtagagagagacctagataggtcatgcaagtgagaaagacatctgaggaaaatggaagacctaaggcagacaggaaggaagcacaaaagacaagcattgggtcagacccataaaccacctcccaaaggctgtcatttcattgcactggaattttgctttatcagaagcaaggaagtaagggagtcattgccttgggcctgggaatctaagtgggagacaatattaatttggatccgattaattggagattactaactgtggacaaaagtttatctttgcacaatcaataaaaatggcatttttttagtaaattaagagcataaacaatattgctagaggtggcatgtttagtctaccaaaaacaatacttttcaggcactttagaaatatccttttagaagcagcgagtgcatgggctaattatcatcaatctttatgtatttgttaaagaaacatctacaggatctttattggtgaccttttgtaagacattagtttgaggtactacctatctacttgaaaataataaagtggcatttctttatgaaaaaaaaagaaatctcttccataattcagatttctacactttatacttgcctccctcctaaatcgtgatattgaaatatggtg

SEQ ID NO: 73027 - DNA, 6191 bp, Homo sapiens
  misc_feature (121)..(122): n is a, c, g, or t
  misc_feature (233)..(236): n is a, c, g, or t
  misc_feature (306)..(306): n is a, c, g, or t
  misc_feature (405)..(405): n is a, c, g, or t
  misc_feature (682)..(682): n is a, c, g, or t
  misc_feature (947)..(947): n is a, c, g, or t
  misc_feature (976)..(976): n is a, c, g, or t
  misc_feature (1041)..(1041): n is a, c, g, or t
  misc_feature (1270)..(1270): n is a, c, g, or t
  misc_feature (1319)..(1320): n is a, c, g, or t
cactcgctggcttcccctcactccatctctgtgcccagagaaacaggggtactccaggggaatcctgtcctctgactgttcccagtagaaggcgggagcagaattttttcttttctctctnncccttctggttccccttcctctctgtgcccctcatcctttggattactcatcaaatgagcagcaacaacacccctagaccagctggtcctgtcctgggtcatctcgttgtnnnnagtttctagctggtataaggttaaagataccctttccagccccagcaaagccttaggcatttctgggatngctcctgactctgatgggcatcctcactcctcagacatttccaatctcccccacttcatgcagctttgcttccccttccccactggaagaaggaaacantcgctctcctttcccgttcacatgtctgatatttgctatgatattgaccttcacacacatcttagaggttctgtattttcctctcttttgacttctccctatcactactctactcaggcatagattcagtctagagctcttcaacagcaatgaaacggtaaacgaggggtaaacaaaacccagagatgtcatcaggtgcctgctaggagtcccacccgttcccctctagccctggcctgcccctccctaccagagtcttgattctccttcaaaactntggagaggttacatctggcagggtttggggacacctcttgcctccatctcaaacttccgctgcctccgagccacctttgactcctcctgggccccccttccaggtgcctcaagtgcagaggtcagccttcggttcaaattctatttctgggcttcagtgtccctgcaacctctataatagaaggaacagagtggtctatgtttctttctttctctgggagattggatgtagactcgggagacctgagttctggctctgtcttatnaattcaaattgtttaatctctctgagccncagtttacccacttggaaaagaagagttaggccacatggtctctgtcatcctgggattctgagtnaactgctccccttcagccagatcctaggggcatatccccccaacctgggacccaggcccccttcccttgcagcctctctcagttgtgagtgcacaggccagagggggttgagaggagccaagggggggcatgccgtgggacaaacgggctgtctagggccagtggctaaaggggcgggaggggaggagtcctcagggatcctgtttcaacaaacgtttctttcggaggnggggaaggcgggggagagggggagaaggacctatttaaagctaccctgnngctttggctttctctgtctgccagggtctccgactgtcccagacgggctggtgtgggcttgggatcctcctggtgacctctcccgctaaggtccctcagccactctgccccaagatgggccgtggggctggccgtgagtactcacctgccgccaccacggcagagaatgggggcggcaagaagaaacagaaggagaaggaactggatgagctgaagaaggaggtggcaatggatgaccacaagctgtccttggatgagctgggccgcaaataccaagtggacctgtccaagggcctcaccaaccagcgggctcaggacgttctggctcgagatgggcccaacgccctcacaccacctcccacaacccctgagtgggtcaagttctgccgtcagcttttcggggggttctccatcctgctgtggattggggctatcctctgcttcctggcctacggcatccaggctgccatggaggatgaaccatccaacgacaatctatatctgggtgtggtgctggcagctgtggtcattgtcactggctgcttctcctactaccaggaggccaagagctccaagatcatggattccttcaagaacatggtacctcagcaagcccttgtgatccgggagggagagaagatgcagatcaacgcagaggaagtggtggtgggagacctggtggaggtgaagggtggagaccgcgtccctgctgacctccggatcatctcttctcatggctgtaaggtggataactcatccttaacaggagagtcggagccccagacccgctcccccgagttcacccatgagaaccccctggagacccgcaatatctgtttcttctccaccaactgtgttgaaggcactgccaggggcattgtgattgccacaggagaccggacggtgatgggccgcatagctactctcgcctcaggcctggaggttgggcggacacccatagcaatggagattgaacacttcatccagctgatcacaggggtcgctgtattcctgggggtctccttcttcgtgctctccctcatcctgggctacagctggctggaggcagtcatcttcctcatcggcatcatagtggccaacgtgcctgaggggcttctggccactgtcactgtgtgcctgaccctgacagccaagcgcatggcacggaagaactgcctggtgaagaacctggaggcggtggagacgctgggctccacgtccaccatctgctcggacaagacgggcaccctcacccagaaccgcatgaccgtcgcccacatgtggttcgacaaccaaatccatgaggctgacaccaccgaagatcagtctggggccacttttgacaaacgatcccctacgtggacggccctgtctcgaattgctggtctctgcaaccgcgccgtcttcaaggcaggacaggagaacatctccgtgtctaagcgggacacagctggtgatgcctctgagtcagctctgctcaagtgcattgagctctcctgtggctcagtgaggaaaatgagagacagaaaccccaaggtggcagagattcctttcaactctaccaacaagtaccagctgtctatccacgagcgagaagacagcccccagagccacgtgctggtgatgaagggggccccagagcgcattctggaccggtgctccaccatcctggtgcagggcaaggagatcccgctcgacaaggagatgcaagatgcctttcaaaatgcctacatggagctggggggacttggggagcgtgtgctgggattctgtcaactgaatctgccatctggaaagtttcctcggggcttcaaattcgacacggatgagctgaactttcccacggagaagctttgctttgtggggctcatgtctatgattgaccctccccgggctgctgtgccagatgctgtgggcaagtgccgaagcgcaggcatcaaggtgatcatggtaaccggggatcaccctatcacagccaaggccattgccaaaggcgtgggcatcatatcagagggtaacgagactgtggaggacattgcagcccggctcaacattcccatgagtcaagtcaaccccagagaagccaaggcatgcgtggtgcacggctctgacctgaaggacatgacatcggagcagctcgatgagatcctcaagaaccacacagagatcgtctttgctcgaacgtctccccagcagaagctcatcattgtggagggatgtcagaggcagggagccattgtggccgtgacgggtgacggggtgaacgactcccctgcattgaagaaggctgacattggcattgccatgggcatctctggctctgacgtctctaagcaggcagccgacatgatcctgctggatgacaactttgcctccatcgtcacgggggtggaggagggccgcctgatctttgacaacttgaagaaatccatcgcctacaccctgaccagcaacatccccgagatcacccccttcctgctgttcatcattgccaacatccccctacctctgggcactgtgaccatcctttgcattgacctgggcacagatatggtccctgccatctccttggcctatgaggcagctgagagtgatatcatgaagcggcagccacgaaactcccagacggacaagctggtgaatgagaggctcatcagcatggcctacggacagatcgggatgatccaggcactgggtggcttcttcacctactttgtgatcctggcagagaacggtttcctgccatcacggctactgggaatccgcctcgactgggatgaccggaccatgaatgatctggaggacagctatggacaggagtggacctatgagcagcggaaggtggtggagttcacgtgccacacggcattctttgccagcatcgtggtggtgcagtgggctgacctcatcatctgcaagacccgccgcaactcagtcttccagcagggcatgaagaacaagatcctgatttttgggctcctggaggagacggcgttggctgcctttctctcttactgcccaggcatgggtgtagccctccgcatgtacccgctcaaagtcacctggtggttctgcgccttcccctacagcctcctcatcttcatctatgatgaggtccgaaagctcatcctgcggcggtatcctggtggctgggtggagaaggagacatactactgaccccattggaagaagaaccaggcatggaaagatggggagctctggaggtgttgtggggatggtgatggagagggatggaaataacgggtggcattgggtggcaacatttggggagagataatgaggcaactcagcaggctaagttgcggggtatataaattggggtgatgaccccatagacctaactgtgaacaatcagattagacactatgtgttagagtccccccgaccagatccttttccatcccactccactatgttgtctattttttctgaggaattaagggttaccccaccctgcccactcccatcccttcaaccccacttcctactgtaatagatcagcatccaaaagcaggaacccatctaaaccagaaggaagccctctcagatcaccccagcctcactccatttcccacttccacccccgttagcttcctgcaggactctatccctggcttccccttcagaccttgcaatcacaaaaggttcttctggtgagtgcaagagcctgagactggaaaaggtggacttgtctcccagtcgaggctggtaagggaccttcagggagagctgggcagacaggtgggagatggaggtagggctggctggaggaaggaaacaacaaaggaagtgaggtagtgccaatgacaggacatttgacatgagtctccagatagatgtcgtggactccagctctacgtcccacattttagaataccccaccagcagaacaaactcagatctcatcagggtagcagcagaggcaggaccagaaggcaatcaagagcttccagaaatgccacacttgtgtgccacagagttccccgctgacccttggttaggggtcctcttagtccacaaggtccggatgtcactcatgtacttaataacacttcaccttctgtaatactaagtcctcagagctccatgctgttctgaaagggatggccacaagttctttcccagcctcttccattccctttcttttcatgcccatcccgatgaacctgcatcattccccgacactgccaagccaaccctggaaaaggagttcgctggccattggctagaatcagggtggagaagttccctgaaccttcctgtctcccagggacatgtatgcttccagggacaagcttaggtcatgaacatggtcagaacctttggacaagaggaaaaatactaagagatttgctttttctgggtgcggtggctcatgcctgtaatcccagcactttgggaggccgaggcaggtggatcatgaggtcaggagttcgaggcgagcctggccaacatggtgaaaccctgtctctactaaaagtacaaaaaattagccagtcatggtggcacacgcctgtaatctcagctactcaggaggctgaggcaggagaattgcttgaacctgtgaggaagaggttgcagtgagctgagatcgtgccattacactccagcctgggcgaaagggtgagactccatctcaaaaaaaaaaaaaatgatttgcttttgacgtcttaggtggcagggctgttccctccaggcaaatgcccttcaaaccgacgatcattgtgcccacttaccctgggctggagagttggtttcaggttcctacaggagatagctttctcaacgctgcatgacctatctaggtcgctctctacagacattcccagtgccttctaagccaagacatg

SEQ ID NO: 73028 - DNA, 5851 bp, Homo sapiens
  misc_feature (121)..(122): n is a, c, g, or t
  misc_feature (233)..(236): n is a, c, g, or t
  misc_feature (306)..(306): n is a, c, g, or t
  misc_feature (405)..(405): n is a, c, g, or t
  misc_feature (682)..(682): n is a, c, g, or t
  misc_feature (947)..(947): n is a, c, g, or t
  misc_feature (976)..(976): n is a, c, g, or t
  misc_feature (1041)..(1041): n is a, c, g, or t
  misc_feature (1270)..(1270): n is a, c, g, or t
  misc_feature (1319)..(1320): n is a, c, g, or t
cactcgctggcttcccctcactccatctctgtgcccagagaaacaggggtactccaggggaatcctgtcctctgactgttcccagtagaaggcgggagcagaattttttcttttctctctnncccttctggttccccttcctctctgtgcccctcatcctttggattactcatcaaatgagcagcaacaacacccctagaccagctggtcctgtcctgggtcatctcgttgtnnnnagtttctagctggtataaggttaaagataccctttccagccccagcaaagccttaggcatttctgggatngctcctgactctgatgggcatcctcactcctcagacatttccaatctcccccacttcatgcagctttgcttccccttccccactggaagaaggaaacantcgctctcctttcccgttcacatgtctgatatttgctatgatattgaccttcacacacatcttagaggttctgtattttcctctcttttgacttctccctatcactactctactcaggcatagattcagtctagagctcttcaacagcaatgaaacggtaaacgaggggtaaacaaaacccagagatgtcatcaggtgcctgctaggagtcccacccgttcccctctagccctggcctgcccctccctaccagagtcttgattctccttcaaaactntggagaggttacatctggcagggtttggggacacctcttgcctccatctcaaacttccgctgcctccgagccacctttgactcctcctgggccccccttccaggtgcctcaagtgcagaggtcagccttcggttcaaattctatttctgggcttcagtgtccctgcaacctctataatagaaggaacagagtggtctatgtttctttctttctctgggagattggatgtagactcgggagacctgagttctggctctgtcttatnaattcaaattgtttaatctctctgagccncagtttacccacttggaaaagaagagttaggccacatggtctctgtcatcctgggattctgagtnaactgctccccttcagccagatcctaggggcatatccccccaacctgggacccaggcccccttcccttgcagcctctctcagttgtgagtgcacaggccagagggggttgagaggagccaagggggggcatgccgtgggacaaacgggctgtctagggccagtggctaaaggggcgggaggggaggagtcctcagggatcctgtttcaacaaacgtttctttcggaggnggggaaggcgggggagagggggagaaggacctatttaaagctaccctgnngctttggctttctctgtctgccagggtctccgactgtcccagacgggctggtgtgggcttgggatcctcctggtgacctctcccgctaaggtccctcagccactctgccccaagatgggccgtggggctggccgtgagtactcacctgccgccaccacggcagagaatgggggcggcaagaagaaacagaaggagaaggaactggatgagctgaagaaggaggtggcaatggatgaccacaagctgtccttggatgagctgggccgcaaataccaagtggacctgtccaagggcctcaccaaccagcgggctcaggacgttctggctcgagatgggcccaacgccctcacaccacctcccacaacccctgagtgggtcaagttctgccgtcagcttttcggggggttctccatcctgctgtggattggggctatcctctgcttcctggcctacggcatccaggctgccatggaggatgaaccatccaacgacaatctatatctgggtgtggtgctggcagctgtggtcattgtcactggctgcttctcctactaccaggaggccaagagctccaagatcatggattccttcaagaacatggtacctcagcaagcccttgtgatccgggagggagagaagatgcagatcaacgcagaggaagtggtggtgggagacctggtggaggtgaagggtggagaccgcgtccctgctgacctccggatcatctcttctcatggctgtaaggtggataactcatccttaacaggagagtcggagccccagacccgctcccccgagttcacccatgagaaccccctggagacccgcaatatctgtttcttctccaccaactgtgttgaaggcactgccaggggcattgtgattgccacaggagaccggacggtgatgggccgcatagctactctcgcctcaggcctggaggttgggcggacacccatagcaatggagattgaacacttcatccagctgatcacaggggtcgctgtattcctgggggtctccttcttcgtgctctccctcatcctgggctacagctggctggaggcagtcatcttcctcatcggcatcatagtggccaacgtgcctgaggggcttctggccactgtcactgtgtgcctgaccctgacagccaagcgcatggcacggaagaactgcctggtgaagaacctggaggcggtggagacgctgggctccacgtccaccatctgctcggacaagacgggcaccctcacccagaaccgcatgaccgtcgcccacatgtggttcgacaaccaaatccatgaggctgacaccaccgaagatcagtctggggccacttttgacaaacgatcccctacgtggacggccctgtctcgaattgctggtctctgcaaccgcgccgtcttcaaggcaggacaggagaacatctccgtgtctaagcgggacacagctggtgatgcctctgagtcagctctgctcaagtgcattgagctctcctgtggctcagtgaggaaaatgagagacagaaaccccaaggtggcagagattcctttcaactctaccaacaagtaccagctgtctatccacgagcgagaagacagcccccagagccacgtgctggtgatgaagggggccccagagcgcattctggaccggtgctccaccatcctggtgcagggcaaggagatcccgctcgacaaggagatgcaagatgcctttcaaaatgcctacatggagctggggggacttggggagcgtgtgctgggattctgtcaactgaatctgccatctggaaagtttcctcggggcttcaaattcgacacggatgagctgaactttcccacggagaagctttgctttgtggggctcatgtctatgattgaccctccccgggctgctgtgccagatgctgtgggcaagtgccgaagcgcaggcatcaaggtgatcatggtaaccggggatcaccctatcacagccaaggccattgccaaaggcgtgggcatcatatcagagggtaacgagactgtggaggacattgcagcccggctcaacattcccatgagtcaagtcaaccccagagaagccaaggcatgcgtggtgcacggctctgacctgaaggacatgacatcggagcagctcgatgagatcctcaagaaccacacagagatcgtctttgctcgaacgtctccccagcagaagctcatcattgtggagggatgtcagaggcagggagccattgtggccgtgacgggtgacggggtgaacgactcccctgcattgaagaaggctgacattggcattgccatgggcatctctggctctgacgtctctaagcaggcagccgacatgatcctgctggatgacaactttgcctccatcgtcacgggggtggaggagggccgcctgatctttgacaacttgaagaaatccatcgcctacaccctgaccagcaacatccccgagatcacccccttcctgctgttcatcattgccaacatccccctacctctgggcactgtgaccatcctttgcattgacctgggcacagatatggtccctgccatctccttggcctatgaggcagctgagagtgatatcatgaagcggcagccacgaaactcccagacggacaagctggtgaatgagaggctcatcagcatggcctacggacagatcgggatgatccaggcactgggtggcttcttcacctactttgtgatcctggcagagaacggtttcctgccatcacggctactgggaatccgcctcgactgggatgaccggaccatgaatgatctggaggacagctatggacaggagtggacctatgagcagcggaaggtggtggagttcacgtgccacacggcattctttgccagcatcgtggtggtgcagtgggctgacctcatcatctgcaagacccgccgcaactcagtcttccagcagggcatgaagaacaagatcctgatttttgggctcctggaggagacggcgttggctgcctttctctcttactgcccaggcatgggtgtagccctccgcatgtacccgctcaaagtcacctggtggttctgcgccttcccctacagcctcctcatcttcatctatgatgaggtccgaaagctcatcctgcggcggtatcctggtggctgggtggagaaggagacatactactgaccccattggaagaagaaccaggcatggaaagatggggagctctggaggtgttgtggggatggtgatggagagggatggaaataacgggtggcattgggtggcaacatttggggagagataatgaggcaactcagcaggctaagttgcggggtatataaattggggtgatgaccccatagacctaactgtgaacaatcagattagacactatgtgttagagtccccccgaccagatccttttccatcccactccactatgttgtctattttttctgaggaattaagggttaccccaccctgcccactcccatcccttcaaccccacttcctactgtaatagatcagcatccaaaagcaggaacccatctaaaccagaaggaagccctctcagatcaccccagcctcactccatttcccacttccacccccgttagcttcctgcaggactctatccctggcttccccttcagaccttgcaatcacaaaaggttcttctggtgagtgcaagagcctgagactggaaaaggtggacttgtctcccagtcgaggctggtaagggaccttcagggagagctgggcagacaggtgggagatggaggtagggctggctggaggaaggaaacaacaaaggaagtgaggtagtgccaatgacaggacatttgacatgagtctccagatagatgtcgtggactccagctctacgtcccacattttagaataccccaccagcagaacaaactcagatctcatcagggtagcagcagaggcaggaccagaaggcaatcaagagcttccagaaatgccacacttgtgtgccacagagttccccgctgacccttggttaggggtcctcttagtccacaaggtccggatgtcactcatgtacttaataacacttcaccttctgtaatactaagtcctcagagctccatgctgttctgaaagggatggccacaagttctttcccagcctcttccattccctttcttttcatgcccatcccgatgaacctgcatcattccccgacactgccaagccaaccctggaaaaggagttcgctggccattggctagaatcagggtggagaagttccctgaaccttcctgtctcccagggacatgtatgcttccagggacaagcttaggtcatgaacatggtcagaacctttggacaagaggaaaaatactaagagatttgctttttctgggtgcggtggctcatgcctgtaatcccagcactttgggaggccgaggcaggtggatcatgaggtcaggagttcgaggcgagcctggccaacatggtgaaaccctgcttactgtcattgcccgcttgttgaccagccggaattgtcctg

SEQ ID NO: 73029 - DNA, 1747 bp, Homo sapiens
cagagtagctataaaagggtacacaaggaaggtctctgtgataatggaacagcgctgtatcctgacgacggtagtattacatcaatctatacatataataaaattgcctatgcacacacaggcacacacaaatgggctcatgtaaagagtgatgccggtagcagcagaggcaggaccagaaggcaatcaagagcttccagaaatgccacacttgtgtgccacagagttccccgctgacccttggttaggggtcctcttagtccacaaggtccggatgtcactcatgtacttaataacacttcaccttctgtaatactaagtcctcagagctccatgctgttctgaaagggatggccacaagttctttcccagcctcttccattccctttcttttcatgcccatcccgatgaacctgcatcattccccgacactgccaagccaaccctggaaaaggagttcgctggccattggctagaatcagggtggagaagttccctgaaccttcctgtctcccagggacatgtatgcttccagggacaagcttaggtcatgaacatggtcagaacctttggacaagaggaaaaatactaagagatttgctttttctgggtgcggtggctcatgcctgtaatcccagcactttgggaggccgaggcaggtggatcatgaggtcaggagttcgaggcgagcctggccaacatggtgaaaccctgtctctactaaaagtacaaaaaattagccagtcatggtggcacacgcctgtaatctcagctactcaggaggctgaggcaggagaattgcttgaacctgtgaggaagaggttgcagtgagctgagatcgtgccattacactccagcctgggcgaaagggtgagactccatctcaaaaaaaaaaaaaatgatttgcttttgacgtcttaggtggcagggctgttccctccaggcaaatgcccttcaaaccgacgatcattgtgcccacttaccctgggctggagagttggtttcaggttcctacaggagatagctttctttcccttactccctatctaacacttttgctctgcaggcagccttgcccattctctaagcctggcttagaaggcactgggaatgtcctgtagagagagacctagataggtcatgcaagtgagaaagacatctgaggaaaatggaagacctaaggcagacaggaaggaagcacaaaagacaagcattgggtcagacccataaaccacctcccaaaggctgtcatttcattgcactggaattttgctttatcagaagcaaggaagtaagggagtcattgccttgggcctgggaatctaagtgggagacaatattaatttggatccgattaattggagattactaactgtggacaaaagtttatctttgcacaatcaataaaaatggcatttttttagtaaattaagagcataaacaatattgctagaggtggcatgtttagtctaccaaaaacaatacttttcaggcactttagaaatatccttttagaagcagcgagtgcatgggctaattatcatcaatctttatgtatttgttaaagaaacatctacaggatctttattggtgaccttttgtaagacattagtttgaggtactacctatctacttgaaaataataaagtggcatttctttatgaaaaaaaaagaaatctcttccataattcagatttctacactttatacttgcctccctcctaaatcgtgatattgaaatatggtg

SEQ ID NO: 73030 - DNA, 1241 bp, Homo sapiens
gctatagaacaatgcgtctagaaccgttatggacaaagaaggataaaagtactgtaagaagagttgtgcatattttcatgtgagtagcaggtggcgtcgatgcacatgctaagtcctcagacaagactttgggagaggacggagatcaagatggaagaagatagtgagtgaggctgtatgcgagcctggccaacatggtgaaaccctgtctctactaaaagtacaaaaaattagccagtcatggtggcacacgcctgtaatctcagctactcaggaggctgaggcaggagaattgcttgaacctgtgaggaagaggttgcagtgagctgagatcgtgccattacactccagcctgggcgaaagggtgagactccatctcaaaaaaaaaaaaaatgatttgcttttgacgtcttaggtggcagggctgttccctccaggcaaatgcccttcaaaccgacgatcattgtgcccacttaccctgggctggagagttggtttcaggttcctacaggagatagctttctttcccttactccctatctaacacttttgctctgcaggcagccttgcccattctctaagcctggcttagaaggcactgggaatgtcctgtagagagagacctagataggtcatgcaagtgagaaagacatctgaggaaaatggaagacctaaggcagacaggaaggaagcacaaaagacaagcattgggtcagacccataaaccacctcccaaaggctgtcatttcattgcactggaattttgctttatcagaagcaaggaagtaagggagtcattgccttgggcctgggaatctaagtgggagacaatattaatttggatccgattaattggagattactaactgtggacaaaagtttatctttgcacaatcaataaaaatggcatttttttagtaaattaagagcataaacaatattgctagaggtggcatgtttagtctaccaaaaacaatacttttcaggcactttagaaatatccttttagaagcagcgagtgcatgggctaattatcatcaatctttatgtatttgttaaagaaacatctacaggatctttattggtgaccttttgtaagacattagtttgaggtactacctatctacttgaaaataataaagtggcatttctttatgaaaaaaaaagaaatctcttccataattcagatttctacactttatacttgcctccctcctaaatcgtgatattgaaatatggtg

SEQ ID NO: 73031 - DNA, 2475 bp, Homo sapiens
  misc_feature (121)..(122): n is a, c, g, or t
  misc_feature (233)..(236): n is a, c, g, or t
  misc_feature (306)..(306): n is a, c, g, or t
  misc_feature (405)..(405): n is a, c, g, or t
  misc_feature (682)..(682): n is a, c, g, or t
  misc_feature (947)..(947): n is a, c, g, or t
  misc_feature (976)..(976): n is a, c, g, or t
  misc_feature (1041)..(1041): n is a, c, g, or t
  misc_feature (1270)..(1270): n is a, c, g, or t
  misc_feature (1319)..(1320): n is a, c, g, or t
cactcgctggcttcccctcactccatctctgtgcccagagaaacaggggtactccaggggaatcctgtcctctgactgttcccagtagaaggcgggagcagaattttttcttttctctctnncccttctggttccccttcctctctgtgcccctcatcctttggattactcatcaaatgagcagcaacaacacccctagaccagctggtcctgtcctgggtcatctcgttgtnnnnagtttctagctggtataaggttaaagataccctttccagccccagcaaagccttaggcatttctgggatngctcctgactctgatgggcatcctcactcctcagacatttccaatctcccccacttcatgcagctttgcttccccttccccactggaagaaggaaacantcgctctcctttcccgttcacatgtctgatatttgctatgatattgaccttcacacacatcttagaggttctgtattttcctctcttttgacttctccctatcactactctactcaggcatagattcagtctagagctcttcaacagcaatgaaacggtaaacgaggggtaaacaaaacccagagatgtcatcaggtgcctgctaggagtcccacccgttcccctctagccctggcctgcccctccctaccagagtcttgattctccttcaaaactntggagaggttacatctggcagggtttggggacacctcttgcctccatctcaaacttccgctgcctccgagccacctttgactcctcctgggccccccttccaggtgcctcaagtgcagaggtcagccttcggttcaaattctatttctgggcttcagtgtccctgcaacctctataatagaaggaacagagtggtctatgtttctttctttctctgggagattggatgtagactcgggagacctgagttctggctctgtcttatnaattcaaattgtttaatctctctgagccncagtttacccacttggaaaagaagagttaggccacatggtctctgtcatcctgggattctgagtnaactgctccccttcagccagatcctaggggcatatccccccaacctgggacccaggcccccttcccttgcagcctctctcagttgtgagtgcacaggccagagggggttgagaggagccaagggggggcatgccgtgggacaaacgggctgtctagggccagtggctaaaggggcgggaggggaggagtcctcagggatcctgtttcaacaaacgtttctttcggaggnggggaaggcgggggagagggggagaaggacctatttaaagctaccctgnngctttggctttctctgtctgccagggtctccgactgtcccagacgggctggtgtgggcttgggatcctcctggtgacctctcccgctaaggtccctcagccactctgccccaagatgggccgtggggctggccgtgagtactcacctgccgccaccacggcagagaatgggggcggcaagaagaaacagaaggagaaggaactggatgagctgaagaaggaggtggcaatggatgaccacaagctgtccttggatgagctgggccgcaaataccaagtggacctgtccaagggcctcaccaaccagcgggctcaggacgttctggctcgagatgggcccaacgccctcacaccacctcccacaacccctgagtgggtcaagttctgccgtcagcttttcggggggttctccatcctgctgtggattggggctatcctctgcttcctggcctacggcatccaggctgccatggaggatgaaccatccaacgacaatctatatctgggtgtggtgctggcagctgtggtcattgtcactggctgcttctcctactaccaggaggccaagagctccaagatcatggattccttcaagaacatggtacctcagcaagcccttgtgatccgggagggagagaagatgcagatcaacgcagaggaagtggtggtgggagacctggtggaggtgaagggtggagaccgcgtccctgctgacctccggatcatctcttctcatggctgtaaggtggataactcatccttaacaggagagtcggagccccagacccgctcccccgagttcacccatgagaaccccctggagacccgcaatatctgtttcttctccaccaactgtgttgaaggtgagaagccaggctgccccctgtaggaaagagtctgaatcctgaatccatagtcaggatgaagggctctggtagtacttacctggcaaaagctctgccattggtggggcaattgaggggtcagggggccctgaatattatggaaacaccctccacagagcagggtattgactgagggcagcctgactccatgggaaatgtatctcccttccccagggagatctctgttctgtccaccccaagacttgagtggatttcaaagctttcaggtattgggttaagaaccccttacg

SEQ ID NO: 73032 - DNA, 1928 bp, Homo sapiens
  misc_feature (121)..(122): n is a, c, g, or t
  misc_feature (233)..(236): n is a, c, g, or t
  misc_feature (306)..(306): n is a, c, g, or t
  misc_feature (405)..(405): n is a, c, g, or t
  misc_feature (682)..(682): n is a, c, g, or t
  misc_feature (947)..(947): n is a, c, g, or t
  misc_feature (976)..(976): n is a, c, g, or t
  misc_feature (1041)..(1041): n is a, c, g, or t
  misc_feature (1270)..(1270): n is a, c, g, or t
  misc_feature (1319)..(1320): n is a, c, g, or t
  misc_feature (1808)..(1808): n is a, c, g, or t
  misc_feature (1814)..(1814): n is a, c, g, or t
  misc_feature (1830)..(1830): n is a, c, g, or t
  misc_feature (1842)..(1842): n is a, c, g, or t
  misc_feature (1902)..(1902): n is a, c, g, or t
cactcgctggcttcccctcactccatctctgtgcccagagaaacaggggtactccaggggaatcctgtcctctgactgttcccagtagaaggcgggagcagaattttttcttttctctctnncccttctggttccccttcctctctgtgcccctcatcctttggattactcatcaaatgagcagcaacaacacccctagaccagctggtcctgtcctgggtcatctcgttgtnnnnagtttctagctggtataaggttaaagataccctttccagccccagcaaagccttaggcatttctgggatngctcctgactctgatgggcatcctcactcctcagacatttccaatctcccccacttcatgcagctttgcttccccttccccactggaagaaggaaacantcgctctcctttcccgttcacatgtctgatatttgctatgatattgaccttcacacacatcttagaggttctgtattttcctctcttttgacttctccctatcactactctactcaggcatagattcagtctagagctcttcaacagcaatgaaacggtaaacgaggggtaaacaaaacccagagatgtcatcaggtgcctgctaggagtcccacccgttcccctctagccctggcctgcccctccctaccagagtcttgattctccttcaaaactntggagaggttacatctggcagggtttggggacacctcttgcctccatctcaaacttccgctgcctccgagccacctttgactcctcctgggccccccttccaggtgcctcaagtgcagaggtcagccttcggttcaaattctatttctgggcttcagtgtccctgcaacctctataatagaaggaacagagtggtctatgtttctttctttctctgggagattggatgtagactcgggagacctgagttctggctctgtcttatnaattcaaattgtttaatctctctgagccncagtttacccacttggaaaagaagagttaggccacatggtctctgtcatcctgggattctgagtnaactgctccccttcagccagatcctaggggcatatccccccaacctgggacccaggcccccttcccttgcagcctctctcagttgtgagtgcacaggccagagggggttgagaggagccaagggggggcatgccgtgggacaaacgggctgtctagggccagtggctaaaggggcgggaggggaggagtcctcagggatcctgtttcaacaaacgtttctttcggaggnggggaaggcgggggagagggggagaaggacctatttaaagctaccctgnngctttggctttctctgtctgccagggtctccgactgtcccagacgggctggtgtgggcttgggatcctcctggtgacctctcccgctaaggtccctcagccactctgccccaagatgggccgtggggctggccgtgagtactcacctgccgccaccacggcagagaatgggggcggcaagaagaaacagaaggagaaggaactggatgagctgaagaaggaggtggcaatggatgaccacaagctgtccttggatgagctgggccgcaaataccaagtggacctgtccaagggcctcaccaaccagcgggctcaggacgttctggctcgagatgggcccaacgccctcacaccacctcccacaacccctgagtgggtcaagttctgccgtcagcttttcggggggttctccatcctgctgtggattggggctatcctctgcttctggagccttccaggccctgctgcatcttttctagccactacagnctctgnctttcctttcacaggncagcttctttgnggcctggctacacttgcttggctttccttccttcacttccaatttcctcttccccactgntttcctggactcgctctcttccgtgg

SEQ ID NO: 73033 - DNA, 1843 bp, Homo sapiens
  misc_feature (121)..(122): n is a, c, g, or t
  misc_feature (233)..(236): n is a, c, g, or t
  misc_feature (306)..(306): n is a, c, g, or t
  misc_feature (405)..(405): n is a, c, g, or t
  misc_feature (682)..(682): n is a, c, g, or t
  misc_feature (947)..(947): n is a, c, g, or t
  misc_feature (976)..(976): n is a, c, g, or t
  misc_feature (1041)..(1041): n is a, c, g, or t
  misc_feature (1270)..(1270): n is a, c, g, or t
  misc_feature (1319)..(1320): n is a, c, g, or t
cactcgctggcttcccctcactccatctctgtgcccagagaaacaggggtactccaggggaatcctgtcctctgactgttcccagtagaaggcgggagcagaattttttcttttctctctnncccttctggttccccttcctctctgtgcccctcatcctttggattactcatcaaatgagcagcaacaacacccctagaccagctggtcctgtcctgggtcatctcgttgtnnnnagtttctagctggtataaggttaaagataccctttccagccccagcaaagccttaggcatttctgggatngctcctgactctgatgggcatcctcactcctcagacatttccaatctcccccacttcatgcagctttgcttccccttccccactggaagaaggaaacantcgctctcctttcccgttcacatgtctgatatttgctatgatattgaccttcacacacatcttagaggttctgtattttcctctcttttgacttctccctatcactactctactcaggcatagattcagtctagagctcttcaacagcaatgaaacggtaaacgaggggtaaacaaaacccagagatgtcatcaggtgcctgctaggagtcccacccgttcccctctagccctggcctgcccctccctaccagagtcttgattctccttcaaaactntggagaggttacatctggcagggtttggggacacctcttgcctccatctcaaacttccgctgcctccgagccacctttgactcctcctgggccccccttccaggtgcctcaagtgcagaggtcagccttcggttcaaattctatttctgggcttcagtgtccctgcaacctctataatagaaggaacagagtggtctatgtttctttctttctctgggagattggatgtagactcgggagacctgagttctggctctgtcttatnaattcaaattgtttaatctctctgagccncagtttacccacttggaaaagaagagttaggccacatggtctctgtcatcctgggattctgagtnaactgctccccttcagccagatcctaggggcatatccccccaacctgggacccaggcccccttcccttgcagcctctctcagttgtgagtgcacaggccagagggggttgagaggagccaagggggggcatgccgtgggacaaacgggctgtctagggccagtggctaaaggggcgggaggggaggagtcctcagggatcctgtttcaacaaacgtttctttcggaggnggggaaggcgggggagagggggagaaggacctatttaaagctaccctgnngctttggctttctctgtctgccagggtctccgactgtcccagacgggctggtgtgggcttgggatcctcctggtgacctctcccgctaaggtccctcagccactctgccccaagatgggccgtggggctggccgtgagtactcacctgccgccaccacggcagagaatgggggcggcaagaagaaacagaaggagaaggaactggatgagctgaagaaggaggtggcaatggatgaccacaagctgtccttggatgagctgggccgcaaataccaagtggacctgtccaaggtgagtggaggggcttctagggaaggaacaaaagaggcaagaaaaccatgcagcatcaaggtggcaggagccttaaaactgtaatccagccttctttacagatgaggaaactgaggcccagaaacaaggactggcccaaggacatgcagctagttggtggcacagccagaactagaatttggatcccctgcatcctagcccaaagctctctccctgtataccctagaagcca

SEQ ID NO: 73034 - DNA, 6642 bp, Homo sapiens
  misc_feature (121)..(122): n is a, c, g, or t
  misc_feature (233)..(236): n is a, c, g, or t
  misc_feature (306)..(306): n is a, c, g, or t
  misc_feature (405)..(405): n is a, c, g, or t
  misc_feature (682)..(682): n is a, c, g, or t
  misc_feature (947)..(947): n is a, c, g, or t
  misc_feature (976)..(976): n is a, c, g, or t
  misc_feature (1041)..(1041): n is a, c, g, or t
  misc_feature (1270)..(1270): n is a, c, g, or t
  misc_feature (1319)..(1320): n is a, c, g, or t
cactcgctggcttcccctcactccatctctgtgcccagagaaacaggggtactccaggggaatcctgtcctctgactgttcccagtagaaggcgggagcagaattttttcttttctctctnncccttctggttccccttcctctctgtgcccctcatcctttggattactcatcaaatgagcagcaacaacacccctagaccagctggtcctgtcctgggtcatctcgttgtnnnnagtttctagctggtataaggttaaagataccctttccagccccagcaaagccttaggcatttctgggatngctcctgactctgatgggcatcctcactcctcagacatttccaatctcccccacttcatgcagctttgcttccccttccccactggaagaaggaaacantcgctctcctttcccgttcacatgtctgatatttgctatgatattgaccttcacacacatcttagaggttctgtattttcctctcttttgacttctccctatcactactctactcaggcatagattcagtctagagctcttcaacagcaatgaaacggtaaacgaggggtaaacaaaacccagagatgtcatcaggtgcctgctaggagtcccacccgttcccctctagccctggcctgcccctccctaccagagtcttgattctccttcaaaactntggagaggttacatctggcagggtttggggacacctcttgcctccatctcaaacttccgctgcctccgagccacctttgactcctcctgggccccccttccaggtgcctcaagtgcagaggtcagccttcggttcaaattctatttctgggcttcagtgtccctgcaacctctataatagaaggaacagagtggtctatgtttctttctttctctgggagattggatgtagactcgggagacctgagttctggctctgtcttatnaattcaaattgtttaatctctctgagccncagtttacccacttggaaaagaagagttaggccacatggtctctgtcatcctgggattctgagtnaactgctccccttcagccagatcctaggggcatatccccccaacctgggacccaggcccccttcccttgcagcctctctcagttgtgagtgcacaggccagagggggttgagaggagccaagggggggcatgccgtgggacaaacgggctgtctagggccagtggctaaaggggcgggaggggaggagtcctcagggatcctgtttcaacaaacgtttctttcggaggnggggaaggcgggggagagggggagaaggacctatttaaagctaccctgnngctttggctttctctgtctgccagggtctccgactgtcccagacgggctggtgtgggcttgggatcctcctggtgacctctcccgctaaggtccctcagccactctgccccaagatgggccgtggggctggccgtgagtactcacctgccgccaccacggcagagaatgggggcggcaagaagaaacagaaggagaaggaactggatgagctgaagaaggaggtggcaatggatgaccacaagctgtccttggatgagctgggccgcaaataccaagtggacctgtccaagggcctcaccaaccagcgggctcaggacgttctggctcgagatgggcccaacgccctcacaccacctcccacaacccctgagtgggtcaagttctgccgtcagcttttcggggggttctccatcctgctgtggattggggctatcctctgcttcctggcctacggcatccaggctgccatggaggatgaaccatccaacgacaatctatatctgggtgtggtgctggcagctgtggtcattgtcactggctgcttctcctactaccaggaggccaagagctccaagatcatggattccttcaagaacatggtacctcagcaagcccttgtgatccgggagggagagaagatgcagatcaacgcagaggaagtggtggtgggagacctggtggaggtgaagggtggagaccgcgtccctgctgacctccggatcatctcttctcatggctgtaaggtggataactcatccttaacaggagagtcggagccccagacccgctcccccgagttcacccatgagaaccccctggagacccgcaatatctgtttcttctccaccaactgtgttgaaggcactgccaggggcattgtgattgccacaggagaccggacggtgatgggccgcatagctactctcgcctcaggcctggaggttgggcggacacccatagcaatggagattgaacacttcatccagctgatcacaggggtcgctgtattcctgggggtctccttcttcgtgctctccctcatcctgggctacagctggctggaggcagtcatcttcctcatcggcatcatagtggccaacgtgcctgaggggcttctggccactgtcactgtgtgcctgaccctgacagccaagcgcatggcacggaagaactgcctggtgaagaacctggaggcggtggagacgctgggctccacgtccaccatctgctcggacaagacgggcaccctcacccagaaccgcatgaccgtcgcccacatgtggttcgacaaccaaatccatgaggctgacaccaccgaagatcagtctggggccacttttgacaaacgatcccctacgtggacggccctgtctcgaattgctggtctctgcaaccgcgccgtcttcaaggcaggacaggagaacatctccgtgtctaagcgggacacagctggtgatgcctctgagtcagctctgctcaagtgcattgagctctcctgtggctcagtgaggaaaatgagagacagaaaccccaaggtggcagagattcctttcaactctaccaacaagtaccagctgtctatccacgagcgagaagacagcccccagagccacgtgctggtgatgaagggggccccagagcgcattctggaccggtgctccaccatcctggtgcagggcaaggagatcccgctcgacaaggagatgcaagatgcctttcaaaatgcctacatggagctggggggacttggggagcgtgtgctgggattctgtcaactgaatctgccatctggaaagtttcctcggggcttcaaattcgacacggatgagctgaactttcccacggagaagctttgctttgtggggctcatgtctatgattgaccctccccgggctgctgtgccagatgctgtgggcaagtgccgaagcgcaggcatcaaggtgatcatggtaaccggggatcaccctatcacagccaaggccattgccaaaggcgtgggcatcatatcagagggtaacgagactgtggaggacattgcagcccggctcaacattcccatgagtcaagtcaaccccagagaagccaaggcatgcgtggtgcacggctctgacctgaaggacatgacatcggagcagctcgatgagatcctcaagaaccacacagagatcgtctttgctcgaacgtctccccagcagaagctcatcattgtggagggatgtcagaggcagggagccattgtggccgtgacgggtgacggggtgaacgactcccctgcattgaagaaggctgacattggcattgccatgggcatctctggctctgacgtctctaagcaggcagccgacatgatcctgctggatgacaactttgcctccatcgtcacgggggtggaggagggccgcctgatctttgacaacttgaagaaatccatcgcctacaccctgaccagcaacatccccgagatcacccccttcctgctgttcatcattgccaacatccccctacctctgggcactgtgaccatcctttgcattgacctgggcacagatatggtccctgccatctccttggcctatgaggcagctgagagtgatatcatgaagcggcagccacgaaactcccagacggacaagctggtgaatgagaggctcatcagcatggcctacggacagatcgggatgatccaggcactgggtggcttcttcacctactttgtgatcctggcagagaacggtttcctgccatcacggctactgggaatccgcctcgactgggatgaccggaccatgaatgatctggaggacagctatggacaggagtggacctatgagcagcggaaggtggtggagttcacgtgccacacggcattctttgccagcatcgtggtggtgcagtgggctgacctcatcatctgcaagacccgccgcaactcagtcttccagcagggcatgaagaacaagatcctgatttttgggctcctggaggagacggcgttggctgcctttctctcttactgcccaggcatgggtgtagccctccgcatgtacccgctcaaagtcacctggtggttctgcgccttcccctacagcctcctcatcttcatctatgatgaggtccgaaagctcatcctgcggcggtatcctggtggctgggtggagaaggagacatactactgaccccattggaagaagaaccaggcatggaaagatggggagctctggaggtgttgtggggatggtgatggagagggatggaaataacgggtggcattgggtggcaacatttggggagagataatgaggcaactcagcaggctaagttgcggggtatataaattggggtgatgaccccatagacctaactgtgaacaatcagattagacactatgtgttagagtccccccgaccagatccttttccatcccactccactatgttgtctattttttctgaggaattaagggttaccccaccctgcccactcccatcccttcaaccccacttcctactgtaatagatcagcatccaaaagcaggaacccatctaaaccagaaggaagccctctcagatcaccccagcctcactccatttcccacttccacccccgttagcttcctgcaggactctatccctggcttccccttcagaccttgcaatcacaaaaggttcttctggtgagtgcaagagcctgagactggaaaaggtggacttgtctcccagtcgaggctggtaagggaccttcagggagagctgggcagacaggtgggagatggaggtagggctggctggaggaaggaaacaacaaaggaagtgaggtagtgccaatgacaggacatttgacatgagtctccagatagatgtcgtggactccagctctacgtcccacattttagaataccccaccagcagaacaaactcagatctcatcagggtagcagcagaggcaggaccagaaggcaatcaagagcttccagaaatgccacacttgtgtgccacagagttccccgctgacccttggttaggggtcctcttagtccacaaggtccggatgtcactcatgtacttaataacacttcaccttctgtaatactaagtcctcagagctccatgctgttctgaaagggatggccacaagttctttcccagcctcttccattccctttcttttcatgcccatcccgatgaacctgcatcattccccgacactgccaagccaaccctggaaaaggagttcgctggccattggctagaatcagggtggagaagttccctgaaccttcctgtctcccagggacatgtatgcttccagggacaagcttaggtcatgaacatggtcagaacctttggacaagaggaaaaatactaagagatttgctttttctgggtgcggtggctcatgcctgtaatcccagcactttgggaggccgaggcaggtggatcatgaggtcaggagttcgaggcgagcctggccaacatggtgaaaccctgtctctactaaaagtacaaaaaattagccagtcatggtggcacacgcctgtaatctcagctactcaggaggctgaggcaggagaattgcttgaacctgtgaggaagaggttgcagtgagctgagatcgtgccattacactccagcctgggcgaaagggtgagactccatctcaaaaaaaaaaaaaatgatttgcttttgacgtcttaggtggcagggctgttccctccaggcaaatgcccttcaaaccgacgatcattgtgcccacttaccctgggctggagagttggtttcaggttcctacaggagatagctttctttcccttactccctatctaacacttttgctctgcaggcagccttgcccattctctaagcctggcttagaaggcactgggaatgtcctgtagagagagacctagataggtcatgcaagtgagaaagacatctgaggaaaatggaagacctaaggcagacaggaaggaagcacaaaagacaagcattgggtcagacccataaaccacctcccaaaggctgtcatttcattgcactggaattttgctttatcagaagcaaggaagtaagggagtcattgccttgggcctgggaatctaagtgggagacaatattaatttggatccgattaattggagattactaactgtggacaaaagtttatctttgcacaatcaataaaaatggcatttttttagtaaattaagagcataaacaatatttgtttagagggtgggcattgttttaggttttaccccaaaaaacaaattctttttttcaggccaacttttaggaaaaatatttcttttttaaaaaaaacca

SEQ ID NO: 73035 - DNA, 3848 bp, Homo sapiens
tcggtacccccccgactagcccgacagggagatgcaagatgcctttcaaaatgcctacatggagctggggggacttggggagcgtgtgctgggattctgtcaactgaatctgccatctggaaagtttcctcggggcttcaaattcgacacggatgagctgaactttcccacggagaagctttgctttgtggggctcatgtctatgattgaccctccccgggctgctgtgccagatgctgtgggcaagtgccgaagcgcaggcatcaaggtgatcatggtaaccggggatcaccctatcacagccaaggccattgccaaaggcgtgggcatcatatcagagggtaacgagactgtggaggacattgcagcccggctcaacattcccatgagtcaagtcaaccccagagaagccaaggcatgcgtggtgcacggctctgacctgaaggacatgacatcggagcagctcgatgagatcctcaagaaccacacagagatcgtctttgctcgaacgtctccccagcagaagctcatcattgtggagggatgtcagaggcagggagccattgtggccgtgacgggtgacggggtgaacgactcccctgcattgaagaaggctgacattggcattgccatgggcatctctggctctgacgtctctaagcaggcagccgacatgatcctgctggatgacaactttgcctccatcgtcacgggggtggaggagggccgcctgatctttgacaacttgaagaaatccatcgcctacaccctgaccagcaacatccccgagatcacccccttcctgctgttcatcattgccaacatccccctacctctgggcactgtgaccatcctttgcattgacctgggcacagatatggtccctgccatctccttggcctatgaggcagctgagagtgatatcatgaagcggcagccacgaaactcccagacggacaagctggtgaatgagaggctcatcagcatggcctacggacagatcgggatgatccaggcactgggtggcttcttcacctactttgtgatcctggcagagaacggtttcctgccatcacggctactgggaatccgcctcgactgggatgaccggaccatgaatgatctggaggacagctatggacaggagtggacctatgagcagcggaaggtggtggagttcacgtgccacacggcattctttgccagcatcgtggtggtgcagtgggctgacctcatcatctgcaagacccgccgcaactcagtcttccagcagggcatgaagaacaagatcctgatttttgggctcctggaggagacggcgttggctgcctttctctcttactgcccaggcatgggtgtagccctccgcatgtacccgctcaaagtcacctggtggttctgcgccttcccctacagcctcctcatcttcatctatgatgaggtccgaaagctcatcctgcggcggtatcctggtggctgggtggagaaggagacatactactgaccccattggaagaagaaccaggcatggaaagatggggagctctggaggtgttgtggggatggtgatggagagggatggaaataacgggtggcattgggtggcaacatttggggagagataatgaggcaactcagcaggctaagttgcggggtatataaattggggtgatgaccccatagacctaactgtgaacaatcagattagacactatgtgttagagtccccccgaccagatccttttccatcccactccactatgttgtctattttttctgaggaattaagggttaccccaccctgcccactcccatcccttcaaccccacttcctactgtaatagatcagcatccaaaagcaggaacccatctaaaccagaaggaagccctctcagatcaccccagcctcactccatttcccacttccacccccgttagcttcctgcaggactctatccctggcttccccttcagaccttgcaatcacaaaaggttcttctggtgagtgcaagagcctgagactggaaaaggtggacttgtctcccagtcgaggctggtaagggaccttcagggagagctgggcagacaggtgggagatggaggtagggctggctggaggaaggaaacaacaaaggaagtgaggtagtgccaatgacaggacatttgacatgagtctccagatagatgtcgtggactccagctctacgtcccacattttagaataccccaccagcagaacaaactcagatctcatcagggtagcagcagaggcaggaccagaaggcaatcaagagcttccagaaatgccacacttgtgtgccacagagttccccgctgacccttggttaggggtcctcttagtccacaaggtccggatgtcactcatgtacttaataacacttcaccttctgtaatactaagtcctcagagctccatgctgttctgaaagggatggccacaagttctttcccagcctcttccattccctttcttttcatgcccatcccgatgaacctgcatcattccccgacactgccaagccaaccctggaaaaggagttcgctggccattggctagaatcagggtggagaagttccctgaaccttcctgtctcccagggacatgtatgcttccagggacaagcttaggtcatgaacatggtcagaacctttggacaagaggaaaaatactaagagatttgctttttctgggtgcggtggctcatgcctgtaatcccagcactttgggaggccgaggcaggtggatcatgaggtcaggagttcgaggcgagcctggccaacatggtgaaaccctgtctctactaaaagtacaaaaaattagccagtcatggtggcacacgcctgtaatctcagctactcaggaggctgaggcaggagaattgcttgaacctgtgaggaagaggttgcagtgagctgagatcgtgccattacactccagcctgggcgaaagggtgagactccatctcaaaaaaaaaaaaaatgatttgcttttgacgtcttaggtggcagggctgttccctccaggcaaatgcccttcaaaccgacgatcattgtgcccacttaccctgggctggagagttggtttcaggttcctacaggagatagctttctttcccttactccctatctaacacttttgctctgcaggcagccttgcccattctctaagcctggcttagaaggcactgggaatgtcctgtagagagagacctagataggtcatgcaagtgagaaagacatctgaggaaaatggaagacctaaggcagacaggaaggaagcacaaaagacaagcattgggtcagacccataaaccacctcccaaaggctgtcatttcattgcactggaattttgctttatcagaagcaaggaagtaagggagtcattgccttgggcctgggaatctaagtgggagacaatattaatttggatccgattaattggagattactaactgtggacaaaagtttatctttgcacaatcaataaaaatggcatttttttagtaaattaagagcataaacaatattgctagaggtggcatgtttagtctaccaaaaacaatacttttcaggcactttagaaatatccttttagaagcagcgagtgcatgggctaattatcatcaatctttatgtatttgttaaagaaacatctacaggatctttattggtgaccttttgtaagacattagtttgaggtactacctatctacttgaaaataataaagtggcatttctttatgaaaaaaaaagaaatctcttccataattcagatttctacactttatacttgcctccctcctaaatcgtgatattgaaatatggtg

SEQ ID NO: 73036 - DNA, 6134 bp, Homo sapiens
  misc_feature (121)..(122): n is a, c, g, or t
  misc_feature (233)..(236): n is a, c, g, or t
  misc_feature (306)..(306): n is a, c, g, or t
  misc_feature (405)..(405): n is a, c, g, or t
  misc_feature (682)..(682): n is a, c, g, or t
  misc_feature (947)..(947): n is a, c, g, or t
  misc_feature (976)..(976): n is a, c, g, or t
  misc_feature (1041)..(1041): n is a, c, g, or t
  misc_feature (1270)..(1270): n is a, c, g, or t
  misc_feature (1319)..(1320): n is a, c, g, or t
cactcgctggcttcccctcactccatctctgtgcccagagaaacaggggtactccaggggaatcctgtcctctgactgttcccagtagaaggcgggagcagaattttttcttttctctctnncccttctggttccccttcctctctgtgcccctcatcctttggattactcatcaaatgagcagcaacaacacccctagaccagctggtcctgtcctgggtcatctcgttgtnnnnagtttctagctggtataaggttaaagataccctttccagccccagcaaagccttaggcatttctgggatngctcctgactctgatgggcatcctcactcctcagacatttccaatctcccccacttcatgcagctttgcttccccttccccactggaagaaggaaacantcgctctcctttcccgttcacatgtctgatatttgctatgatattgaccttcacacacatcttagaggttctgtattttcctctcttttgacttctccctatcactactctactcaggcatagattcagtctagagctcttcaacagcaatgaaacggtaaacgaggggtaaacaaaacccagagatgtcatcaggtgcctgctaggagtcccacccgttcccctctagccctggcctgcccctccctaccagagtcttgattctccttcaaaactntggagaggttacatctggcagggtttggggacacctcttgcctccatctcaaacttccgctgcctccgagccacctttgactcctcctgggccccccttccaggtgcctcaagtgcagaggtcagccttcggttcaaattctatttctgggcttcagtgtccctgcaacctctataatagaaggaacagagtggtctatgtttctttctttctctgggagattggatgtagactcgggagacctgagttctggctctgtcttatnaattcaaattgtttaatctctctgagccncagtttacccacttggaaaagaagagttaggccacatggtctctgtcatcctgggattctgagtnaactgctccccttcagccagatcctaggggcatatccccccaacctgggacccaggcccccttcccttgcagcctctctcagttgtgagtgcacaggccagagggggttgagaggagccaagggggggcatgccgtgggacaaacgggctgtctagggccagtggctaaaggggcgggaggggaggagtcctcagggatcctgtttcaacaaacgtttctttcggaggnggggaaggcgggggagagggggagaaggacctatttaaagctaccctgnngctttggctttctctgtctgccagggtctccgactgtcccagacgggctggtgtgggcttgggatcctcctggtgacctctcccgctaaggtccctcagccactctgccccaagatgggccgtggggctggccgtgagtactcacctgccgccaccacggcagagaatgggggcggcaagaagaaacagaaggagaaggaactggatgagctgaagaaggaggtggcaatggatgaccacaagctgtccttggatgagctgggccgcaaataccaagtggacctgtccaagggcctcaccaaccagcgggctcaggacgttctggctcgagatgggcccaacgccctcacaccacctcccacaacccctgagtgggtcaagttctgccgtcagcttttcggggggttctccatcctgctgtggattggggctatcctctgcttcctggcctacggcatccaggctgccatggaggatgaaccatccaacgacaatctatatctgggtgtggtgctggcagctgtggtcattgtcactggctgcttctcctactaccaggaggccaagagctccaagatcatggattccttcaagaacatggtacctcagcaagcccttgtgatccgggagggagagaagatgcagatcaacgcagaggaagtggtggtgggagacctggtggaggtgaagggtggagaccgcgtccctgctgacctccggatcatctcttctcatggctgtaaggtggataactcatccttaacaggagagtcggagccccagacccgctcccccgagttcacccatgagaaccccctggagacccgcaatatctgtttcttctccaccaactgtgttgaaggcactgccaggggcattgtgattgccacaggagaccggacggtgatgggccgcatagctactctcgcctcaggcctggaggttgggcggacacccatagcaatggagattgaacacttcatccagctgatcacaggggtcgctgtattcctgggggtctccttcttcgtgctctccctcatcctgggctacagctggctggaggcagtcatcttcctcatcggcatcatagtggccaacgtgcctgaggggcttctggccactgtcactgtgtgcctgaccctgacagccaagcgcatggcacggaagaactgcctggtgaagaacctggaggcggtggagacgctgggctccacgtccaccatctgctcggacaagacgggcaccctcacccagaaccgcatgaccgtcgcccacatgtggttcgacaaccaaatccatgaggctgacaccaccgaagatcagtctggggccacttttgacaaacgatcccctacgtggacggccctgtctcgaattgctggtctctgcaaccgcgccgtcttcaaggcaggacaggagaacatctccgtgtctaagcgggacacagctggtgatgcctctgagtcagctctgctcaagtgcattgagctctcctgtggctcagtgaggaaaatgagagacagaaaccccaaggtggcagagattcctttcaactctaccaacaagtaccagctgtctatccacgagcgagaagacagcccccagagccacgtgctggtgatgaagggggccccagagcgcattctggaccggtgctccaccatcctggtgcagggcaaggagatcccgctcgacaaggagatgcaagatgcctttcaaaatgcctacatggagctggggggacttggggagcgtgtgctgggattctgtcaactgaatctgccatctggaaagtttcctcggggcttcaaattcgacacggatgagctgaactttcccacggagaagctttgctttgtggggctcatgtctatgattgaccctccccgggctgctgtgccagatgctgtgggcaagtgccgaagcgcaggcatcaaggtgatcatggtaaccggggatcaccctatcacagccaaggccattgccaaaggcgtgggcatcatatcagagggtaacgagactgtggaggacattgcagcccggctcaacattcccatgagtcaagtcaaccccagagaagccaaggcatgcgtggtgcacggctctgacctgaaggacatgacatcggagcagctcgatgagatcctcaagaaccacacagagatcgtctttgctcgaacgtctccccagcagaagctcatcattgtggagggatgtcagaggcagggagccattgtggccgtgacgggtgacggggtgaacgactcccctgcattgaagaaggctgacattggcattgccatgggcatctctggctctgacgtctctaagcaggcagccgacatgatcctgctggatgacaactttgcctccatcgtcacgggggtggaggagggccgcctgatctttgacaacttgaagaaatccatcgcctacaccctgaccagcaacatccccgagatcacccccttcctgctgttcatcattgccaacatccccctacctctgggcactgtgaccatcctttgcattgacctgggcacagatatggtccctgccatctccttggcctatgaggcagctgagagtgatatcatgaagcggcagccacgaaactcccagacggacaagctggtgaatgagaggctcatcagcatggcctacggacagatcgggatgatccaggcactgggtggcttcttcacctactttgtgatcctggcagagaacggtttcctgccatcacggctactgggaatccgcctcgactgggatgaccggaccatgaatgatctggaggacagctatggacaggagtggacctatgagcagcggaaggtggtggagttcacgtgccacacggcattctttgccagcatcgtggtggtgcagtgggctgacctcatcatctgcaagacccgccgcaactcagtcttccagcagggcatgaagaacaagatcctgatttttgggctcctggaggagacggcgttggctgcctttctctcttactgcccaggcatgggtgtagccctccgcatgtacccgctcaaagtcacctggtggttctgcgccttcccctacagcctcctcatcttcatctatgatgaggtccgaaagctcatcctgcggcggtatcctggtggctgggtggagaaggagacatactactgaccccattggaagaagaaccaggcatggaaagatggggagctctggaggtgttgtggggatggtgatggagagggatggaaataacgggtggcattgggtggcaacatttggggagagataatgaggcaactcagcaggctaagttgcggggtatataaattggggtgatgaccccatagacctaactgtgaacaatcagattagacactatgtgttagagtccccccgaccagatccttttccatcccactccactatgttgtctattttttctgaggaattaagggttaccccaccctgcccactcccatcccttcaaccccacttcctactgtaatagatcagcatccaaaagcaggaacccatctaaaccagaaggaagccctctcagatcaccccagcctcactccatttcccacttccacccccgttagcttcctgcaggactctatccctggcttccccttcagaccttgcaatcacaaaaggttcttctggtgagtgcaagagcctgagactggaaaaggtggacttgtctcccagtcgaggctggtaagggaccttcagggagagctgggcagacaggtgggagatggaggtagggctggctggaggaaggaaacaacaaaggaagtgaggtagtgccaatgacaggacatttgacatgagtctccagatagatgtcgtggactccagctctacgtcccacattttagaataccccaccagcagaacaaactcagatctcatcagggtagcagcagaggcaggaccagaaggcaatcaagagcttccagaaatgccacacttgtgtgccacagagttccccgctgacccttggttaggggtcctcttagtccacaaggtccggatgtcactcatgtacttaataacacttcaccttctgtaatactaagtcctcagagctccatgctgttctgaaagggatggccacaagttctttcccagcctcttccattccctttcttttcatgcccatcccgatgaacctgcatcattccccgacactgccaagccaaccctggaaaaggagttcgctggccattggctagaatcagggtggagaagttccctgaaccttcctgtctcccagggacatgtatgcttccagggacaagcttaggtcatgaacatggtcagaacctttggacaagaggaaaaatactaagagatttgctttttctgggtgcggtggctcatgcctgtaatcccagcactttgggaggccgaggcaggtggatcatgaggtcaggagttcgaggcgagcctggccaacatggtgaaaccctgtctctactaaaagtacaaaaaattagccagtcatggtggcacacgcctgtaatctcagctactcaggaggctgaggcaggagaattgcttgaacctgtgaggaagaggttgcagtgagctgagatcgtgccattacactccagcctgggcgaaagggtgagactccatctcaaaaaaacacaacacaccggcgttggcttggagagctccacaagggggcgaggggggtcccctccagggaaatgccttgaaaacgggagacatgtggcacctttacccggcgcggaaacgatggtcaaggtccacaacggagaaagtttttccca

SEQ ID NO: 73037 - DNA, 2878 bp, Homo sapiens
cacggcattagtagtgtctggtagagacgtgtcgggatgatccaggcactgggtggcttcttcacctactttgtgatcctggcagagaacggtttcctgccatcacggctactgggaatccgcctcgactgggatgaccggaccatgaatgatctggaggacagctatggacaggagtggacctatgagcagcggaaggtggtggagttcacgtgccacacggcattctttgccagcatcgtggtggtgcagtgggctgacctcatcatctgcaagacccgccgcaactcagtcttccagcagggcatgaagaacaagatcctgatttttgggctcctggaggagacggcgttggctgcctttctctcttactgcccaggcatgggtgtagccctccgcatgtacccgctcaaagtcacctggtggttctgcgccttcccctacagcctcctcatcttcatctatgatgaggtccgaaagctcatcctgcggcggtatcctggtggctgggtggagaaggagacatactactgaccccattggaagaagaaccaggcatggaaagatggggagctctggaggtgttgtggggatggtgatggagagggatggaaataacgggtggcattgggtggcaacatttggggagagataatgaggcaactcagcaggctaagttgcggggtatataaattggggtgatgaccccatagacctaactgtgaacaatcagattagacactatgtgttagagtccccccgaccagatccttttccatcccactccactatgttgtctattttttctgaggaattaagggttaccccaccctgcccactcccatcccttcaaccccacttcctactgtaatagatcagcatccaaaagcaggaacccatctaaaccagaaggaagccctctcagatcaccccagcctcactccatttcccacttccacccccgttagcttcctgcaggactctatccctggcttccccttcagaccttgcaatcacaaaaggttcttctggtgagtgcaagagcctgagactggaaaaggtggacttgtctcccagtcgaggctggtaagggaccttcagggagagctgggcagacaggtgggagatggaggtagggctggctggaggaaggaaacaacaaaggaagtgaggtagtgccaatgacaggacatttgacatgagtctccagatagatgtcgtggactccagctctacgtcccacattttagaataccccaccagcagaacaaactcagatctcatcagggtagcagcagaggcaggaccagaaggcaatcaagagcttccagaaatgccacacttgtgtgccacagagttccccgctgacccttggttaggggtcctcttagtccacaaggtccggatgtcactcatgtacttaataacacttcaccttctgtaatactaagtcctcagagctccatgctgttctgaaagggatggccacaagttctttcccagcctcttccattccctttcttttcatgcccatcccgatgaacctgcatcattccccgacactgccaagccaaccctggaaaaggagttcgctggccattggctagaatcagggtggagaagttccctgaaccttcctgtctcccagggacatgtatgcttccagggacaagcttaggtcatgaacatggtcagaacctttggacaagaggaaaaatactaagagatttgctttttctgggtgcggtggctcatgcctgtaatcccagcactttgggaggccgaggcaggtggatcatgaggtcaggagttcgaggcgagcctggccaacatggtgaaaccctgtctctactaaaagtacaaaaaattagccagtcatggtggcacacgcctgtaatctcagctactcaggaggctgaggcaggagaattgcttgaacctgtgaggaagaggttgcagtgagctgagatcgtgccattacactccagcctgggcgaaagggtgagactccatctcaaaaaaaaaaaaaatgatttgcttttgacgtcttaggtggcagggctgttccctccaggcaaatgcccttcaaaccgacgatcattgtgcccacttaccctgggctggagagttggtttcaggttcctacaggagatagctttctttcccttactccctatctaacacttttgctctgcaggcagccttgcccattctctaagcctggcttagaaggcactgggaatgtcctgtagagagagacctagataggtcatgcaagtgagaaagacatctgaggaaaatggaagacctaaggcagacaggaaggaagcacaaaagacaagcattgggtcagacccataaaccacctcccaaaggctgtcatttcattgcactggaattttgctttatcagaagcaaggaagtaagggagtcattgccttgggcctgggaatctaagtgggagacaatattaatttggatccgattaattggagattactaactgtggacaaaagtttatctttgcacaatcaataaaaatggcatttttttagtaaattaagagcataaacaatattgctagaggtggcatgtttagtctaccaaaaacaatacttttcaggcactttagaaatatccttttagaagcagcgagtgcatgggctaattatcatcaatctttatgtatttgttaaagaaacatctacaggatctttattggtgaccttttgtaagacattagtttgaggtactacctatctacttgaaaataataaagtggcatttctttatgaaaaaaaaagaaatctcttccataattcagatttctacactttatacttgcctccctcctaaatcgtgatattgaaatatggtg

SEQ ID NO: 73038 - DNA, 4707 bp, Homo sapiens
  misc_feature (121)..(122): n is a, c, g, or t
  misc_feature (233)..(236): n is a, c, g, or t
  misc_feature (306)..(306): n is a, c, g, or t
  misc_feature (405)..(405): n is a, c, g, or t
  misc_feature (682)..(682): n is a, c, g, or t
  misc_feature (947)..(947): n is a, c, g, or t
  misc_feature (976)..(976): n is a, c, g, or t
  misc_feature (1041)..(1041): n is a, c, g, or t
  misc_feature (1270)..(1270): n is a, c, g, or t
  misc_feature (1319)..(1320): n is a, c, g, or t
cactcgctggcttcccctcactccatctctgtgcccagagaaacaggggtactccaggggaatcctgtcctctgactgttcccagtagaaggcgggagcagaattttttcttttctctctnncccttctggttccccttcctctctgtgcccctcatcctttggattactcatcaaatgagcagcaacaacacccctagaccagctggtcctgtcctgggtcatctcgttgtnnnnagtttctagctggtataaggttaaagataccctttccagccccagcaaagccttaggcatttctgggatngctcctgactctgatgggcatcctcactcctcagacatttccaatctcccccacttcatgcagctttgcttccccttccccactggaagaaggaaacantcgctctcctttcccgttcacatgtctgatatttgctatgatattgaccttcacacacatcttagaggttctgtattttcctctcttttgacttctccctatcactactctactcaggcatagattcagtctagagctcttcaacagcaatgaaacggtaaacgaggggtaaacaaaacccagagatgtcatcaggtgcctgctaggagtcccacccgttcccctctagccctggcctgcccctccctaccagagtcttgattctccttcaaaactntggagaggttacatctggcagggtttggggacacctcttgcctccatctcaaacttccgctgcctccgagccacctttgactcctcctgggccccccttccaggtgcctcaagtgcagaggtcagccttcggttcaaattctatttctgggcttcagtgtccctgcaacctctataatagaaggaacagagtggtctatgtttctttctttctctgggagattggatgtagactcgggagacctgagttctggctctgtcttatnaattcaaattgtttaatctctctgagccncagtttacccacttggaaaagaagagttaggccacatggtctctgtcatcctgggattctgagtnaactgctccccttcagccagatcctaggggcatatccccccaacctgggacccaggcccccttcccttgcagcctctctcagttgtgagtgcacaggccagagggggttgagaggagccaagggggggcatgccgtgggacaaacgggctgtctagggccagtggctaaaggggcgggaggggaggagtcctcagggatcctgtttcaacaaacgtttctttcggaggnggggaaggcgggggagagggggagaaggacctatttaaagctaccctgnngctttggctttctctgtctgccagggtctccgactgtcccagacgggctggtgtgggcttgggatcctcctggtgacctctcccgctaaggtccctcagccactctgccccaagatgggccgtggggctggccgtgagtactcacctgccgccaccacggcagagaatgggggcggcaagaagaaacagaaggagaaggaactggatgagctgaagaaggaggtggcaatggatgaccacaagctgtccttggatgagctgggccgcaaataccaagtggacctgtccaagggcctcaccaaccagcgggctcaggacgttctggctcgagatgggcccaacgccctcacaccacctcccacaacccctgagtgggtcaagttctgccgtcagcttttcggggggttctccatcctgctgtggattggggctatcctctgcttcctggcctacggcatccaggctgccatggaggatgaaccatccaacgacaatctatatctgggtgtggtgctggcagctgtggtcattgtcactggctgcttctcctactaccaggaggccaagagctccaagatcatggattccttcaagaacatggtacctcagcaagcccttgtgatccgggagggagagaagatgcagatcaacgcagaggaagtggtggtgggagacctggtggaggtgaagggtggagaccgcgtccctgctgacctccggatcatctcttctcatggctgtaaggtggataactcatccttaacaggagagtcggagccccagacccgctcccccgagttcacccatgagaaccccctggagacccgcaatatctgtttcttctccaccaactgtgttgaaggcactgccaggggcattgtgattgccacaggagaccggacggtgatgggccgcatagctactctcgcctcaggcctggaggttgggcggacacccatagcaatggagattgaacacttcatccagctgatcacaggggtcgctgtattcctgggggtctccttcttcgtgctctccctcatcctgggctacagctggctggaggcagtcatcttcctcatcggcatcatagtggccaacgtgcctgaggggcttctggccactgtcactgtgtgcctgaccctgacagccaagcgcatggcacggaagaactgcctggtgaagaacctggaggcggtggagacgctgggctccacgtccaccatctgctcggacaagacgggcaccctcacccagaaccgcatgaccgtcgcccacatgtggttcgacaaccaaatccatgaggctgacaccaccgaagatcagtctggggccacttttgacaaacgatcccctacgtggacggccctgtctcgaattgctggtctctgcaaccgcgccgtcttcaaggcaggacaggagaacatctccgtgtctaagcgggacacagctggtgatgcctctgagtcagctctgctcaagtgcattgagctctcctgtggctcagtgaggaaaatgagagacagaaaccccaaggtggcagagattcctttcaactctaccaacaagtaccagctgtctatccacgagcgagaagacagcccccagagccacgtgctggtgatgaagggggccccagagcgcattctggaccggtgctccaccatcctggtgcagggcaaggagatcccgctcgacaaggagatgcaagatgcctttcaaaatgcctacatggagctggggggacttggggagcgtgtgctgggattctgtcaactgaatctgccatctggaaagtttcctcggggcttcaaattcgacacggatgagctgaactttcccacggagaagctttgctttgtggggctcatgtctatgattgaccctccccgggctgctgtgccagatgctgtgggcaagtgccgaagcgcaggcatcaaggtgatcatggtaaccggggatcaccctatcacagccaaggccattgccaaaggcgtgggcatcatatcagagggtaacgagactgtggaggacattgcagcccggctcaacattcccatgagtcaagtcaaccccagagaagccaaggcatgcgtggtgcacggctctgacctgaaggacatgacatcggagcagctcgatgagatcctcaagaaccacacagagatcgtctttgctcgaacgtctccccagcagaagctcatcattgtggagggatgtcagaggcagggagccattgtggccgtgacgggtgacggggtgaacgactcccctgcattgaagaaggctgacattggcattgccatgggcatctctggctctgacgtctctaagcaggcagccgacatgatcctgctggatgacaactttgcctccatcgtcacgggggtggaggagggccgcctgatctttgacaacttgaagaaatccatcgcctacaccctgaccagcaacatccccgagatcacccccttcctgctgttcatcattgccaacatccccctacctctgggcactgtgaccatcctttgcattgacctgggcacagatatggtccctgccatctccttggcctatgaggcagctgagagtgatatcatgaagcggcagccacgaaactcccagacggacaagctggtgaatgagaggctcatcagcatggcctacggacagatcgggatgatccaggcactgggtggcttcttcacctactttgtgatcctggcagagaacggtttcctgccatcacggctactgggaatccgcctcgactgggatgaccggaccatgaatgatctggaggacagctatggacaggagtggacctatgagcagcggaaggtggtggagttcacgtgccacacggcattctttgccagcatcgtggtggtgcagtgggctgacctcatcatctgcaagacccgccgcaactcagtcttccagcagggcatgaagaacaagatcctgatttttgggctcctggaggagacggcgttggctgcctttctctcttactgcccaggcatgggtgtagccctccgcatgtacccgctcaaagtcacctggtggttctgcgccttcccctacagcctcctcatcttcatctatgatgaggtccgaaagctcatcctgcggcggtatcctggtggtaagcccctccacattccccccagcaaagtgcaagccccaccaccagctcctccctccaggaccacacgcagactccactcccactactggttcctgcttctgttcctcaacaccctcagatcctggggtcccaggtcccaggagccctgactctttcgaacctgttgtctctgccctcttcccatcagattctaaaccccgcctaactcacagttggtctccgaggccctccacctt

SEQ ID NO: 73039 - DNA, 332 bp, Homo sapiens
gggcaagtgccgaagcgcaggcatcaaggtactggcctcccatcctcccctccattctagcctcccccatgccagagttcaaggagctgcagtggctgctgccctggaaaggcccaggccacggtggcctccttcccactgactcagagaagaagctgtccatctgcaaggaaaggcccacccctgccttggggcactcacccttatcccttttgctcagagaggccagtgtcccatgcccctcctctccctccctggcacagctctttgtcccatctgcatgtgtacccttccattctgatttgaagcataatctggcactcctatcttga

SEQ ID NO: 73040 - DNA, 869 bp, Homo sapiens
ccgctgctggcggggcgtttgcagtggcccttgtgaactatgtttctgccgttaccagtgttggacccgccttcctcttttcctagaaaaggcgcagatgcgtggtcgcaaactgatttccaagtccgttgtctgatgctgcgagacactatccgtttgttacagcgaattgggggccgatgacgctggaggtggaagaagccgcggttctgtttcttaatggcgaattagcctgcggacttcctgtcattcccttgccttttagcgtcccaacttagcaaaactccgcgtttagggtgttctgagtaggctttgtctaccctgaaacgctttgtgtcgacattccaccaggtctgttccacggtccaaacttctctaccttttttgaccctctagaattgtgttacgattagtagtatattgtgtcgagagtctgggatctttgatgttagttatattccctggctgtttatgccaaagggaaatccaaatagtaatttattacgtacattacgtataattcaaattaaaattttgtaagaacagttgccaaccacgctaccctacatgcctgctgtgtatcttctcggcgtccctcgattctgttttgcttcccaaagtacttgagccctttccgtcataaaaagtaaagatgaaaaatatatttggagcatgatacttacatgcggaagtcttaacaggacataaattgtgtgcttttggctgctttcattagatttttaattttttccttttaccaccactgaaaaaaatacaaatacagtggattaaggttaaattaaaaagcactagtagaaattaaaagattgcaagactacaaaaaaataaactggcatttctggtgtaag

SEQ ID NO: 73041 - DNA, 1039 bp, Homo sapiens
taaaataagataactttaatgtgagatccttcccataagcagaaaatacaagcaattaacaacatcaacaacaacaacaaacccacaatactttctaggatttgaggccagaaaagtagagttggttggtatcaacactgttcttcccttcagggcttcagggtttatttccattcttaagctatttaatgagtacaaactatttgaaaacatctcgaggcagcttttgctttcccaaccatttcaccctgtccttctaccttaagccctgatgaagagatttcaaaaactccctttgagtgtgttagaaaagcttagaaactgactttacgattacaactcaaaaatgtttacaagatctttagataatagtgtatgcgcagaaagatgaggaaacctctgaccaagaagtctagacacagattaagggcccaggagggcagagccagtccttaaacaatatagacaccatgtctcctgtgtttacagggatagctcataggtacagccatcagggttggattgcctccaaaagtaggccctacaaactcccgtaggccagggcctggcagtataccccattctcaccaccatcctttgaagaaagttctaagagttaaggttatcccacaggctactaggtagatttccaaatggcctcagggaaagtggaattctgccaacagtaaaggcaactccccaaacagtgctaatgctgagaggatcaagggaaggactttgatatacacatatatgtatggataaaagagttaagctacgtaacatgaaacaccaaaaatatacttgctggtacatcaagagttcctcacaaacactctgaagttaaaatctaaaatgctccactttttacccaaaatataaatgactcaacctcattttgtattatatactaacacagaaatgagttttttaaaaaggttggctgctatctatctaaagcaaacagtttatgttttacacataaaaaaatttatttgcataaaagtttttatggaactaaaaaatatgttctctacaa

SEQ ID NO: 73042 - DNA, 409 bp, Homo sapiens
tttggttatataaaaaattaatttataaataatttttgttgtacaggagtatgatagggtgatcaataaaaatcctgcaaacataaaattacattacattgggacaaaaatttttgcagaaagtggaatgggagtataaatttgagggaaaataaagaataatgtaaatgtttcaattattacattagattttacatatatgtatacgtacacatatatacataaatccacatatataaatattttagacagatgatggttatcaaactacttatgcatttttttggtatttctttgaatacatgtaaaacaataatggaaaattttacctcttgctgtcagtatttataatatactgtcagccctctgtatctgtgacttcatatccacggacccaaccaattgtgga

SEQ ID NO: 73043 - DNA, 1735 bp, Homo sapiens
  misc_feature (1684)..(1684): n is a, c, g, or t
ttaacggtaggtgcgaggctgggtgtgaatcggccgaggcggcggcgacggcgacatggagagcggggcctacggcgcggccaaggcgggcggctccttcgacctgcggcgcttcctgacgcagccgcaggtggtggcgcgcgccgtgtgcttggtcttcgccttgatcgtgttctcctgcatctatggtgagggctacagcaatgcccacgagtctaagcagatgtactgcgtgttcaaccgcaacgaggatgcctgccgctatggcagtgccatcggggtgctggccttcctggcctcggccttcttcttggtggtcgacgcgtatttcccccagatcagcaacgccactgaccgcaagtacctggtcattggtgacctgctcttctcagctctctggaccttcctgtggtttgttggtttctgcttcctcaccaaccagtgggcagtcaccaacccgaaggacgtgctggtgggggccgactctgtgagggcagccatcaccttcagcttcttttccatcttctcctggggtgtgctggcctccctggcctaccagcgctacaaggctggcgtggacgacttcatccagaattacgttgaccccactccggaccccaacactgcctacgcctcctacccaggtgcatctgtggacaactaccaacagccacccttcacccagaacgcggagaccaccgagggctaccagccgccccctgtgtactgagcggcggttagcgtgggaagggggacagagagggccctcccctctgccctggactttcccatgagcctcctggaactgccagcccctctctttcacctgttccatcctgtgcagctgacacacagctaaggagcctcatagcctggcgggggctggcagagccacaccccaagtgcctgtgcccagagggcttcagtcagccgctcactcctccagggcacttttaggaaagggtttttagctagtgtttttcctcgcttttaatgacctcagccccgcctgcagtggctagaagccagcaggtgcccatgtgctactgacaagtgcctcagcttccccccggcccgggtcaggccgtgggagccgctattatctgcgttctctgccaaagactcgtgggggccatcacacctgccctgtgcagcggagccggaccaggctcttgtgtcctcactcaggtttgcttcccctgtgcccactgctgtatgatctgggggccaccaccctgtgccggtggcctctgggctgcctcccgtggtgtgagggcggggctggtgctcatggcacttcctccttgctcccacccctggcagcagggaagggctttgcctgacaacacccagctttatgtaaatattctgcagttgttacttaggaagcctggggagggcaggggtgccccatggctcccagactctgtctgtgccgagtgtattataaaatcgtgggggagatgcccggcctgggatgctgtttggagacggaataaatgttttctcattcagtctccagtcattggttgagccacagcctaggggttggaggaagactccactctgggtacacccttaggggctggctttatggaacttgtagtttgaacaaggcagtggcaatccgccccctccagcctgcctggctggcccccttccctctgtctggggtcgcattccncacaagcctttcatcaacatcttaaaatagtaactgtgctcagcttgtaaa

SEQ ID NO: 73044 - DNA, 2196 bp, Homo sapiens
  misc_feature (29)..(29): n is a, c, g, or t
  misc_feature (43)..(43): n is a, c, g, or t
  misc_feature (57)..(57): n is a, c, g, or t
  misc_feature (68)..(68): n is a, c, g, or t
  misc_feature (2145)..(2145): n is a, c, g, or t
gattcctgcagcaggccgatggggcaggnagcagcccctgccntaggaggtccctgncccattccccnacccctccccggtccaggattcccaggggcaggccccctggtgcctgcagattctcatcctggggtgcatcaggaagcactttgctcatcagctcacctccacaagtttggaggggctaagatgtcagcctccaaaaggggacagcaggctgggcgaggtggctcatgcctgtaatcccagcactttgggaggccgaggagggtggatcacctgaggtcaggagttccagaccagcctggccaacatggtgaaaccctatctctactaaaaatacgggtgtggtggagggcacctgtaatcccagctactagggaggctgaggcagaattgcttgaacccaggaggcagaggatgcagtgagccgagatcgcactattgcactccagcctgggcaacaagagcaagactccatctcaaacaacaacaaaaacccaaaaggggacagcagtagtgggagaggccagcatctgtacaccccatcagggtccccgctgtgtgtgcccctcaggcggccaccagccctaccaggtcctcccctcccggcaggtcttcgccttgatcgtgttctcctgcatctatggtgagggctacagcaatgcccacgagtctaagcagatgtactgcgtgttcaaccgcaacgaggatgcctgccgctatggcagtgccatcggggtgctggccttcctggcctcggccttcttcttggtggtcgacgcgtatttcccccagatcagcaacgccactgaccgcaagtacctggtcattggtgacctgctcttctcagctctctggaccttcctgtggtttgttggtttctgcttcctcaccaaccagtgggcagtcaccaacccgaaggacgtgctggtgggggccgactctgtgagggcagccatcaccttcagcttcttttccatcttctcctggggtgtgctggcctccctggcctaccagcgctacaaggctggcgtggacgacttcatccagaattacgttgaccccactccggaccccaacactgcctacgcctcctacccaggtgcatctgtggacaactaccaacagccacccttcacccagaacgcggagaccaccgagggctaccagccgccccctgtgtactgagcggcggttagcgtgggaagggggacagagagggccctcccctctgccctggactttcccatgagcctcctggaactgccagcccctctctttcacctgttccatcctgtgcagctgacacacagctaaggagcctcatagcctggcgggggctggcagagccacaccccaagtgcctgtgcccagagggcttcagtcagccgctcactcctccagggcacttttaggaaagggtttttagctagtgtttttcctcgcttttaatgacctcagccccgcctgcagtggctagaagccagcaggtgcccatgtgctactgacaagtgcctcagcttccccccggcccgggtcaggccgtgggagccgctattatctgcgttctctgccaaagactcgtgggggccatcacacctgccctgtgcagcggagccggaccaggctcttgtgtcctcactcaggtttgcttcccctgtgcccactgctgtatgatctgggggccaccaccctgtgccggtggcctctgggctgcctcccgtggtgtgagggcggggctggtgctcatggcacttcctccttgctcccacccctggcagcagggaagggctttgcctgacaacacccagctttatgtaaatattctgcagttgttacttaggaagcctggggagggcaggggtgccccatggctcccagactctgtctgtgccgagtgtattataaaatcgtgggggagatgcccggcctgggatgctgtttggagacggaataaatgttttctcattcagtctccagtcattggttgagccacagcctaggggttggaggaagactccactctgggtacacccttaggggctggctttatggaacttgtagtttgaacaaggcagtggcaatccgccccctccagcctgcctggctggcccccttccctctgtctggggtcgcattccncacaagcctttcatcaacatcttaaaatagtaactgtgctcagcttgtaaa

SEQ ID NO: 73045 - DNA, 1559 bp, Homo sapiens
  misc_feature (1542)..(1542): n is a, c, g, or t
ggccacgcccccggcgggtggagtcgggcggggcgccgggcaggttcctctgcgttccgcggcggcggcagcggcggcgacggcgacatggagagcggggcctacggcgcggccaaggcgggcggctccttcgacctgcggcgcttcctgacgcagccgcaggtggtggcgcgcgccgtgtgcttggtcttcgccttgatcgtgttctcctgcatctatggtgagggctacagcaatgcccacgagtctaagcagatgtactgcgtgttcaaccgcaacgaggatgcctgccgctatggcagtgccatcggggtgctggccttcctggcctcggccttcttcttggtggtcgacgcgtatttcccccagatcagcaacgccactgaccgcaagtacctggtcattggtgacctgctcttctcagctctctggaccttcctgtggtttgttggtttctgcttcctcaccaaccagtgggcagtcaccaacccgaaggacgtgctggtgggggccgactctgtgagggcagccatcaccttcagcttcttttccatcttctcctggggtgtgctggcctccctggcctaccagcgctacaaggctggcgtggacgacttcatccagaattacgttgaccccactccggaccccaacactgcctacgcctcctacccaggtgcatctgtggacaactaccaacagccacccttcacccagaacgcggagaccaccgagggctaccagccgccccctgtgtactgagcggcggttagcgtgggaagggggacagagagggccctcccctctgccctggactttcccatgagcctcctggaactgccagcccctctctttcacctgttccatcctgtgcagctgacacacagctaaggagcctcatagcctggcgggggctggcagagccacaccccaagtgcctgtgcccagagggcttcagtcagccgctcactcctccagggcacttttaggaaagggtttttagctagtgtttttcctcgcttttaatgacctcagccccgcctgcagtggctagaagccagcaggtgcccatgtgctactgacaagtgcctcagcttccccccggcccgggtcaggccgtgggagccgctattatctgcgttctctgccaaagactcgtgggggccatcacacctgccctgtgcagcggagccggaccaggctcttgtgtcctcactcaggtttgcttcccctgtgcccactgctgtatgatctgggggccaccaccctgtgccggtggcctctgggctgcctcccgtggtgtgagggcggggctggtgctcatggcacttcctccttgctcccacccctggcagcagggaagggctttgcctgacaacacccagctttatgtaaatattctgcagttgttacttaggaagcctggggagggcaggggtgccccatggctcccagactctgtctgtgccgagtgtattataaaatcgtgggggagatgcccggcctgggatgctgtttggagacggaataaatgtttaaaanaaacataaaaaaaaaaa

SEQ ID NO: 73046 - DNA, 1562 bp, Homo sapiens
ggccacgcccccggcgggtggagtcgggcggggcgccgggcaggttcctctgcgttccgcggcggcggcagcggcggcgacggcgacatggagagcggggcctacggcgcggccaaggcgggcggctccttcgacctgcggcgcttcctgacgcagccgcaggtggtggcgcgcgccgtgtgcttggtcttcgccttgatcgtgttctcctgcatctatggtgagggctacagcaatgcccacgagtctaagcagatgtactgcgtgttcaaccgcaacgaggatgcctgccgctatggcagtgccatcggggtgctggccttcctggcctcggccttcttcttggtggtcgacgcgtatttcccccagatcagcaacgccactgaccgcaagtacctggtcattggtgacctgctcttctcagctctctggaccttcctgtggtttgttggtttctgcttcctcaccaaccagtgggcagtcaccaacccgaaggacgtgctggtgggggccgactctgtgagggcagccatcaccttcagcttcttttccatcttctcctggggtgtgctggcctccctggcctaccagcgctacaaggctggcgtggacgacttcatccagaattacgttgaccccactccggaccccaacactgcctacgcctcctacccaggtgcatctgtggacaactaccaacagccacccttcacccagaacgcggagaccaccgagggctaccagccgccccctgtgtactgagcggcggttagcgtgggaagggggacagagagggccctcccctctgccctggactttcccatgagcctcctggaactgccagcccctctctttcacctgttccatcctgtgcagctgacacacagctaaggagcctcatagcctggcgggggctggcagagccacaccccaagtgcctgtgcccagagggcttcagtcagccgctcactcctccagggcacttttaggaaagggtttttagctagtgtttttcctcgcttttaatgacctcagccccgcctgcagtggctagaagccagcaggtgcccatgtgctactgacaagtgcctcagcttccccccggcccgggtcaggccgtgggagccgctattatctgcgttctctgccaaagactcgtgggggccatcacacctgccctgtgcagcggagccggaccaggctcttgtgtcctcactcaggtttgcttcccctgtgcccactgctgtatgatctgggggccaccaccctgtgccggtggcctctgggctgcctcccgtggtgtgagggcggggctggtgctcatggcacttcctccttgctcccacccctggcagcagggaagggctttgcctgacaacacccagctttatgtaaatattctgcagttgttacttaggaagcctggggagggcaggggtgccccatggctcccagactctgtctgtgccgagtgtattataaaatcgtgggggagatgcccggcctgggatgctgtttggagacggaataaatgtttcacccctctcattcaaaaaaaaaaa

SEQ ID NO: 73047 - DNA, 2187 bp, Homo sapiens
  misc_feature (2136)..(2136): n is a, c, g, or t
tcggttaatgagaaaaaacttaaccggaggatgccatgtcgacccacgcgtccgggagagcggggcctacggcgcggccaaggcgggcggctccttcgacctgcggcgcttcctgacgcagccgcaggtggtggcgcgcgccgtgtgcttggtcttcgccttgatcgtgttctcctgcatctatggtgagggctacagcaatgcccacgagtctaagcagatgtactgcgtgttcaaccgcaacgaggatgcctgccgctatggcagtgccatcggggtgctggccttcctggcctcggccttcttcttggtggtcgacgcgtatttcccccagatcagcaacgccactgaccgcaagtacctggtcattggtgacctgctcttctcaggtatctgcctgtggcacctccatttgatcttgggggaggcattaactctagggttccgcagctgggagggtctcggcctctctgggaggggcagggagcagctcactcctccagggcatttttaggaaagggttttcagctagtgtttttccgtgcttgaatggcaccagccctgcctggggtagctagaagctgagtggacctgcagcacacccgagcagatgggctttgcctctgccccttttgtcccctaggctgtctgctgtggcccaccctgccaaggcccgagtgtgggggactttggaggtggctcccggcccggcttccaagtcctcccctccatagtgtggaggctcccccgggaggtccctgccctacctgcccgcgtcccctcccagagtcctggaaagcccctccctttccatggaactgacgcttcacccgtcctcccccagctctctggaccttcctgtggtttgttggtttctgcttcctcaccaaccagtgggcagtcaccaacccgaaggacgtgctggtgggggccgactctgtgagggcagccatcaccttcagcttcttttccatcttctcctggggtgtgctggcctccctggcctaccagcgctacaaggctggcgtggacgacttcatccagaattacgttgaccccactccggaccccaacactgcctacgcctcctacccaggtgcatctgtggacaactaccaacagccacccttcacccagaacgcggagaccaccgagggctaccagccgccccctgtgtactgagcggcggttagcgtgggaagggggacagagagggccctcccctctgccctggactttcccatgagcctcctggaactgccagcccctctctttcacctgttccatcctgtgcagctgacacacagctaaggagcctcatagcctggcgggggctggcagagccacaccccaagtgcctgtgcccagagggcttcagtcagccgctcactcctccagggcacttttaggaaagggtttttagctagtgtttttcctcgcttttaatgacctcagccccgcctgcagtggctagaagccagcaggtgcccatgtgctactgacaagtgcctcagcttccccccggcccgggtcaggccgtgggagccgctattatctgcgttctctgccaaagactcgtgggggccatcacacctgccctgtgcagcggagccggaccaggctcttgtgtcctcactcaggtttgcttcccctgtgcccactgctgtatgatctgggggccaccaccctgtgccggtggcctctgggctgcctcccgtggtgtgagggcggggctggtgctcatggcacttcctccttgctcccacccctggcagcagggaagggctttgcctgacaacacccagctttatgtaaatattctgcagttgttacttaggaagcctggggagggcaggggtgccccatggctcccagactctgtctgtgccgagtgtattataaaatcgtgggggagatgcccggcctgggatgctgtttggagacggaataaatgttttctcattcagtctccagtcattggttgagccacagcctaggggttggaggaagactccactctgggtacacccttaggggctggctttatggaacttgtagtttgaacaaggcagtggcaatccgccccctccagcctgcctggctggcccccttccctctgtctggggtcgcattccncacaagcctttcatcaacatcttaaaatagtaactgtgctcagcttgtaaa

SEQ ID NO: 73048 - DNA, 1800 bp, Homo sapiens
  misc_feature (1749)..(1749): n is a, c, g, or t
ttaacggtaggtgcgaggctgggtgtgaatcggccgaggcggcggcgacggcgacatggagagcggggcctacggcgcggccaaggcgggcggctccttcgacctgcggcgcttcctgacgcagccgcaggtggtggcgcgcgccgtgtgcttggaggcagaggatgcagtgagccgagatcgcactattgcactccagcctgggcaacaagagcaagactccatctcaaacaacaacaaaaacccaaaaggggacagcagtagtgggagaggccagcatctgtacaccccatcagggtccccgctgtgtgtgcccctcaggcggccaccagccctaccaggtcctcccctcccggcaggtcttcgccttgatcgtgttctcctgcatctatggtgagggctacagcaatgcccacgagtctaagcagatgtactgcgtgttcaaccgcaacgaggatgcctgccgctatggcagtgccatcggggtgctggccttcctggcctcggccttcttcttggtggtcgacgcgtatttcccccagatcagcaacgccactgaccgcaagtacctggtcattggtgacctgctcttctcagggtgtgctggcctccctggcctaccagcgctacaaggctggcgtggacgacttcatccagaattacgttgaccccactccggaccccaacactgcctacgcctcctacccaggtgcatctgtggacaactaccaacagccacccttcacccagaacgcggagaccaccgagggctaccagccgccccctgtgtactgagcggcggttagcgtgggaagggggacagagagggccctcccctctgccctggactttcccatgagcctcctggaactgccagcccctctctttcacctgttccatcctgtgcagctgacacacagctaaggagcctcatagcctggcgggggctggcagagccacaccccaagtgcctgtgcccagagggcttcagtcagccgctcactcctccagggcacttttaggaaagggtttttagctagtgtttttcctcgcttttaatgacctcagccccgcctgcagtggctagaagccagcaggtgcccatgtgctactgacaagtgcctcagcttccccccggcccgggtcaggccgtgggagccgctattatctgcgttctctgccaaagactcgtgggggccatcacacctgccctgtgcagcggagccggaccaggctcttgtgtcctcactcaggtttgcttcccctgtgcccactgctgtatgatctgggggccaccaccctgtgccggtggcctctgggctgcctcccgtggtgtgagggcggggctggtgctcatggcacttcctccttgctcccacccctggcagcagggaagggctttgcctgacaacacccagctttatgtaaatattctgcagttgttacttaggaagcctggggagggcaggggtgccccatggctcccagactctgtctgtgccgagtgtattataaaatcgtgggggagatgcccggcctgggatgctgtttggagacggaataaatgttttctcattcagtctccagtcattggttgagccacagcctaggggttggaggaagactccactctgggtacacccttaggggctggctttatggaacttgtagtttgaacaaggcagtggcaatccgccccctccagcctgcctggctggcccccttccctctgtctggggtcgcattccncacaagcctttcatcaacatcttaaaatagtaactgtgctcagcttgtaaa

SEQ ID NO: 73049 - DNA, 1708 bp, Homo sapiens
  misc_feature (1657)..(1657): n is a, c, g, or t
ttaacggtaggtgcgaggctgggtgtgaatcggccgaggcggcggcgacggcgacatggagagcggggcctacggcgcggccaaggcgggcggctccttcgacctgcggcgcttcctgacgcagccgcaggtggtggcgcgcgccgtgtgcttggtcttcgccttgatcgtgttctcctgcatctatggtgagggctacagcaatgcccacgagtctaagcagatgtactgcgtgttcaaccgcaacgaggatgcctgccgctatggcagtgccatcggggtgctggccttcctggcctcggccttcttcttggtggtcgacgcgtatttcccccagatcagcaacgccactgaccgcaagtacctggtcattggtgacctgctcttctcagctctctggaccttcctgtggtttgttggtttctgcttcctcaccaaccagtgggcagtcaccaacccgaaggacgtgctggtgggggccgactctgtgagggcagccatcaccttcagcttcttttccatcttctcctggcgctacaaggctggcgtggacgacttcatccagaattacgttgaccccactccggaccccaacactgcctacgcctcctacccaggtgcatctgtggacaactaccaacagccacccttcacccagaacgcggagaccaccgagggctaccagccgccccctgtgtactgagcggcggttagcgtgggaagggggacagagagggccctcccctctgccctggactttcccatgagcctcctggaactgccagcccctctctttcacctgttccatcctgtgcagctgacacacagctaaggagcctcatagcctggcgggggctggcagagccacaccccaagtgcctgtgcccagagggcttcagtcagccgctcactcctccagggcacttttaggaaagggtttttagctagtgtttttcctcgcttttaatgacctcagccccgcctgcagtggctagaagccagcaggtgcccatgtgctactgacaagtgcctcagcttccccccggcccgggtcaggccgtgggagccgctattatctgcgttctctgccaaagactcgtgggggccatcacacctgccctgtgcagcggagccggaccaggctcttgtgtcctcactcaggtttgcttcccctgtgcccactgctgtatgatctgggggccaccaccctgtgccggtggcctctgggctgcctcccgtggtgtgagggcggggctggtgctcatggcacttcctccttgctcccacccctggcagcagggaagggctttgcctgacaacacccagctttatgtaaatattctgcagttgttacttaggaagcctggggagggcaggggtgccccatggctcccagactctgtctgtgccgagtgtattataaaatcgtgggggagatgcccggcctgggatgctgtttggagacggaataaatgttttctcattcagtctccagtcattggttgagccacagcctaggggttggaggaagactccactctgggtacacccttaggggctggctttatggaacttgtagtttgaacaaggcagtggcaatccgccccctccagcctgcctggctggcccccttccctctgtctggggtcgcattccncacaagcctttcatcaacatcttaaaatagtaactgtgctcagcttgtaaa

SEQ ID NO: 73050 - DNA, 1165 bp, Homo sapiens
  misc_feature (1114)..(1114): n is a, c, g, or t
cggtcgctcggtcgcgaatccaggtcggtcgcgaatccaggttcggtcgcgaatccaggtcggcgcgaatccaggtgcatctgtggacaactaccaacagccacccttcacccagaacgcggagaccaccgagggctaccagccgccccctgtgtactgagcggcggttagcgtgggaagggggacagagagggccctcccctctgccctggactttcccatgagcctcctggaactgccagcccctctctttcacctgttccatcctgtgcagctgacacacagctaaggagcctcatagcctggcgggggctggcagagccacaccccaagtgcctgtgcccagagggcttcagtcagccgctcactcctccagggcacttttaggaaagggtttttagctagtgtttttcctcgcttttaatgacctcagccccgcctgcagtggctagaagccagcaggtgcccatgtgctactgacaagtgcctcagcttccccccggcccgggtcaggccgtgggagccgctattatctgcgttctctgccaaagactcgtgggggccatcacacctgccctgtgcagcggagccggaccaggctcttgtgtcctcactcaggtttgcttcccctgtgcccactgctgtatgatctgggggccaccaccctgtgccggtggcctctgggctgcctcccgtggtgtgagggcggggctggtgctcatggcacttcctccttgctcccacccctggcagcagggaagggctttgcctgacaacacccagctttatgtaaatattctgcagttgttacttaggaagcctggggagggcaggggtgccccatggctcccagactctgtctgtgccgagtgtattataaaatcgtgggggagatgcccggcctgggatgctgtttggagacggaataaatgttttctcattcagtctccagtcattggttgagccacagcctaggggttggaggaagactccactctgggtacacccttaggggctggctttatggaacttgtagtttgaacaaggcagtggcaatccgccccctccagcctgcctggctggcccccttccctctgtctggggtcgcattccncacaagcctttcatcaacatcttaaaatagtaactgtgctcagcttgtaaa

SEQ ID NO: 73051 - DNA, 1121 bp, Homo sapiens
  misc_feature (1070)..(1070): n is a, c, g, or t
tccgacggcccctgggttggtttagaatcggacgaggctgtggaaactaccaacagccacccttcacccagaacgcggagaccaccgagggctaccagccgccccctgtgtactgagcggcggttagcgtgggaagggggacagagagggccctcccctctgccctggactttcccatgagcctcctggaactgccagcccctctctttcacctgttccatcctgtgcagctgacacacagctaaggagcctcatagcctggcgggggctggcagagccacaccccaagtgcctgtgcccagagggcttcagtcagccgctcactcctccagggcacttttaggaaagggtttttagctagtgtttttcctcgcttttaatgacctcagccccgcctgcagtggctagaagccagcaggtgcccatgtgctactgacaagtgcctcagcttccccccggcccgggtcaggccgtgggagccgctattatctgcgttctctgccaaagactcgtgggggccatcacacctgccctgtgcagcggagccggaccaggctcttgtgtcctcactcaggtttgcttcccctgtgcccactgctgtatgatctgggggccaccaccctgtgccggtggcctctgggctgcctcccgtggtgtgagggcggggctggtgctcatggcacttcctccttgctcccacccctggcagcagggaagggctttgcctgacaacacccagctttatgtaaatattctgcagttgttacttaggaagcctggggagggcaggggtgccccatggctcccagactctgtctgtgccgagtgtattataaaatcgtgggggagatgcccggcctgggatgctgtttggagacggaataaatgttttctcattcagtctccagtcattggttgagccacagcctaggggttggaggaagactccactctgggtacacccttaggggctggctttatggaacttgtagtttgaacaaggcagtggcaatccgccccctccagcctgcctggctggcccccttccctctgtctggggtcgcattccncacaagcctttcatcaacatcttaaaatagtaactgtgctcagcttgtaaa

SEQ ID NO: 73052 - DNA, 1480 bp, Homo sapiens
  misc_feature (1429)..(1429): n is a, c, g, or t
ggccacgcccccggcgggtggagtcgggcggggcgccgggcaggttcctctgcgttccgcggcggcggcagcggcggcgacggcgacatggagagcggggcctacggcgcggccaaggcgggcggctccttcgacctgcggcgcttcctgacgcagccgcaggtggtggcgcgcgccgtgtgcttggtcttcgccttgatcgtgttctcctgcatctatggtgagggctacagcaatgcccacgagtctaagcagatgtactgcgtgttcaaccgcaacgaggatgcctgccgctatggcagtgccatcggggtgctggccttcctggcctcggccttcttcttggtggtcgacgcgtatttcccccagatcagcaacgccactgaccgcaagtacctggtcattggtgacctgctcttctcagctctctggaccttcctgtggtttgttggtttctgcttcctcaccaaccagtgggcagtcaccaacccgaaggacgtgctggtgggggccgactctgtgagggcagccatcaccttcagcttcttttccatcttctcctggggtgtgctggcctccctggcctaccagcgctacaaggctggcgtggacgacttcatccagaattacgttgaccccactccggaccccaacactgcctacgcctcctacccaggtgcatctgtggacaactaccaacagccacccttcacccagaacgcggagaccaccgagggctaccagccgccccctgtgtactgagcggcggttagcgtgggaagggggacagagagggccctcccctctgccctggactttcccatgagcctcctggaactgccagcccctctctttcacctgttccatcctgtgcagctgacacacagctaaggagcctcatagcctggcgggggctggcagagccacaccccaagtgcctgtgcccagagggcttcagtcagccgctcactcctccagggcacttttaggaaagggtttttagctagtgtttttcctcgcttttaatgacctcagccccgcctgcagtggctagaagccagcaggtgcccatgtgctactgacaagtgcctcagcttccccccggcccgggtcaggccgtgggagccgctattatctgcgttctctgccaaagactcatggctcccagactctgtctgtgccgagtgtattataaaatcgtgggggagatgcccggcctgggatgctgtttggagacggaataaatgttttctcattcagtctccagtcattggttgagccacagcctaggggttggaggaagactccactctgggtacacccttaggggctggctttatggaacttgtagtttgaacaaggcagtggcaatccgccccctccagcctgcctggctggcccccttccctctgtctggggtcgcattccncacaagcctttcatcaacatcttaaaatagtaactgtgctcagcttgtaaa

SEQ ID NO: 73053 - DNA, 1021 bp, Homo sapiens
  misc_feature (27)..(27): n is a, c, g, or t
  misc_feature (970)..(970): n is a, c, g, or t
tgagtgatctagcaggatcttaaggtngttgggaagggggacagagagggccctcccctctgccctggactttcccatgagcctcctggaactgccagcccctctctttcacctgttccatcctgtgcagctgacacacagctaaggagcctcatagcctggcgggggctggcagagccacaccccaagtgcctgtgcccagagggcttcagtcagccgctcactcctccagggcacttttaggaaagggtttttagctagtgtttttcctcgcttttaatgacctcagccccgcctgcagtggctagaagccagcaggtgcccatgtgctactgacaagtgcctcagcttccccccggcccgggtcaggccgtgggagccgctattatctgcgttctctgccaaagactcgtgggggccatcacacctgccctgtgcagcggagccggaccaggctcttgtgtcctcactcaggtttgcttcccctgtgcccactgctgtatgatctgggggccaccaccctgtgccggtggcctctgggctgcctcccgtggtgtgagggcggggctggtgctcatggcacttcctccttgctcccacccctggcagcagggaagggctttgcctgacaacacccagctttatgtaaatattctgcagttgttacttaggaagcctggggagggcaggggtgccccatggctcccagactctgtctgtgccgagtgtattataaaatcgtgggggagatgcccggcctgggatgctgtttggagacggaataaatgttttctcattcagtctccagtcattggttgagccacagcctaggggttggaggaagactccactctgggtacacccttaggggctggctttatggaacttgtagtttgaacaaggcagtggcaatccgccccctccagcctgcctggctggcccccttccctctgtctggggtcgcattccncacaagcctttcatcaacatcttaaaatagtaactgtgctcagcttgtaaa

SEQ ID NO: 73054 - DNA, 854 bp, Homo sapiens
  misc_feature (803)..(803): n is a, c, g, or t
ggctatcaaaaaggaagagtgggaggaggaggggaagcggcgaaggaggaagaggaggaggaggaggagcttttaggaaagggtttttagctagtgtttttcctcgcttttaatgacctcagccccgcctgcagtggctagaagccagcaggtgcccatgtgctactgacaagtgcctcagcttccccccggcccgggtcaggccgtgggagccgctattatctgcgttctctgccaaagactcgtgggggccatcacacctgccctgtgcagcggagccggaccaggctcttgtgtcctcactcaggtttgcttcccctgtgcccactgctgtatgatctgggggccaccaccctgtgccggtggcctctgggctgcctcccgtggtgtgagggcggggctggtgctcatggcacttcctccttgctcccacccctggcagcagggaagggctttgcctgacaacacccagctttatgtaaatattctgcagttgttacttaggaagcctggggagggcaggggtgccccatggctcccagactctgtctgtgccgagtgtattataaaatcgtgggggagatgcccggcctgggatgctgtttggagacggaataaatgttttctcattcagtctccagtcattggttgagccacagcctaggggttggaggaagactccactctgggtacacccttaggggctggctttatggaacttgtagtttgaacaaggcagtggcaatccgccccctccagcctgcctggctggcccccttccctctgtctggggtcgcattccncacaagcctttcatcaacatcttaaaatagtaactgtgctcagcttgtaaa

SEQ ID NO: 73055 - DNA, 1500 bp, Homo sapiens
  misc_feature (1449)..(1449): n is a, c, g, or t
ggccacgcccccggcgggtggagtcgggcggggcgccgggcaggttcctctgcgttccgcggcggcggcagcggcggcgacggcgacatggagagcggggcctacggcgcggccaaggcgggcggctccttcgacctgcggcgcttcctgacgcagccgcaggtggtggcgcgcgccgtgtgcttggtcttcgccttgatcgtgttctcctgcatctatggtgagggctacagcaatgcccacgagtctaagcagatgtactgcgtgttcaaccgcaacgaggatgcctgccgctatggcagtgccatcggggtgctggccttcctggcctcggccttcttcttggtggtcgacgcgtatttcccccagatcagcaacgccactgaccgcaagtacctggtcattggtgacctgctcttctcagggtgtgctggcctccctggcctaccagcgctacaaggctggcgtggacgacttcatccagaattacgttgaccccactccggaccccaacactgcctacgcctcctacccaggtgcatctgtggacaactaccaacagccacccttcacccagaacgcggagaccaccgagggctaccagccgccccctgtgtactgagcggcggttagcgtgggaagggggacagagagggccctcccctctgccctggactttcccatgagcctcctggaactgccagcccctctctttcacctgttccatcctgtgcagctgacacacagctaaggagcctcatagcctggcgggggctggcagagccacaccccaagtgcctgtgcccagagggcttcagtcagccgctcactcctccagggcacttttaggaaagggtttttagctagtgtttttcctcgcttttaatgacctcagccccgcctgcagtggctagaagccagcaggtgcccatgtgctactgacaagtgcctcagtttgcttcccctgtgcccactgctgtatgatctgggggccaccaccctgtgccggtggcctctgggctgcctcccgtggtgtgagggcggggctggtgctcatggcacttcctccttgctcccacccctggcagcagggaagggctttgcctgacaacacccagctttatgtaaatattctgcagttgttacttaggaagcctggggagggcaggggtgccccatggctcccagactctgtctgtgccgagtgtattataaaatcgtgggggagatgcccggcctgggatgctgtttggagacggaataaatgttttctcattcagtctccagtcattggttgagccacagcctaggggttggaggaagactccactctgggtacacccttaggggctggctttatggaacttgtagtttgaacaaggcagtggcaatccgccccctccagcctgcctggctggcccccttccctctgtctggggtcgcattccncacaagcctttcatcaacatcttaaaatagtaactgtgctcagcttgtaaa

SEQ ID NO: 73056 - DNA, 1020 bp, Homo sapiens
ggccacgcccccggcgggtggagtcgggcggggcgccgggcaggttcctctgcgttccgcggcggcggcagcggcggcgacggcgacatggagagcggggcctacggcgcggccaaggcgggcggctccttcgacctgcggcgcttcctgacgcagccgcaggtggtggcgcgcgccgtgtgcttggtcttcgccttgatcgtgttctcctgcatctatggtgagggctacagcaatgcccacgagtctaagcagatgtactgcgtgttcaaccgcaacgaggatgcctgccgctatggcagtgccatcggggtgctggccttcctggcctcggccttcttcttggtggtcgacgcgtatttcccccagatcagcaacgccactgaccgcaagtacctggtcattggtgacctgctcttctcagctctctggaccttcctgtggtttgttggtttctgcttcctcaccaaccagtgggcagtcaccaacccgaaggacgtgctggtgggggccgactctgtgagggcagccatcaccttcagcttcttttccatcttctcctggggtgtgctggcctccctggcctaccagcgctacaaggctggcgtggacgacttcatccagaattacgttgaccccactccggaccccaacactgcctacgcctcctacccaggtgcatctgtggacaactaccaacagccacccttcacccagaacgcggagaccaccgagggctaccagccgccccctgtgtactgagcggcggttagcgggtcagcacctctggagccttcctgggacacggccttggccgtccagcccacccctcggagataaggcccatctctggaagaggtcaaggccctaaagcaacttctggcttcttcttttgagcaatgacagagggagctgtcatcggcaagtcccgattgtttaaaaatccccagtacgaactaacagggcactgctcccagcctcacccgatggctttggcttgggacacatcactagcgaagg

SEQ ID NO: 73057 - DNA, 895 bp, Homo sapiens
ggccacgcccccggcgggtggagtcgggcggggcgccgggcaggttcctctgcgttccgcggcggcggcagcggcggcgacggcgacatggagagcggggcctacggcgcggccaaggcgggcggctccttcgacctgcggcgcttcctgacgcagccgcaggtggtggcgcgcgccgtgtgcttggtcttcgccttgatcgtgttctcctgcatctatggtgagggctacagcaatgcccacgagtctaagcagatgtactgcgtgttcaaccgcaacgaggatgcctgccgctatggcagtgccatcggggtgctggccttcctggcctcggccttcttcttggtggtcgacgcgtatttcccccagatcagcaacgccactgaccgcaagtacctggtcattggtgacctgctcttctcagctctctggaccttcctgtggtttgttggtttctgcttcctcaccaaccagtgggcagtcaccaacccgaaggacgtgctggtgggggccgactctgtgagggcagccatcaccttcagcttcttttccatcttctcctggggtgtgctggcctccctggcctaccagcgctacaaggctggcgtggacgacttcatccagaattacgttgaccccactccggaccccaacactgcctacgcctcctacccaggtgcatctgtggacaactaccaacagccacccttcacccagaacgcggagaccaccgagggctaccagccgccccctgtgtactgagcggcggttagcgtgttgggcgataactatttatcgcccacacaaagacaggaactaacacaaaatcaaagaaagagtcataaaaagtagaagtacaaaagtcagggtgttgggaaacagtcacgcgaccgac

SEQ ID NO: 73058 - DNA, 776 bp, Homo sapiens
ttaacggtaggtgcgaggctgggtgtgaatcggccgaggcggcggcgacggcgacatggagagcggggcctacggcgcggccaaggcgggcggctccttcgacctgcggcgcttcctgacgcagccgcaggtggtggcgcgcgccgtgtgcttggtcttcgccttgatcgtgttctcctgcatctatggtgagggctacagcaatgcccacgagtctaagcagatgtactgcgtgttcaaccgcaacgaggatgcctgccgctatggcagtgccatcggggtgctggccttcctggcctcggccttcttcttggtggtcgacgcgtatttcccccagatcagcaacgccactgaccgcaagtacctggtcattggtgacctgctcttctcagctctctggaccttcctgtggtttgttggtttctgcttcctcaccaaccagtgggcagtcaccaacccgaaggacgtgctggtgggggccgactctgtgagggcagccatcaccttcagcttcttttccatcttctcctgggtgtgctggaaaagaagctgaaggtgatggctgccctcacagagtcggccttcaccagcacgtccttcgggtttggtgactgcccagggctaggtgaggaagcagaaaccagcagaaccacagggcagggaccaagagacgctgagaccgcagcccgtgacacacatagacaaggcaacgtgcggctagctgacgtgcccacaagcggacagacaacacaggcatacgaccagaaagccaggag

SEQ ID NO: 73059 - DNA, 562 bp, Homo sapiens
ttaacggtaggtgcgaggctgggtgtgaatcggccgaggcggcggcgacggcgacatggagagcggggcctacggcgcggccaaggcgggcggctccttcgacctgcggcgcttcctgacgcagccgcaggtggtggcgcgcgccgtgtgcttggtcttcgccttgatcgtgttctcctgcatctatggtgagggctacagcaatgcccacgagtctaagcagatgtactgcgtgttcaaccgcaacgaggatgcctgccgctatggcagtgccatcggggtgctggccttcctggcctcggccttcttcttggtggtcgacgcgtatttcccccagatcagcaacgccactgaccgcaagtacctggtcattggtgacctgctcttctcagctctctggaccttcctgtggtttgttggtttctgcttcctcaccaaccagtgggcagtcaccaacccgaaggacgtgctggtgggggccgactctgtgagggcagccatcaccttcagcttcttttccatcttctcctggcgaagcagtgctaagctcctgagagtcagc

SEQ ID NO: 73060 - DNA, 375 bp, Homo sapiens
  misc_feature (324)..(324): n is a, c, g, or t
gcggccgcctactactactgctcgaattcaagcttctaacgatgtacggggaatggctcccagactctgtctgtgccgagtgtattataaaatcgtgggggagatgcccggcctgggatgctgtttggagacggaataaatgttttctcattcagtctccagtcattggttgagccacagcctaggggttggaggaagactccactctgggtacacccttaggggctggctttatggaacttgtagtttgaacaaggcagtggcaatccgccccctccagcctgcctggctggcccccttccctctgtctggggtcgcattccncacaagcctttcatcaacatcttaaaatagtaactgtgctcagcttgtaaa

SEQ ID NO: 73061 - DNA, 1767 bp, Homo sapiens
  misc_feature (1716)..(1716): n is a, c, g, or t
ggccacgcccccggcgggtggagtcgggcggggcgccgggcaggttcctctgcgttccgcggcggcggcagcggcggcgacggcgacatggagagcggggcctacggcgcggccaaggcgggcggctccttcgacctgcggcgcttcctgacgcagccgcaggtggtggcgcgcgccgtgtgcttggtcttcgccttgatcgtgttctcctgcatctatggtgagggctacagcaatgcccacgagtctaagcagatgtactgcgtgttcaaccgcaacgaggatgcctgccgctatggcagtgccatcggggtgctggccttcctggcctcggccttcttcttggtggtcgacgcgtatttcccccagatcagcaacgccactgaccgcaagtacctggtcattggtgacctgctcttctcagctctctggaccttcctgtggtttgttggtttctgcttcctcaccaaccagtgggcagtcaccaacccgaaggacgtgctggtgggggccgactctgtgagggcagccatcaccttcagcttcttttccatcttctcctggggtgtgctggcctccctggcctaccagcgctacaaggctggcgtggacgacttcatccagaattacgttgaccccactccggaccccaacactgcctacgcctcctacccaggtgcatctgtggacaactaccaacagccacccttcacccagaacgcggagaccaccgagggctaccagccgccccctgtgtactgagcggcggttagcgtgggaagggggacagagagggccctcccctctgccctggactttcccatgagcctcctggaactgccagcccctctctttcacctgttccatcctgtgcagctgacacacagctaaggagcctcatagcctggcgggggctggcagagccacaccccaagtgcctgtgcccagagggcttcagtcagccgctcactcctccagggcacttttaggaaagggtttttagctagtgtttttcctcgcttttaatgacctcagccccgcctgcagtggctagaagccagcaggtgcccatgtgctactgacaagtgcctcagcttccccccggcccgggtcaggccgtgggagccgctattatctgcgttctctgccaaagactcgtgggggccatcacacctgccctgtgcagcggagccggaccaggctcttgtgtcctcactcaggtttgcttcccctgtgcccactgctgtatgatctgggggccaccaccctgtgccggtggcctctgggctgcctcccgtggtgtgagggcggggctggtgctcatggcacttcctccttgctcccacccctggcagcagggaagggctttgcctgacaacacccagctttatgtaaatattctgcagttgttacttaggaagcctggggagggcaggggtgccccatggctcccagactctgtctgtgccgagtgtattataaaatcgtgggggagatgcccggcctgggatgctgtttggagacggaataaatgttttctcattcagtctccagtcattggttgagccacagcctaggggttggaggaagactccactctgggtacacccttaggggctggctttatggaacttgtagtttgaacaaggcagtggcaatccgccccctccagcctgcctggctggcccccttccctctgtctggggtcgcattccncacaagcctttcatcaacatcttaaaatagtaactgtgctcagcttgtaaa

SEQ ID NO: 73062 - DNA, 1732 bp, Homo sapiens
  misc_feature (1681)..(1681): n is a, c, g, or t
tcggttaatgagaaaaaacttaaccggaggatgccatgtcgacccacgcgtccgggagagcggggcctacggcgcggccaaggcgggcggctccttcgacctgcggcgcttcctgacgcagccgcaggtggtggcgcgcgccgtgtgcttggtcttcgccttgatcgtgttctcctgcatctatggtgagggctacagcaatgcccacgagtctaagcagatgtactgcgtgttcaaccgcaacgaggatgcctgccgctatggcagtgccatcggggtgctggccttcctggcctcggccttcttcttggtggtcgacgcgtatttcccccagatcagcaacgccactgaccgcaagtacctggtcattggtgacctgctcttctcagctctctggaccttcctgtggtttgttggtttctgcttcctcaccaaccagtgggcagtcaccaacccgaaggacgtgctggtgggggccgactctgtgagggcagccatcaccttcagcttcttttccatcttctcctggggtgtgctggcctccctggcctaccagcgctacaaggctggcgtggacgacttcatccagaattacgttgaccccactccggaccccaacactgcctacgcctcctacccaggtgcatctgtggacaactaccaacagccacccttcacccagaacgcggagaccaccgagggctaccagccgccccctgtgtactgagcggcggttagcgtgggaagggggacagagagggccctcccctctgccctggactttcccatgagcctcctggaactgccagcccctctctttcacctgttccatcctgtgcagctgacacacagctaaggagcctcatagcctggcgggggctggcagagccacaccccaagtgcctgtgcccagagggcttcagtcagccgctcactcctccagggcacttttaggaaagggtttttagctagtgtttttcctcgcttttaatgacctcagccccgcctgcagtggctagaagccagcaggtgcccatgtgctactgacaagtgcctcagcttccccccggcccgggtcaggccgtgggagccgctattatctgcgttctctgccaaagactcgtgggggccatcacacctgccctgtgcagcggagccggaccaggctcttgtgtcctcactcaggtttgcttcccctgtgcccactgctgtatgatctgggggccaccaccctgtgccggtggcctctgggctgcctcccgtggtgtgagggcggggctggtgctcatggcacttcctccttgctcccacccctggcagcagggaagggctttgcctgacaacacccagctttatgtaaatattctgcagttgttacttaggaagcctggggagggcaggggtgccccatggctcccagactctgtctgtgccgagtgtattataaaatcgtgggggagatgcccggcctgggatgctgtttggagacggaataaatgttttctcattcagtctccagtcattggttgagccacagcctaggggttggaggaagactccactctgggtacacccttaggggctggctttatggaacttgtagtttgaacaaggcagtggcaatccgccccctccagcctgcctggctggcccccttccctctgtctggggtcgcattccncacaagcctttcatcaacatcttaaaatagtaactgtgctcagcttgtaaa

SEQ ID NO: 73063 - DNA, 1575 bp, Homo sapiens
ggccacgcccccggcgggtggagtcgggcggggcgccgggcaggttcctctgcgttccgcggcggcggcagcggcggcgacggcgacatggagagcggggcctacggcgcggccaaggcgggcggctccttcgacctgcggcgcttcctgacgcagccgcaggtggtggcgcgcgccgtgtgcttggtcttcgccttgatcgtgttctcctgcatctatggtgagggctacagcaatgcccacgagtctaagcagatgtactgcgtgttcaaccgcaacgaggatgcctgccgctatggcagtgccatcggggtgctggccttcctggcctcggccttcttcttggtggtcgacgcgtatttcccccagatcagcaacgccactgaccgcaagtacctggtcattggtgacctgctcttctcagctctctggaccttcctgtggtttgttggtttctgcttcctcaccaaccagtgggcagtcaccaacccgaaggacgtgctggtgggggccgactctgtgagggcagccatcaccttcagcttcttttccatcttctcctggggtgtgctggcctccctggcctaccagcgctacaaggctggcgtggacgacttcatccagaattacgttgaccccactccggaccccaacactgcctacgcctcctacccaggtgcatctgtggacaactaccaacagccacccttcacccagaacgcggagaccaccgagggctaccagccgccccctgtgtactgagcggcggttagcgtgggaagggggacagagagggccctcccctctgccctggactttcccatgagcctcctggaactgccagcccctctctttcacctgttccatcctgtgcagctgacacacagctaaggagcctcatagcctggcgggggctggcagagccacaccccaagtgcctgtgcccagagggcttcagtcagccgctcactcctccagggcacttttaggaaagggtttttagctagtgtttttcctcgcttttaatgacctcagccccgcctgcagtggctagaagccagcaggtgcccatgtgctactgacaagtgcctcagcttccccccggcccgggtcaggccgtgggagccgctattatctgcgttctctgccaaagactcgtgggggccatcacacctgccctgtgcagcggagccggaccaggctcttgtgtcctcactcaggtttgcttcccctgtgcccactgctgtatgatctgggggccaccaccctgtgccggtggcctctgggctgcctcccgtggtgtgagggcggggctggtgctcatggcacttcctccttgctcccacccctggcagcagggaagggctttgcctgacaacacccagctttatgtaaatattctgcagttgttacttaggaagcctggggagggcaggggtgccccatggctcccagactctgtctgtgccgagtgtattataaaatcgtgggggagatgcccggcctgggatgctgtttggagacggaataaatgtttactgctgggtgttggctggtggagtggtgtggggggca

SEQ ID NO: 73064 - DNA, 1627 bp, Homo sapiens
  misc_feature (1576)..(1576): n is a, c, g, or t
ggccacgcccccggcgggtggagtcgggcggggcgccgggcaggttcctctgcgttccgcggcggcggcagcggcggcgacggcgacatggagagcggggcctacggcgcggccaaggcgggcggctccttcgacctgcggcgcttcctgacgcagccgcaggtggtggcgcgcgccgtgtgcttggtcttcgccttgatcgtgttctcctgcatctatggtgagggctacagcaatgcccacgagtctaagcagatgtactgcgtgttcaaccgcaacgaggatgcctgccgctatggcagtgccatcggggtgctggccttcctggcctcggccttcttcttggtggtcgacgcgtatttcccccagatcagcaacgccactgaccgcaagtacctggtcattggtgacctgctcttctcagggtgtgctggcctccctggcctaccagcgctacaaggctggcgtggacgacttcatccagaattacgttgaccccactccggaccccaacactgcctacgcctcctacccaggtgcatctgtggacaactaccaacagccacccttcacccagaacgcggagaccaccgagggctaccagccgccccctgtgtactgagcggcggttagcgtgggaagggggacagagagggccctcccctctgccctggactttcccatgagcctcctggaactgccagcccctctctttcacctgttccatcctgtgcagctgacacacagctaaggagcctcatagcctggcgggggctggcagagccacaccccaagtgcctgtgcccagagggcttcagtcagccgctcactcctccagggcacttttaggaaagggtttttagctagtgtttttcctcgcttttaatgacctcagccccgcctgcagtggctagaagccagcaggtgcccatgtgctactgacaagtgcctcagcttccccccggcccgggtcaggccgtgggagccgctattatctgcgttctctgccaaagactcgtgggggccatcacacctgccctgtgcagcggagccggaccaggctcttgtgtcctcactcaggtttgcttcccctgtgcccactgctgtatgatctgggggccaccaccctgtgccggtggcctctgggctgcctcccgtggtgtgagggcggggctggtgctcatggcacttcctccttgctcccacccctggcagcagggaagggctttgcctgacaacacccagctttatgtaaatattctgcagttgttacttaggaagcctggggagggcaggggtgccccatggctcccagactctgtctgtgccgagtgtattataaaatcgtgggggagatgcccggcctgggatgctgtttggagacggaataaatgttttctcattcagtctccagtcattggttgagccacagcctaggggttggaggaagactccactctgggtacacccttaggggctggctttatggaacttgtagtttgaacaaggcagtggcaatccgccccctccagcctgcctggctggcccccttccctctgtctggggtcgcattccncacaagcctttcatcaacatcttaaaatagtaactgtgctcagcttgtaaa

SEQ ID NO: 73065 - DNA, 1859 bp, Homo sapiens
  misc_feature (1808)..(1808): n is a, c, g, or t
ggccacgcccccggcgggtggagtcgggcggggcgccgggcaggttcctctgcgttccgcggcggcggcagcggcggcgacggcgacatggagagcggggcctacggcgcggccaaggcgggcggctccttcgacctgcggcgcttcctgacgcagccgcaggtggtggcgcgcgccgtgtgcttggtcttcgccttgatcgtgttctcctgcatctatggtgagggctacagcaatgcccacgagtctaagcagatgtactgcgtgttcaaccgcaacgaggatgcctgccgctatggcagtgccatcggggtgctggccttcctggcctcggccttcttcttggtggtcgacgcgtatttcccccagatcagcaacgccactgaccgcaagtacctggtcattggtgacctgctcttctcagctctctggaccttcctgtggtttgttggtttctgcttcctcaccaaccagtgggcagtcaccaacccgaaggacgtgctggtgggggccgactctgtgagggcagccatcaccttcagcttcttttccatcttctcctggtgggtaggatggccaggggccggttcttgggtcaagggtggtggagggtggggtcccccagccacctgtaccctgctgtgctccccctgcagggtgtgctggcctccctggcctaccagcgctacaaggctggcgtggacgacttcatccagaattacgttgaccccactccggaccccaacactgcctacgcctcctacccaggtgcatctgtggacaactaccaacagccacccttcacccagaacgcggagaccaccgagggctaccagccgccccctgtgtactgagcggcggttagcgtgggaagggggacagagagggccctcccctctgccctggactttcccatgagcctcctggaactgccagcccctctctttcacctgttccatcctgtgcagctgacacacagctaaggagcctcatagcctggcgggggctggcagagccacaccccaagtgcctgtgcccagagggcttcagtcagccgctcactcctccagggcacttttaggaaagggtttttagctagtgtttttcctcgcttttaatgacctcagccccgcctgcagtggctagaagccagcaggtgcccatgtgctactgacaagtgcctcagcttccccccggcccgggtcaggccgtgggagccgctattatctgcgttctctgccaaagactcgtgggggccatcacacctgccctgtgcagcggagccggaccaggctcttgtgtcctcactcaggtttgcttcccctgtgcccactgctgtatgatctgggggccaccaccctgtgccggtggcctctgggctgcctcccgtggtgtgagggcggggctggtgctcatggcacttcctccttgctcccacccctggcagcagggaagggctttgcctgacaacacccagctttatgtaaatattctgcagttgttacttaggaagcctggggagggcaggggtgccccatggctcccagactctgtctgtgccgagtgtattataaaatcgtgggggagatgcccggcctgggatgctgtttggagacggaataaatgttttctcattcagtctccagtcattggttgagccacagcctaggggttggaggaagactccactctgggtacacccttaggggctggctttatggaacttgtagtttgaacaaggcagtggcaatccgccccctccagcctgcctggctggcccccttccctctgtctggggtcgcattccncacaagcctttcatcaacatcttaaaatagtaactgtgctcagcttgtaaa

SEQ ID NO: 73066 - DNA, 1683 bp, Homo sapiens
  misc_feature (1632)..(1632): n is a, c, g, or t
ggccacgcccccggcgggtggagtcgggcggggcgccgggcaggttcctctgcgttccgcggcggcggcagcggcggcgacggcgacatggagagcggggcctacggcgcggccaaggcgggcggctccttcgacctgcggcgcttcctgacgcagccgcaggtggtggcgcgcgccgtgtgcttggtcttcgccttgatcgtgttctcctgcatctatggtgagggctacagcaatgcccacgagtctaagcagatgtactgcgtgttcaaccgcaacgaggatgcctgccgctatggcagtgccatcggggtgctggccttcctggcctcggccttcttcttggtggtcgacgcgtatttcccccagatcagcaacgccactgaccgcaagtacctggtcattggtgacctgctcttctcagctctctggaccttcctgtggtttgttggtttctgcttcctcaccaaccagtgggcagtcaccaacccgaaggacgtgctggtgggggccgactctgtgagggcagccatcaccttcagcttcttttccatcttctcctggggtgtgctggcctccctggcctaccagcgctacaaggctggcgtggacgacttcatccagaattacgttgaccccactccggaccccaacactgcctacgcctcctacccaggtgcatctgtggacaactaccaacagccacccttcacccagaacgcggagaccaccgagggctaccagccgccccctgtgtactgagcggcggttagcgtgggaagggggacagagagggccctcccctctgccctggactttcccatgagcctctggcagagccacaccccaagtgcctgtgcccagagggcttcagtcagccgctcactcctccagggcacttttaggaaagggtttttagctagtgtttttcctcgcttttaatgacctcagccccgcctgcagtggctagaagccagcaggtgcccatgtgctactgacaagtgcctcagcttccccccggcccgggtcaggccgtgggagccgctattatctgcgttctctgccaaagactcgtgggggccatcacacctgccctgtgcagcggagccggaccaggctcttgtgtcctcactcaggtttgcttcccctgtgcccactgctgtatgatctgggggccaccaccctgtgccggtggcctctgggctgcctcccgtggtgtgagggcggggctggtgctcatggcacttcctccttgctcccacccctggcagcagggaagggctttgcctgacaacacccagctttatgtaaatattctgcagttgttacttaggaagcctggggagggcaggggtgccccatggctcccagactctgtctgtgccgagtgtattataaaatcgtgggggagatgcccggcctgggatgctgtttggagacggaataaatgttttctcattcagtctccagtcattggttgagccacagcctaggggttggaggaagactccactctgggtacacccttaggggctggctttatggaacttgtagtttgaacaaggcagtggcaatccgccccctccagcctgcctggctggcccccttccctctgtctggggtcgcattccncacaagcctttcatcaacatcttaaaatagtaactgtgctcagcttgtaaa

SEQ ID NO: 73067 - DNA, 1360 bp, Homo sapiens
ggccacgcccccggcgggtggagtcgggcggggcgccgggcaggttcctctgcgttccgcggcggcggcagcggcggcgacggcgacatggagagcggggcctacggcgcggccaaggcgggcggctccttcgacctgcggcgcttcctgacgcagccgcaggtggtggcgcgcgccgtgtgcttggtcttcgccttgatcgtgttctcctgcatctatggtgagggctacagcaatgcccacgagtctaagcagatgtactgcgtgttcaaccgcaacgaggatgcctgccgctatggcagtgccatcggggtgctggccttcctggcctcggccttcttcttggtggtcgacgcgtatttcccccagatcagcaacgccactgaccgcaagtacctggtcattggtgacctgctcttctcagctctctggaccttcctgtggtttgttggtttctgcttcctcaccaaccagtgggcagtcaccaacccgaaggacgtgctggtgggggccgactctgtgagggcagccatcaccttcagcttcttttccatcttctcctggggtgtgctggcctccctggcctaccagcgctacaaggctggcgtggacgacttcatccagaattacgttgaccccactccggaccccaacactgcctacgcctcctacccaggtgcatctgtggacaactaccaacagccacccttcacccagaacgcggagaccaccgagggctaccagccgccccctgtgtactgagcggcggttagcgtgggaagggggacagagagggccctcccctctgccctggactttcccatgagcctcctggaactgccagcccctctctttcacctgttccatcctgtgcagctgacacacagctaaggagcctcatagcctggcgggggctggcagagccacaccccaagtgcctgtgcccagagggcttcagtcagccgctcactcctccagggcacttttaggaaagggtttttagctagtgtttttcctcgcttttaatgacctcagccccgcctgcagtggctagaagccagcaggtgcccatgtgctactgacaagtgcctcagcttccccccggcccgggtcaggccgtgggagccgctattatctgcgttctctgccaaagactcgtgggggccatcacacctgccctgtgcagcggagccggaccaggctcttgtgtcctcactcaggtttgcttcccctgtgcccactgctgtatgatctgggggccaccaccctgtgccggtggcctctgggctgcctcccgtggtgtgagggcggggggggaaggttttgccatcttggggatcctcatagagatcagactcta

SEQ ID NO: 73068 - DNA, 1640 bp, Homo sapiens
  misc_feature (1589)..(1589): n is a, c, g, or t
ggccacgcccccggcgggtggagtcgggcggggcgccgggcaggttcctctgcgttccgcggcggcggcagcggcggcgacggcgacatggagagcggggcctacggcgcggccaaggcgggcggctccttcgacctgcggcgcttcctgacgcagccgcaggtggtggcgcgcgccgtgtgcttggtcttcgccttgatcgtgttctcctgcatctatggtgagggctacagcaatgcccacgagtctaagcagatgtactgcgtgttcaaccgcaacgaggatgcctgccgctatggcagtgccatcggggtgctggccttcctggcctcggccttcttcttggtggtcgacgcgtatttcccccagatcagcaacgccactgaccgcaagtacctggtcattggtgacctgctcttctcagctctctggaccttcctgtggtttgttggtttctgcttcctcaccaaccagtgggcagtcaccaacccgaaggacgtgctggtgggggccgactctgtgagggcagccatcaccttcagcttcttttccatcttctcctggggtgtgctggcctccctggcctaccagcgctacaaggctggcgtggacgacttcatccagaattacgttgaccccactccggaccccaacactgcctacgcctcctacccaggtgcatctgtggacaactaccaacagccacccttcacccagaacgcggagaccaccgagggctaccagccgccccctgtgtactgagcggcggttagcgtgggaagggggacagagagggccctcccctctgccctggactttcccatgagcctcctggaactgccagcccctctctttcacctgttccatcctgtgcagctgacacacagctaaggagcctcatagcctggcgggggctggcagagccacaccccaagtgcctgtgcccagagggcttcagtcagccgctcactcctccagggcacttttaggaaagggtttttagctagtgtttttcctcgcttttaatgacctcagccccgcctgcagtggctagaagccagcaggtgcccatgtgctactgacaagtgcctcagtttgcttcccctgtgcccactgctgtatgatctgggggccaccaccctgtgccggtggcctctgggctgcctcccgtggtgtgagggcggggctggtgctcatggcacttcctccttgctcccacccctggcagcagggaagggctttgcctgacaacacccagctttatgtaaatattctgcagttgttacttaggaagcctggggagggcaggggtgccccatggctcccagactctgtctgtgccgagtgtattataaaatcgtgggggagatgcccggcctgggatgctgtttggagacggaataaatgttttctcattcagtctccagtcattggttgagccacagcctaggggttggaggaagactccactctgggtacacccttaggggctggctttatggaacttgtagtttgaacaaggcagtggcaatccgccccctccagcctgcctggctggcccccttccctctgtctggggtcgcattccncacaagcctttcatcaacatcttaaaatagtaactgtgctcagcttgtaaa

SEQ ID NO: 73069 - DNA, 1116 bp, Homo sapiens
ggccacgcccccggcgggtggagtcgggcggggcgccgggcaggttcctctgcgttccgcggcggcggcagcggcggcgacggcgacatggagagcggggcctacggcgcggccaaggcgggcggctccttcgacctgcggcgcttcctgacgcagccgcaggtggtggcgcgcgccgtgtgcttggtcttcgccttgatcgtgttctcctgcatctatggtgagggctacagcaatgcccacgagtctaagcagatgtactgcgtgttcaaccgcaacgaggatgcctgccgctatggcagtgccatcggggtgctggccttcctggcctcggccttcttcttggtggtcgacgcgtatttcccccagatcagcaacgccactgaccgcaagtacctggtcattggtgacctgctcttctcagctctctggaccttcctgtggtttgttggtttctgcttcctcaccaaccagtgggcagtcaccaacccgaaggacgtgctggtgggggccgactctgtgagggcagccatcaccttcagcttcttttccatcttctcctggggtgtgctggcctccctggcctaccagcgctacaaggctggcgtggacgacttcatccagaattacgttgaccccactccggaccccaacactgcctacgcctcctacccaggtgcatctgtggacaactaccaacagccacccttcacccagaacgcggagaccaccgagggctaccagccgccccctgtgtactgagcggcggttagcgtgggaagggggacagagagggccctcccctctgccctggactttcccatgagcctcctggaactgccagcccctctctttcacctgttccatcctgtgcagctgacacacagctaaggagcctcatagcctggcgggggctggcagagccacaccccaagtgcctgtgcccagagggcttcagtcagccgctcactcctccagggcacttttaggaaagggtttttagctagtgtttttcctcgcttttaatgacctcagccccgcctgcagtggctagaagccagcaggtgcccatgtgctactgacaagtgcctcataagtagggcgagctcgatgatt

SEQ ID NO: 73070 - DNA, 1396 bp, Homo sapiens
  misc_feature (1345)..(1345): n is a, c, g, or t
ggccacgcccccggcgggtggagtcgggcggggcgccgggcaggttcctctgcgttccgcggcggcggcagcggcggcgacggcgacatggagagcggggcctacggcgcggccaaggcgggcggctccttcgacctgcggcgcttcctgacgcagccgcaggtggtggcgcgcgccgtgtgcttggtcttcgccttgatcgtgttctcctgcatctatggtgagggctacagcaatgcccacgagtctaagcagatgtactgcgtgttcaaccgcaacgaggatgcctgccgctatggcagtgccatcggggtgctggccttcctggcctcggccttcttcttggtggtcgacgcgtatttcccccagatcagcaacgccactgaccgcaagtacctggtcattggtgacctgctcttctcagctctctggaccttcctgtggtttgttggtttctgcttcctcaccaaccagtgggcagtcaccaacccgaaggacgtgctggtgggggccgactctgtgagggcagccatcaccttcagcttcttttccatcttctcctggggtgtgctggcctccctggcctaccagcgctacaaggctggcgtggacgacttcatccagaattacgttgaccccactccggaccccaacactgcctacgcctcctacccaggtgcatctgtggacaactaccaacagccacccttcacccagaacgcggagaccaccgagggctaccagccgccccctgtgtactgagcggcggttagcgtgggaagggggacagagagggccctcccctctgccctggactttcccatgagcctctggcagagccacaccccaagtgcctgtgcccagagggcttcagtcagccgctcactcctccagggcacttttaggaaagggtttttagctagtgtttttcctcgcttttaatgacctcagccccgcctgcagtggctagaagccagcaggtgcccatgtgctactgacaagtgcctcagcttccccccggcccgggtcaggccgtgggagccgctattatctgcgttctctgccaaagactcatggctcccagactctgtctgtgccgagtgtattataaaatcgtgggggagatgcccggcctgggatgctgtttggagacggaataaatgttttctcattcagtctccagtcattggttgagccacagcctaggggttggaggaagactccactctgggtacacccttaggggctggctttatggaacttgtagtttgaacaaggcagtggcaatccgccccctccagcctgcctggctggcccccttccctctgtctggggtcgcattccncacaagcctttcatcaacatcttaaaatagtaactgtgctcagcttgtaaa

SEQ ID NO: 73071 - DNA, 1340 bp, Homo sapiens
  misc_feature (1289)..(1289): n is a, c, g, or t
ggccacgcccccggcgggtggagtcgggcggggcgccgggcaggttcctctgcgttccgcggcggcggcagcggcggcgacggcgacatggagagcggggcctacggcgcggccaaggcgggcggctccttcgacctgcggcgcttcctgacgcagccgcaggtggtggcgcgcgccgtgtgcttggtcttcgccttgatcgtgttctcctgcatctatggtgagggctacagcaatgcccacgagtctaagcagatgtactgcgtgttcaaccgcaacgaggatgcctgccgctatggcagtgccatcggggtgctggccttcctggcctcggccttcttcttggtggtcgacgcgtatttcccccagatcagcaacgccactgaccgcaagtacctggtcattggtgacctgctcttctcagggtgtgctggcctccctggcctaccagcgctacaaggctggcgtggacgacttcatccagaattacgttgaccccactccggaccccaacactgcctacgcctcctacccaggtgcatctgtggacaactaccaacagccacccttcacccagaacgcggagaccaccgagggctaccagccgccccctgtgtactgagcggcggttagcgtgggaagggggacagagagggccctcccctctgccctggactttcccatgagcctcctggaactgccagcccctctctttcacctgttccatcctgtgcagctgacacacagctaaggagcctcatagcctggcgggggctggcagagccacaccccaagtgcctgtgcccagagggcttcagtcagccgctcactcctccagggcacttttaggaaagggtttttagctagtgtttttcctcgcttttaatgacctcagccccgcctgcagtggctagaagccagcaggtgcccatgtgctactgacaagtgcctcagcttccccccggcccgggtcaggccgtgggagccgctattatctgcgttctctgccaaagactcatggctcccagactctgtctgtgccgagtgtattataaaatcgtgggggagatgcccggcctgggatgctgtttggagacggaataaatgttttctcattcagtctccagtcattggttgagccacagcctaggggttggaggaagactccactctgggtacacccttaggggctggctttatggaacttgtagtttgaacaaggcagtggcaatccgccccctccagcctgcctggctggcccccttccctctgtctggggtcgcattccncacaagcctttcatcaacatcttaaaatagtaactgtgctcagcttgtaaa

SEQ ID NO: 73072 - DNA, 712 bp, Homo sapiens
  misc_feature (698)..(700): n is a, c, g, or t
ttaacggtaggtgcgaggctgggtgtgaatcggccgaggcggcggcgacggcgacatggagagcggggcctacggcgcggccaaggcgggcggctccttcgacctgcggcgcttcctgacgcagccgcaggtggtggcgcgcgccgtgtgcttggtcttcgccttgatcgtgttctcctgcatctatggtgagggctacagcaatgcccacgagtctaagcagatgtactgcgtgttcaaccgcaacgaggatgcctgccgctatggcagtgccatcggggtgctggccttcctggcctcggccttcttcttggtggtcgacgcgtatttcccccagatcagcaacgccactgaccgcaagtacctggtcattggtgacctgctcttctcagctctctggaccttcctgtggtttgttggtttctgcttcctcaccaaccagtgggcagtcaccaacccgaaggacgtgctggtgggggccgactctgtgagggcagccatcaccttcagcttcttttccatcttctcctggggtgtgctggcctccctggcctaccagcgctacaaggctggcgtggacgacttcatccagaattacgttgaccccactccggaccccaacactgcctacgcctcctacccaggtgcatctgtggacaactaccaacagccacccttcacccagagtgttaagatcnnntaatcaccacgc

SEQ ID NO: 73073 - DNA, 566 bp, Homo sapiens
ttaacggtaggtgcgaggctgggtgtgaatcggccgaggcggcggcgacggcgacatggagagcggggcctacggcgcggccaaggcgggcggctccttcgacctgcggcgcttcctgacgcagccgcaggtggtggcgcgcgccgtgtgcttggtcttcgccttgatcgtgttctcctgcatctatggtgagggctacagcaatgcccacgagtctaagcagatgtactgcgtgttcaaccgcaacgaggatgcctgccgctatggcagtgccatcggggtgctggccttcctggcctcggccttcttcttggtggtcgacgcgtatttcccccagatcagcaacgccactgaccgcaagtacctggtcattggtgacctgctcttctcagctctctggaccttcctgtggtttgttggtttctgcttcctcaccaaccagtgggcagtcaccaacccgaaggacgtgctggtgggggccgactctgtgagggcagccatcaccttcagcttcttttccatcttctcctggactccgaagcagtggacgggatcctcaaagtacc

SEQ ID NO: 73074 - DNA, 564 bp, Homo sapiens
atctcttgaagcttcacttcaacttcactacttctgtagtctcatcttgagtaaaagagaacccagccaactatgaagttccttgtctttgccttcatcttggctctcatggtttccatgattggagctgattcatctgaagagaaatttttgcgtagaattggaagattcggttatgggtatggcccttatcagccagttccagaacaaccactatacccacaaccataccaaccacaataccaacaatataccttttaatatcatcagtaactgcaggacatgattattgaggcttgattggcaaatacgacttctacatccatattctcatctttcataccatatcacactactaccactttttgaagaatcatcaaagagcaatgcaaatgaaaaacactataatttactgtatactctttgtttcaggatacttgccttttcaattgtcacttgatgatataattgcaatttaaactgttaagctgtgttcagtactgtttctgaataatagaaatcacttctctaaaagcaataaatttcaagcacatttttacatgt

SEQ ID NO: 73075 - DNA, 530 bp, Homo sapiens
atctcttgaagcttcacttcaacttcactacttctgtagtctcatcttgagtaaaagagaacccagccaactatgaagttccttgtctttgccttcatcttggctctcatggtttccatgattgctgattcatctgaagagaaatttttgcgtagaattggaagattcggttatgggtatggcccttatcagccagttccagaacaaccactatacccacaaccataccaaccacaataccaacaatataccttttaatatcatcagtaactgcaggacatgattattgaggcttgattggcaaatacgacttctacatccatattctcatctttcataccatatcacactactaccactttttgaagaatcatcaaagagcaatgcaaatgaaaaacactataatttactgtatactctttgtttcaggatacttgccttttcaattgtcacttgatgatataattgcaatttaaaacctgtaaaaccctgtggtcaaaaaacggggattttgaaaataaattaaaaaa

SEQ ID NO: 73076 - DNA, 321 bp, Homo sapiens
agcgcagctagctgcgagaattaatgtgaattgcaggacatgattattgaggcttgattggcaaatacgacttctacatccatattctcatctttcataccatatcacactactaccactttttgaagaatcatcaaagagcaatgcaaatgaaaaacactataatttactgtatactctttgtttcaggatacttgccttttcaattgtcacttgatgatataattgcaatttaaactgttaagctgtgttcagtactgtttctgaataatagaaatcacttctctaaaagcaataaatttcaagcacatttttacatgt

SEQ ID NO: 73077 - DNA, 561 bp, Homo sapiens
atctcttgaagcttcacttcaacttcactacttctgtagtctcatcttgagtaaaagagaacccagccaactatgaagttccttgtctttgccttcatcttggctctcatggtttccatgattgctgattcatctgaagagaaatttttgcgtagaattggaagattcggttatgggtatggcccttatcagccagttccagaacaaccactatacccacaaccataccaaccacaataccaacaatataccttttaatatcatcagtaactgcaggacatgattattgaggcttgattggcaaatacgacttctacatccatattctcatctttcataccatatcacactactaccactttttgaagaatcatcaaagagcaatgcaaatgaaaaacactataatttactgtatactctttgtttcaggatacttgccttttcaattgtcacttgatgatataattgcaatttaaactgttaagctgtgttcagtactgtttctgaataatagaaatcacttctctaaaagcaataaatttcaagcacatttttacatgt

SEQ ID NO: 73078 - DNA, 534 bp, Homo sapiens
atctcttgaagcttcacttcaacttcactacttctgtagtctcatcttgagtaaaagagaacccagccaactatgaagttccttgtctttgccttcatcttggctctcatggtttccatgattggagctgattcatctgaagagtatgggtatggcccttatcagccagttccagaacaaccactatacccacaaccataccaaccacaataccaacaatataccttttaatatcatcagtaactgcaggacatgattattgaggcttgattggcaaatacgacttctacatccatattctcatctttcataccatatcacactactaccactttttgaagaatcatcaaagagcaatgcaaatgaaaaacactataatttactgtatactctttgtttcaggatacttgccttttcaattgtcacttgatgatataattgcaatttaaactgttaagctgtgttcagtactgtttctgaataatagaaatcacttctctaaaagcaataaatttcaagcacatttttacatgt

SEQ ID NO: 73079 - DNA, 528 bp, Homo sapiens
  misc_feature (1)..(3): n is a, c, g, or t
nnnttaccgatggcactgtcaccaaacctatgcactaaaaagttccttgtctttgccttcatcttggctctcatggtttccatgattggagctgattcataagaagagaaatttttgcgtagaattggaagattcggttatgggtatggcccttatcagccagttccagaacaaccactatacccacaaccataccaaccacaataccaacaatataccttttaatatcatcagtaactgcaggacatgattattgaggcttgattggcaaatacgacttctacatccatattctcatctttcataccatatcacactactaccactttttgaagaatcatcaaagagcaatgcaaatgaaaaacactataatttactgtatactctttgtttcaggatacttgccttttcaattgtcacttgatgatataattgcaatttaaactgttaagctgtgttcagtactgtttctgaataatagaaatcacttctctaaaagcaataaatttcaagcacatttttacatgt

SEQ ID NO: 73080 - DNA, 394 bp, Homo sapiens
aaagcagtagtgttctgctcaatgacttagctaaatatgccaagctgcgcacgtggctattgaatgtttgtgcaccctggtattaaaccctctgttctgttccttttcttgtatgggaaaagcaagagaatacattatttgataaagacctcctgtggcttgtttcagtacgtgggacgtgtgtgtttaagagagggaaagcactgctactagcagtgacactggccatacagattttgtttctgtgagccccagggaaagtgcagtagtgatgatgataatgggcctgagctagttcttgtctcaaagggctccatttcctgccggttcaggtggtagattattattaatccatcccaaaggaaagcagctttcccaactcaattacatatca

SEQ ID NO: 73081 - DNA, 353 bp, Homo sapiens
atatcttgctgtaagtcttctagctatatttttgtatttgggtttatatatttttccatttgcatgtcaaactcttaatcatctttcatttcaatcataattactgggttccttactttttcagtttctatatcataacaaaaatttccatcatctgtgttagaaacaagctgtgtgtctggtttgttatcatttttatagtctgatttattttaatttaaatgaagcttagaagatgactggtaagtgtatttcagggacctggagtgtgaatggaataaaaagatatttgacatgggcttcctctgttcaggcgctgcctggactgccacagagctagaccctccagatac

SEQ ID NO: 73082 - DNA, 458 bp, Homo sapiens
ggcggggcggagaagcggctaaaataagcagccagggattaggaaaaggaaggaactgtttgctgggatcagttaagtctgctccttgtctgcccataaattctgtaccgtgagaaacattttcacttttcaaagagaagtgccccacttgaacataactaccaagaatcaaaggctgggagtgctttccctcccttccatccattttctctgtatttactttattatctcatgtgtgtggcggggagggggggaggctataggattcttataatggccctttgggcatcagcacctgctatgaagaacaaggctcttaggtctttcaaagagagaggctaggagagtaaggagaagaagggaagctactactgtcccaattctgttctaaattgtctgagaaaattagcatgtctatgttaaagcaatactattaaaaatgaatttttaaccattca

SEQ ID NO: 73083 - DNA, 503 bp, Homo sapiens
aggtagagaaagcagggctcagaactgtgtagtaatttcccaaagttcacagctttgtaggctggcagatagtgctaagcactggtctgcatgctgggacagggagaagcagcagttgttgtagtcatagtaacagtgatgatagcagtagctaccaggcagtgagtcctccatgtgtgaggacccttcctatatgtcatatggtttaatccctgtgacagccctgcaaaggccatgatcctcattttacagaacaggaagcagcctctaagagattaattatttgtccagtcacacagcttttcagcaaagagctgatattcaacccaattccatctgatcctaactttctgctctaaagtcaacttgttcgtcaggattagcgatagttccctgatcacaagaacaaagtctgaggcatggtagaagtaatcttttttttcctaatgttgaatatacagctgcctcctgacattcctattgagccagaatacagaatgttt

SEQ ID NO: 73084 - DNA, 387 bp, Homo sapiens
tatctataaaacaattgtttaaaaatattgaggttagctcttcccctttgctaatgcaataagcacattatttgcaaagggaagcattaattatactactattgtatgcagtattaaatgaattgtcaatgtcacgatcaaaataaacccttgaagaactggctgttgttcccataccttcatgagaattgtaaacactcatgtaaaatagaaaccattatttaccactttgcagtgaaatggatcatgtgttctgacacctgtaccctgagttgagtgggaaacagggactgtttgatgaattaaaggtaactttattcctgtataccactaggggtgcaagtgaggggactgtagacaattagtactttagatatttgttggagt

SEQ ID NO: 73085 - DNA, 547 bp, Homo sapiens
ggccgggctgtttagcagctggtctcactgcttaggttcctacagcctagctgttacagcgtccttgctacagaaagagatcgttgtctgaccagagacaaaacttacttctgtctggtagcagagtacctacatttggctttccagatctcacctcagttccagattcctctacattaaaatcttcgcctgggttacatcttctctcaggattgaatatcaacactattgaagacacctcatgtgacatcacaaacagctttcttggactctccaggtactccaatttggactgtatcttggtactttagacttgtgaatttgaattcaactgtctgagtgagactccaagatgggaacaggatttgtggttcaactgtgttatcctactctggaagaaatttatgaagttattgatggatcgcccccactaaattgttatcaaaaatttccaaatccttattttttaagtctgtttttgacattatttaatcatcaagggaagacttttaagtgttatgcattaataaaggacattgtgaaatat

SEQ ID NO: 73086 - DNA, 659 bp, Homo sapiens
ggccgggctgtttagcagctggtctcactgcttaggttcctacagcctagctgttacagcgtccttgctacagaaagagatcgttgtctgaccagagacaaaacttacttctgtctggtagcagagtacctacatttggctttccagatctcacctcagttccagattcctctacattaaaatcttcgcctgggttacatcttctctcaggattgaatatcaacactattgaagacacctcatgtgacatcacaaacagctttcttggactctccagggaggtggagcaagatggctgaatagaagcctccagcaattgtcccccactcacaggaacaccaaattgaacaactatccacacacaaaaaaaagcaccttcatacaaagaaaaatcaggcctggaacagatcagcctccctgcaggaatcaactgagaaagaattaatgacactttcgaaagctttaaattccaatgagaaattgaagccctgggaatatctgcctcaacattttatagggtgtatgcctgcagtcagtgagaagcacgaggatattccgttccttgtaagtgtaaagtatgataaaacattaatcttaaatctcttacatagtaacaaaacaagacctacactaaaatatttggcattctgtggcacagc

SEQ ID NO: 73087 - DNA, 246 bp, Homo sapiens
tgattctggtactttgggaggctgagtggggaggattgcttgagcccaggagttgaggaccagcctgagcaacatagcaagaccccatctctacaaaaaatttttggaagtagccaggcgcagtggcatgtgcctgaagtcccagctactcaggaggctgaggcaggcgaactgcttgcacccagaagctgaaagctgcagtgggctgtgatcacacaactgcaccatagcctgtgtgacagaatg

SEQ ID NO: 73088 - DNA, 436 bp, Homo sapiens
  misc_feature (292)..(292): n is a, c, g, or t
atctttgaattgctgttatcccatataggcctatgagagagttgccagacttaaataattatttatatgcttaatttcttttaacacatagaataattctttaaaaaattgttttctctgtaaactgtaactgaaacccatgctgccctggaaagcaatgttacaaactgctgtaccctctgcctgaagacaagtttttatttctttatcctaatacccaacaacaattagtatcactttaaaagataaaatagaggccaccgcacctggcctcctatctctcttataagtngacttttcttcttgcttctttgaaacagaaactttttgtaaataaataaagtgtataaaggtgagccatattgggaagaaggggctgatagaggagttagaacaaccaggtaaccagatttttttttcctattcttttgaggaa

SEQ ID NO: 73089 - DNA, 945 bp, Homo sapiens
tttggtgttttaaaacaaatcacagatatcttaacgttccaaatacatcagtatgcatctgaaaagtaagaaacttttcagatagctaaacaacatcgcaataataaagttagtaatactttcttaatattatctaatagccaacattcaaatttcttcatttttactaaaatattcttcacaattggtaaagaattcactccaggactatatatctggttttaattccttcagtctcttttaatctggaacagtccttttttctttatgacactaacttgctaaagaagagactatagaatagtcatgagtagacttttctggaactaattagaagagacttacttatcatttactgtctttgttgttttcatctttttttttttttaatttaaaaaaacaaaacaaaactgggcacaaggtatcaccatgttacccaggctggtctcgaactcctgggctcaagtgatcctcctgcctcggcctctcaagttttcatctttttaggtcaaaggttgtaatacaatttgacagtaaaatgtatattttattggtagattagcaaagtttataatttgtcttggggacagaattactcaaggattgatttttctttttttttttaatgtcttgaaagattgattcagtgttgctttggccaaaatcaccttacctatatagaaagaaaattcattgggttgcaaaaagaccccaacatgtagcatcacaaataacatgtaatattagatgggttggcctatccctggtgtgtaatgagtaactcgcccctccataggagcagttgccaactttagcatctgctgccttgccagaggctgtgagggctttggccctgccacagtgcggccatttatcaccatagccgagaaggacatttgcagctggcttagattaatggctctcccaacgtccttccccaccctg

SEQ ID NO: 73090 - DNA, 1964 bp, Homo sapiens
cggaagcacactgcaacatgccaaaaaacaaacttctaggtctctttaatacaggaagctgaatagatccagaggggtaagagcaggtttgaaaatttacattttggtgtgttctttgattttatttatttatttttctggattaagctaacatatttctgttttcagagcccaaatcaaaagttggttttttggcatgttgcatgtgggttgggaaagaaatttgtccgtgtcggaacccagttataccgatggttcttcatatgtttaaaactttttttttcttttatcattggatttgtggaagtggaaagttgcagggagctttgcagtgtaaatggtattgtttttcccccagagagtttgaacggcccgtatcggtttcagccctgctgttcctgggtggatccctcttacttttccaggtgcggtgggtgggagcctcattctcctgctagatgtagtctcccttctttggcttataaaagaaaacaaatggaaccatgttaactgaattgccatctccttcttccttctaaactacctttgatagcaaagatttgtggaggtgtttgttaaatctgcaaatacgataacgtttggtttatgtgtttaaagggataaggaaattctaatcatgctttttatttcacctgagtaaagtggcaacatacctgaaaatattttcagctttttgcactctgaaagggccaagggtggaataaaattaggtttagaaaaaccatttatacaaagtttagtgtttaaaatacatttcagaaaacaagggagatttttatttttaaaccaacctgaaagttgttttttggagttgaatttattgtttagttaatttaccatgaaatctgaaatctcttagagctgaaggcccatgactgtgctttcatatcttatatttaatcttaagatttgttttgtttttgcaaatacattcttgcaaaagtacggattctagataattatatagccaactcatcagtagctgaaaaactagggtattctcttctctttttgaaaatgtgaatccgcctgaaaattatagatgctgtcctaattgtaacaagatgggctttagtgtgtaagctgctcattagctttaaactggtatggatctttaataatctgatttcgttctcccctcacccccctgccacaaatttttttaagactagacttccttgaatttcttttctagaatgagggtatttcttgaaagacgatttcatccttgtgaagttgtggcttcaggaggaaacagaactttgttcctccttcaaatacaacctaggcaaaggctgcaggaaatttttgatgtctgaatctcataattataacaagtacagttaaaagaaagaaaaaatacaatgtgtataggctgttgaactgtagttcttgtttaatattttccaaattttctttcaaatgttctctctgccttgactccagcctggggaggtttcttggatctttagagtgttggtcatgttgcttccagagtgtctgtttcccactcaacctttagggggagggatgagggaatctgaaggaggagtacaaaggcagtttgaaaataggttctggatgactgagtggtggtgatttgggtctagctttaaatagtgggctttgtgtagctgaagtgagcatcctagttaacctagtgtccaggactatttccacgaactaagggttgttttgactggtgtgtagtacagagcctttggggtgataagatggaagatttgtcttttacctcacctccactggttctttcaggaattataagggatgcagataagtaaatcttttattttttaaattttttgttttgctcattgtcttggttttggggtaaaaaatgatgataggtaagtatgagctgttcagatatttctttccttgtttgcctcctatgtacggttggtttctttgttatgtgagta

SEQ ID NO: 73091 - DNA, 627 bp, Homo sapiens
tctccggggtccgccgaagctgccctgcaggagaccatgggctgcggcggggacttccgggtgtctgagaaagggaagcagaaagactgggaggccagggtcgcatccccctcgcattcagccgacccggctggcccccgcccgaagttgctggagccggagttggaagagggtcatttgcatgtgctaggagctgtcttccctgttcagaatgaaattggttaggacagagaaccgtgtctgagctaaccaagtggaacagaattccctatggtcaaattaagtgatctctttatttcgccatcctgattgaataatcttatcattttaaatagagaaggtctccaaggaatgtaaataatatgaatgcccacggatttgtatttactgagcgtctccttctccttctcttggcatataaaacacagcaaggagcggcaaggttagctcaaatgttaacgctatcaattttcttctgttaaatgccctgggggaggaaaaaagaaaagaaagaaagaaaaggaagagaaaaaaataaaatggaattgtgtgtatgtgtttgtttgtggggaggaatcgtagaccccagtcacataacagaaattttctccgagttgcctgattttc

SEQ ID NO: 73092 - DNA, 99 bp, Homo sapiens
ctccttggttgggatggatttattcaggagcagtttttgagcaacttgccatgggcaagaagaagatcgccaagagatcaagataaaatctttgtgaaa

SEQ ID NO: 73093 - DNA, 270 bp, Homo sapiens
attttgctttgtttttttaagaagactcttctggcactttccttggctgtgataaagagttttgatatcccctaatgccagtgggtttctgggaacttgaatgagataatatatcggcagtgcctagcacagtgcctggcatctactcataggatgcacccaataaatgctagttactgttcttgtatgaagtgtaaataaaatactttattagtgttttacaaaagagattgtaaatagagaagagcagaaggccatagcctgagacca

SEQ ID NO: 73094 - DNA, 526 bp, Homo sapiens
ggtctgaatgtgaatgttgcactttgagaggaaatagtatagaagtagttacattgctgggtgactgatctagcaagtccctaacagtgccattaagctgtcctgtagtacatcttatttagttctctcaataactacatagtatgttgtcagtcctattttatagatgagaaaaccaagggaacaatttgatagaataatgtttccaaaatcagagatctaatcttagaaggcttagttgaataacattggatatattactctgcggttcctaagtctatgaattaatgggaattttgaaatctaattgaaatccaaggagaaagtgatagaaataaaattgtagtgagcgatgtcggctcactgcaacctccacctcccaggtttaagcgattctcctgccttggccttccgagcagctaggattacaggcatgcaccaccacgcccagctaatttttatatttttatagagacggggttttaccatgttggccaggctgatctcgaactcctgacctgaagtg

SEQ ID NO: 73095 - DNA, 467 bp, Homo sapiens
gaactgcccttctcctgtgctgggccatgaccacggagaacaggtccactgtcttccctgcgtggtacacaggggaggctcagactccatcctcaaggatgacaagaagacaggccaagacatgagcctcaggatacaggtgatgggtgtggagcccacaggactgcagcctcacactgcagggctggaggcacagactgagtatttactattctatggcctggggggctcaaggcatagagctccttattagccgaagtcgcccaagttccccaacctctaaagatttcctcataatcatgcaagaagaagaagggaaaagtgagtgtccatagaagttttggggctcttcctctaatcaggagagagcttgtgtaaaattcttcgcctctttcttttctttttcaagatccaagtgctttaattttcatattttattatgggaaaatataccacgtataaatcct

SEQ ID NO: 73096 - DNA, 398 bp, Homo sapiens
gtggtgcatcacattgaggttctaatcttgaactagctttgcattcctggaataaattacacttatctgtgttgtaaaattctttttatatgttgctgaattttattcactaatattttgttaagaatgtttacatttggccgggtgcggtggctcacgcctgtaatcccagcactttgggaggctgagatgggtggatcacctgaggtcgggagtttgagacccacctgaccaacactgagaaaccccgtctctactaaaaatacaaaattagccaggtgtggtggcgcatgcctgtaatcctagctacttgggaagctgaggcaggagaattgcttgaacctgggaggtggaggttgcggtgagcccaggtggcgccattgcactccagcttgggc

SEQ ID NO: 73097 - DNA, 423 bp, Homo sapiens
cttcatactagaactgtctgccatctttatttctttgttttcaggaaaattggagagaaaagtatttcttttttaaaaatgattattatactttaagttctgggatacatgtgcagaacgtgcacgtttgttacataagtatacacgtgccatggtggtttgctgcacccatcaacccgtcatctacattaggtatttctcctaatgctatccctcccctagccccccaccctccaacaggctccagtgtgtgatgttcccctccctgtgtccatgtgttctcattgttcaactcccacttatgagtgaggacatgcagtgtttgattttctgttcctgtgttactttgccgagaatgatggcttccagattcatccatgtccttgcaaaggacatgaactcatcctttttatggctgcatag

SEQ ID NO: 73098 - DNA, 447 bp, Homo sapiens
gcctcacagctgcagcctggccgacattccacagaatacaggatgccttccagttccagagatgttagaagataaacaagtgtgtttaggagttgatggaattgatcccatcaacgttcattcattcattaattcattcttgcagtagaatgaaaactatgtacacttaaatatttttacttattttcaccaaagttatatatatatgtgcacagttaaagcaatagtttctcattaccgattaaaagcaaaacagcagttctctgccatagccgttccttcttcccagttttgaactccccataaccactttcaactgtgaactctttctttctggcttttaattccctttttttttttttttttgagacagaatttccctcttgttgcccaggctggagtgcaatggcacgatctcggctcaccacaacctctgcctcccaggtt

SEQ ID NO: 73099 - DNA, 620 bp, Homo sapiens
  misc_feature (491)..(491): n is a, c, g, or t
ggcaggtgctcgcttggtctagtgcccatttactctggactccggatggctgccgcacgcctctgcctctccctgctgctcctgtccacctgcgtggctctgttactacagccactgctgggtgcccagggagccccactggagccagtgtacccaggggacaatgccacaccagagcagatggcccagtatgcagctgatctccgtagatacatcaacatgctgaccaggcctaggtatgggaaaagacacaaagaggacacgctggccttctcggagtgggggtccccgcatgctgctgtccccagggagctcagcccgctggacttataatgccaccttctgtctcctacgactccatgagcagcgccagcccagctctcccctctgcacccttggctctggccaaagcttgctccctgctcccacacaggctcaataaagcaagtcaaagccaaaaaaaaaaaaaaacaaaaacaaaaaacaacaanaaacaaaaaaacacaaaaacagaaacaaaaaagggggggcgccacacaaaaatcccccaggggccacaggcgcgcaggcgccagcggatatggttgcgccacggggcgccacaacggggcgcgaatcac

SEQ ID NO: 73100 - DNA, 909 bp, Homo sapiens
ggcaggtgctcgcttggtctagtgcccatttactctggactccggatggctgccgcacgcctctgcctctccctgctgctcctgtccacctgcgtggctctgttactacagccactgctgggtgcccagggagccccactggagccagtgtacccaggggacaatgccacaccagagcagatggcccagtatgcagctgatctccgtagatacatcaacatgctgaccaggcctaggcctagaccaatgtgccctgggcaagatggtgcctacaggcagatatgaaacaggtgggctggcacctgggcacagtgcttgcccctgctgcctcttccctcccaggtatgggaaaagacacaaagaggacacgctggccttctcggagtgggggtccccgcatgctgctgtccccagggagctcagcccgctggacttataatgccaccttctgtctcctacgactccatgagcagcgccagcccagctctcccctctgcacccttggctctggccaaagcttgctccctgctcccacacaggctcaataaagcaagtcaaagccaaaaaaaaatgtgaacagcaacgtaagaaccggagggagaagggaacgtctcagagggactcctggggtctaagtagcaccaaaggaactacaaggaggggcccgcacggccagaaaaataattcccatccgggaggggcgccaagaatatagttaccacacagctcccagatttggaaggggacaacaagcctcccaccagaggggagacgtgaaacaacggccgggagggcgtgggtccccaataaaacaccacgaagacacgcagggacatgcacggtgcacgccaaaggacaggaaaaagccaccaacgtgcgcggggggcaggacggcaggacacaatcacg

SEQ ID NO: 73101 - DNA, 620 bp, Homo sapiens
  misc_feature (37)..(37): n is a, c, g, or t
  misc_feature (491)..(491): n is a, c, g, or t
cgggggccgctcggcagcgggttggtttttcccaganccttcggttagactagcgctcttcctggcctctccctgctgctcctgtccacctgcgtggctctgttactacagccactgctgggtgcccagggagccccactggagccagtgtacccaggggacaatgccacaccagagcagatggcccagtatgcagctgatctccgtagatacatcaacatgctgaccaggcctaggtatgggaaaagacacaaagaggacacgctggccttctcggagtgggggtccccgcatgctgctgtccccagggagctcagcccgctggacttataatgccaccttctgtctcctacgactccatgagcagcgccagcccagctctcccctctgcacccttggctctggccaaagcttgctccctgctcccacacaggctcaataaagcaagtcaaagccaaaaaaaaaaaaaaacaaaaacaaaaaacaacaanaaacaaaaaaacacaaaaacagaaacaaaaaagggggggcgccacacaaaaatcccccaggggccacaggcgcgcaggcgccagcggatatggttgcgccacggggcgccacaacggggcgcgaatcac

SEQ ID NO: 73102 - DNA, 650 bp, Homo sapiens
  misc_feature (521)..(521): n is a, c, g, or t
ggcaggtgctcgcttggtctagtgcccatttactctggactccggatggctgccgcacgcctctgcctctccctgctgctcctgtccacctgcgtggctctgttactacagccactgctgggtgcccagggagccccactggagccagtgtacccaggggacaatgccacaccagagcagatggcccagtatgcagctgatctccgtagatacatcaacatgctgaccaggcctagtgcttgcccctgctgcctcttccctcccaggtatgggaaaagacacaaagaggacacgctggccttctcggagtgggggtccccgcatgctgctgtccccagggagctcagcccgctggacttataatgccaccttctgtctcctacgactccatgagcagcgccagcccagctctcccctctgcacccttggctctggccaaagcttgctccctgctcccacacaggctcaataaagcaagtcaaagccaaaaaaaaaaaaaaacaaaaacaaaaaacaacaanaaacaaaaaaacacaaaaacagaaacaaaaaagggggggcgccacacaaaaatcccccaggggccacaggcgcgcaggcgccagcggatatggttgcgccacggggcgccacaacggggcgcgaatcac

SEQ ID NO: 73103 - DNA, 575 bp, Homo sapiens
tcttgtgaaggtgagcccaaaagggtaggttagatcagacaaaaaagtattttttaatgttttgcttagaactttaaacttgaagaaacagtggagccctttgtaaaggttttaaaactagagctttatttcaagaaaatagctagtgataattgtgaaggctaggcttttgaggataggtgattgactataggactgttacagtgatcctgtgctgtaaggaagaacttaatgaaggccgaggcattagaaataaaagaaaggcatcaaactcaagtagtgttacagagttaaaatcagtttgtaagacttggcttaggatgggaaggaaaatggttgaatgttgtggctgtctgggaggatgagtagtgccacttaacgaagatagaaataggttcgatttataaaacaaaggaaatatttagaaaatttgtcaaaatataaggaaaaaagtaagttactatccactatttgtgtatctcatcaggtgtgttcagtttatttattgtagcaaaatatacataaataaaatttaccatttaaacaattttaaattgtacagtttagtggtagta

SEQ ID NO: 73104 - DNA, 246 bp, Homo sapiens
cccaaacaataaaaggttcagcctggctcctaattaggccaaatgaatggttatggtcttgagtctctacagacttgtgctgcccatttgcagatgaaacctccctgttgaatgagcagtgctgctctttaagggcacacgcattgctaaaaggcgcatctcatttgcaataatcaacaactggaaaggccctaattgtccagcaacaggaaaagggtagaaggtagatgttctaggaccactagt

SEQ ID NO: 73105 - DNA, 481 bp, Homo sapiens
tgagaacggagccaaaccagggtgttcaatcgcagaggttaaagtgattctttcactgagataatctaaatctagatcatattgaatctgccttctctctggcacggaaacattttccaaggtattcacgttggaagtatgaattacccacactctctttaaagccccatccaattaaaagtagatgaaaatctccttaatgcagagtcctttagaacatgccaggggtagcagggagggatgagagatatatatttataggaaatctgatagaagataccaccatgcaacctgagggtgagtctgagaagatatttactcatgacttgtatttcttttaaaaacaattacttttgatatgtatctaaagtatcttctctgtcatttaggataaaaacagattaggcttttactcaggaatgaattagaagccctggcattctaggcagctacagagtttgtatccgcttgcagaaaattt

SEQ ID NO: 73106 - DNA, 142 bp, Homo sapiens
acctaagagtacatcactattctgctcaaaacttttaatgggttcctactgtgcttagaaaaaaactcgagtcctcacaaagccagcctaccgggcccctcctaacccgactcctctatactcatacctcatctcccccatt

SEQ ID NO: 73107 - DNA, 677 bp, Homo sapiens
agatccccttatccaggccacctttggaaaccagcccacctgctacaccaaccttttcccaacaccgtggtcccacccctaccttcgctgctgaaaaaccgcattgtgtgggggtctggaatcttctggactcctgggaccccaatccgcttgcctcttgtacccctcttgcagagcaatgagccgatggggtgccaggcattagaaaccttccctccaatcctcaccatgtctccattttgccaaagaagaaactgaggttaaggtcgcgatgctctggccagcatcacaggtaaacgattttggcagtgcccggagaaagatagaagggcctctctctgagatcgggtcctcctcctgcagggcagcagagtggaagccagggcctgggaccctctggctgggcaaggagggactggagtccggctcccggtgaccccgtccccagtgccagcggtggggtcgcctgtggcggcccggacaggccacgggtccctctccccaagtcccattacgttgtatttatgtttcattttatagtttttttttcctcctcccttattattgtttcactctgggggaggcaaaggatataatatattcatctttattataccaaatctgtgtgaagcatttaataaaacgctgtttccacacagccagggataaaaaaaaaa

SEQ ID NO: 73108 - DNA, 606 bp, Homo sapiens
agatccccttatccaggccacctttggaaaccagcccacctgctacaccaaccttttcccaacaccgtggtcccacccctaccttcgctgctgaaaaaccgcattgtgtgggggtctggaatcttctggactcctgggaccccaatccgcttgcctcttgtacccctcttgcagagcaatgagccgatggggtgccaggcattagaaaccttccctccaatcctcaccatgtctccattttgccaaagaagaaactgaggttaaggtcgcgatgctctggccagcatcacaggttcctgtgcgcccaaacttgtgccgggcaccaagacgagaataagacagcagggcagaagttgtggagaagctgaattgtctctctgcaaggaaaaatttcctgacacaagtatctgtccagagaggaagattcaactgcaagagctttcagcaggcaatggtgtccaactagaatcgaaacacattgttattgttttacttatttttataattactttttattttggcaagtaacgggtggtttcgcagttactgtagtgctagaaggcttttttaaaaaaacaataaacatacttgagtaagaaatagtaa

SEQ ID NO: 73109 - DNA, 930 bp, Homo sapiens
agatccccttatccaggccacctttggaaaccagcccacctgctacaccaaccttttcccaacaccgtggtcccacccctaccttcgctgctgaaaaaccgcattgtgtgggggtctggaatcttctggactcctgggaccccaatccgcttgcctcttgtacccctcttgcagagcaatgagccgatggggtgccaggcattagaaaccttccctccaatcctcaccatgtctccattttgccaaagaagaaactgaggttaaggtcgcgatgctctggccagcatcacaggtaaacgattttggcagtgcccggagaaagatagaagtaagacctaaagaggaactttccgcatgttatgggagagcccctggggcgaggaggcgagggcagccttccccaggccaagggagcagccatcgctcttggatctgtttttcctcaagcgtctgtcctgtggggcctagtccccaagcggcagtcctggacctaacgggagaaggggctgggggaagagggcgcacccccagcccgggacccacagcagccctagccagtcccccactctctccctctgtaggggcctctctctgagatcgggtcctcctcctgcagggcagcagagtggaagccagggcctgggaccctctggctgggcaaggagggactggagtccggctcccggtgaccccgtccccagtgccagcggtggggtcgcctgtggcggcccggacaggccacgggtccctctccccaagtcccattacgttgtatttatgtttcattttatagtttttttttcctcctcccttattattgtttcactctgggggaggcaaaggatataatatattcatctttattataccaaatctgtgtgaagcatttaataaaacgctgtttccacacagccagggataaaaaaaaaa

SEQ ID NO: 73110 - DNA, 884 bp, Homo sapiens
attttagtgaattttcagaaattatagtggaatggatgctcatatattgcttatggatattttggataccaaagtaggaataactgacattcagtattttaaagctggcaaacctgtacatagaaaatagatccccagacagtggtctatgaagagggcagttaagtatcaaatacttaattttcttgcctttttttcttaagtggggaaaagtttctagatctcttacacctctgacacaatctgttctaaaacaggcacttgtaatgttggggcctccttgtaaacgtgtttttgccctttactctctgggagttctttaaaggtgaaatcatcttacaaagaaattgggggagggtcttggcaaaggactttcccctcctctttcctggcctgggaaccttatactgacaatcaatactttatattttaaagtatataatttatagttaacttctagtgtaatatattaggaaacactagaatggaaaggccattggaagacaggttgtatcttttttagaccatatttccttgtttaaaaactatcatttgaatacttttttggtgaagaactccatgttttcaagttaaaggtcacctcgtaggccaggcgcagtggctcatgcctgtaatcccagcactctgggaggctgaggcgggtgaatcacaaggttaggagtttgagaccagcctggccaatatggtgaaaccccgtccctactaaaaatacaaaatttagccaggcgtggtggcatgcacctgtagtcccacctactcgggaggctgaggcaggagaatcacttgaacctgagagacagaggttgcagtgagccgagatcacgccactgcactccagcctgggggacagagtgagattctgt

SEQ ID NO: 73111 - DNA, 536 bp, Homo sapiens
atttattcaaattatagaatattatacagcactgaaaaataagcaaattgtagccagatggtgtaacttaagtcaatctcagaaatatgttagattaaaaaaaagcaatatgcagacaaacataaagtatgacactgtataaattcaaacgcaaaaaagctcaacaatatggtttaggaatatgcacatacatttgtggacaaagctattatggaaagcaaaggaattgaaacaccaaaataaaataagtcgtcgtttttggaagggtggcaggagaagaggatgtaatgaggaaagggctcaaaggacttcaaagataatgttccattttgtaggctgggtggtggccacatggatgtttactttcttcttttttattttttttcttttagacaggatcttgctctgttgtccaggctgaggtgcagtggtacaatcatagctcactgcagtctcaacctcctgggctcaagcagtcctcctgccttgacctcccagagtgctgggattacaagcgtgagccaccttgcctagtc

SEQ ID NO: 73112 - DNA, 596 bp, Homo sapiens
cggcacgagcgcgcgtccaccggctccccggctcgcgccgctccatgtagccccggctccccgggcggccgcggaggagggggcgaccacaagatggcggacctctcgctgcttcaggaggacctgcaggaggacgcagacggatttggtgtggatgactacagctcagagtctgatgtgattattataccttcagccctggactttgtctcacaagatgaaatgttgacgcccctggggagattggacaagtatgctgcaagtgagaacatatttaacaggtatgtgcatattctttttgttaaagtggaagtggaagggtggttttattaacttcagtagggaaaatgaaagtatccactttaaaggaggtattattaacaggcacaatctgagtcaccaagttttattcataatcacagcatgagcagttttgtacttgtttattctttgatcctagtaagcatacaacatgctttctttgcaaaaaaaaaaattaccattaattaccattgcttttctgccactggacataattttggtattcatataaattgcttattgggaagtacattattccttcaacacatgatgtt

SEQ ID NO: 73113 - DNA, 3840 bp, Homo sapiens
cggcacgagcgcgcgtccaccggctccccggctcgcgccgctccatgtagccccggctccccgggcggccgcggaggagggggcgaccacaagatggcggacctctcgctgcttcaggaggacctgcaggaggacgcagacggatccctggactttgtctcacaagatgaaatgttgacgcccctggggagattggacaagtatgctgcaagtgagaacatatttaacagacaaatggtggcccggagtttgctcgataccttgagggaagtctgcgatgatgaaagagattgtattgctgttttggaaagaattagcagattggccgatgattcagaaccaactgtgagagcggagctgatggaacaggtgcctcacatcgcactgttttgtcaagaaaaccggccttcaataccatatgctttttcaaaattcttactacctattgtggttagataccttgcagatcagaataatcaggtgaggaaaacaagtcaggcagctttgctggctctgttggagcaggagctcattgaacgatttgatgtggagaccaaagtgtgccctgtcctcatagagctgacagccccagatagcaatgatgatgtgaaaacagaagctgtggctataatgtgcaaaatggctcccatggttgggaaggatattacagagcgtcttatcctccctaggttttgtgagatgtgctgcgattgcagaatgtttcacgttcgaaaggtctgtgctgccaattttggagatatttgcagtgtagttggccagcaagctactgaagaaatgttgctgcccagatttttccagctttgttctgataatgtatggggagtccgaaaggcttgtgctgaatgcttcatggcggtttcatgtgcaacatgtcaagaaatccgacggaccaaattatcagcactttttattaatttgatcagtgatccttcacgttgggttcgccaagcagcttttcagtctctgggacctttcatatctacttttgctaatccatctagctcaggccagtattttaaagaagaaagcaaaagttcagaagagatgtcagtagaaaacaaaaataggaccagagatcaagaagccccagaggatgtacaagtcaggccagaggatactccttcagatctcagtgttagtaattccagtgtcatactggaaaacacgatggaagaccatgctgctgaggcatccgggaagcctctaggtgaaattagtgttccactggacagctctttactttgtactttgtcctcagaatctcaccaggaagcagctagtaatgagaatgataaaaaacctggtaactacaaatctatgttacgaccagaggttggcaccacttcacaagattcagctctcttagatcaggaattgtataactccttccatttctggaggactcctcttcctgaaatagatctagacatagagcttgaacagaactctgggggaaaacccagcccagagggaccagaggaagaatctgagggccctgtgcccagttctccaaacatcaccatggccaccagaaaggaactggaagaaatgatagaaaatctagagccccacattgatgatccagatgttaaagcacaagtggaagtgctgtccgctgcactacgtgcttccagcctggatgcacatgaagagaccatcagtatagaaaagagaagtgatttgcaagatgaactggatataaatgagctaccaaattgtaaaataaatcaagaagattctgtgcctttaatcagcgatgctgttgagaatatggactccactcttcactatattcacagcgattcagacttgagcaacaatagcagttttagccctgatgaggaaaggagaactaaagtacaagatgttgtacctcaggcgttgttagatcagtatttatctatgactgacccttctcgtgcacagacggttgacactgaaattgctaagcactgtgcatatagcctccctggtgtggccttgacactcggaagacagaattggcactgcctgagagagacgtatgagactctggcctcagacatgcagtggaaagttcgacgaactctagcattctccatccacgagcttgcagttattcttggagatcaattgacagctgcagatctggttccaatttttaatggatttttaaaagacctcgatgaagtcaggataggtgttcttaaacacttgcatgattttctgaagcttcttcatattgacaaaagaagagaatatctttatcaacttcaggagtttttggtgacagataatagtagaaattggcggtttcgagctgaactggctgaacagctgattttacttctagagttatatagtcccagagatgtttatgactatttacgtcccattgctctgaatctgtgtgcagacaaagtttcttctgttcgttggatttcctacaagttggtcagcgagatggtgaagaagctgcacgcggcaacaccaccaacgttcggagtggacctcatcaatgagcttgtggagaactttggcagatgtcccaagtggtctggtcggcaagcctttgtctttgtctgccagactgtcattgaggatgactgccttcccatggaccagtttgctgtgcatctcatgccgcatctgctaaccttagcaaatgacagggttcctaacgtgcgagtgctgcttgcaaagacattaagacaaactctactagaaaaagactatttcttggcctctgccagctgccaccaggaggctgtggagcagaccatcatggctcttcagatggaccgtgacagcgatgtcaagtattttgcaagcatccaccctgccagtaccaaaatctccgaagatgccatgagcacagcgtcctcaacctactagaaggcttgaatctcggtgtctttcctgcttccatgagagccgaggttcagtgggcattcgccacgcatgtgacctgggatagctttcgggggaggagagaccttcctctcctgcggacttcattgcaggtgcaagttgcctacacccaataccagggatttcaagagtcaagagaaagtacagtaaacactattatcttatcttgactttaaggggaaataatttctcagaggattataattgtcaccgaagccttaaatccttctgtcttcctgactgaatgaaacttgaattggcagagcattttccttatggaagggatgagattcccagagacctgcattgctttctcctggttttatttaacaatcgacaaatgaaattcttacagcctgaaggcagacgtgtgcccagatgtgaaagagaccttcagtatcagccctaactcttctctcccaggaaggacttgctgggctctgtggccagctgtccagcccagccctgtgtgtgaatcgtttgtgacgtgtgcaaatgggaaaggaggggtttttacatctcctaaaggacctgatgccaacacaagtaggattgacttaaactcttaagcgcagcatattgctgtacacatttacagaatggttgctgagtgtctgtgtctgattttttcatgctggtcatgacctgaaggaaatttattagacgtataatgtatgtctggtgtttttaacttgatcatgatcagctctgaggtgcaacttcttcacatactgtacatacctgtgaccactcttgggagtgctgcagtctttaatcatgctgtttaaactgttgtggcacaagttctcttgtccaaataaaatttattaataagatctatagagagagatatatacacttttgattgttttctagatgtctaccaataaatgcaatttgtgacctgta

SEQ ID NO: 73114 - DNA, 3891 bp, Homo sapiens
cggcacgagcgcgcgtccaccggctccccggctcgcgccgctccatgtagccccggctccccgggcggccgcggaggagggggcgaccacaagatggcggacctctcgctgcttcaggaggacctgcaggaggacgcagacggatttggtgtggatgactacagctcagagtctgatgtgattattataccttcagccctggactttgtctcacaagatgaaatgttgacgcccctggggagattggacaagtatgctgcaagtgagaacatatttaacagacaaatggtggcccggagtttgctcgataccttgagggaagtctgcgatgatgaaagagattgtattgctgttttggaaagaattagcagattggccgatgattcagaaccaactgtgagagcggagctgatggaacaggtgcctcacatcgcactgttttgtcaagaaaaccggccttcaataccatatgctttttcaaaattcttactacctattgtggttagataccttgcagatcagaataatcaggtgaggaaaacaagtcaggcagctttgctggctctgttggagcaggagctcattgaacgatttgatgtggagaccaaagtgtgccctgtcctcatagagctgacagccccagatagcaatgatgatgtgaaaacagaagctgtggctataatgtgcaaaatggctcccatggttgggaaggatattacagagcgtcttatcctccctaggttttgtgagatgtgctgcgattgcagaatgtttcacgttcgaaaggtctgtgctgccaattttggagatatttgcagtgtagttggccagcaagctactgaagaaatgttgctgcccagatttttccagctttgttctgataatgtatggggagtccgaaaggcttgtgctgaatgcttcatggcggtttcatgtgcaacatgtcaagaaatccgacggaccaaattatcagcactttttattaatttgatcagtgatccttcacgttgggttcgccaagcagcttttcagtctctgggacctttcatatctacttttgctaatccatctagctcaggccagtattttaaagaagaaagcaaaagttcagaagagatgtcagtagaaaacaaaaataggaccagagatcaagaagccccagaggatgtacaagtcaggccagaggatactccttcagatctcagtgttagtaattccagtgtcatactggaaaacacgatggaagaccatgctgctgaggcatccgggaagcctctaggtgaaattagtgttccactggacagctctttactttgtactttgtcctcagaatctcaccaggaagcagctagtaatgagaatgataaaaaacctggtaactacaaatctatgttacgaccagaggttggcaccacttcacaagattcagctctcttagatcaggaattgtataactccttccatttctggaggactcctcttcctgaaatagatctagacatagagcttgaacagaactctgggggaaaacccagcccagagggaccagaggaagaatctgagggccctgtgcccagttctccaaacatcaccatggccaccagaaaggaactggaagaaatgatagaaaatctagagccccacattgatgatccagatgttaaagcacaagtggaagtgctgtccgctgcactacgtgcttccagcctggatgcacatgaagagaccatcagtatagaaaagagaagtgatttgcaagatgaactggatataaatgagctaccaaattgtaaaataaatcaagaagattctgtgcctttaatcagcgatgctgttgagaatatggactccactcttcactatattcacagcgattcagacttgagcaacaatagcagttttagccctgatgaggaaaggagaactaaagtacaagatgttgtacctcaggcgttgttagatcagtatttatctatgactgacccttctcgtgcacagacggttgacactgaaattgctaagcactgtgcatatagcctccctggtgtggccttgacactcggaagacagaattggcactgcctgagagagacgtatgagactctggcctcagacatgcagtggaaagttcgacgaactctagcattctccatccacgagcttgcagttattcttggagatcaattgacagctgcagatctggttccaatttttaatggatttttaaaagacctcgatgaagtcaggataggtgttcttaaacacttgcatgattttctgaagcttcttcatattgacaaaagaagagaatatctttatcaacttcaggagtttttggtgacagataatagtagaaattggcggtttcgagctgaactggctgaacagctgattttacttctagagttatatagtcccagagatgtttatgactatttacgtcccattgctctgaatctgtgtgcagacaaagtttcttctgttcgttggatttcctacaagttggtcagcgagatggtgaagaagctgcacgcggcaacaccaccaacgttcggagtggacctcatcaatgagcttgtggagaactttggcagatgtcccaagtggtctggtcggcaagcctttgtctttgtctgccagactgtcattgaggatgactgccttcccatggaccagtttgctgtgcatctcatgccgcatctgctaaccttagcaaatgacagggttcctaacgtgcgagtgctgcttgcaaagacattaagacaaactctactagaaaaagactatttcttggcctctgccagctgccaccaggaggctgtggagcagaccatcatggctcttcagatggaccgtgacagcgatgtcaagtattttgcaagcatccaccctgccagtaccaaaatctccgaagatgccatgagcacagcgtcctcaacctactagaaggcttgaatctcggtgtctttcctgcttccatgagagccgaggttcagtgggcattcgccacgcatgtgacctgggatagctttcgggggaggagagaccttcctctcctgcggacttcattgcaggtgcaagttgcctacacccaataccagggatttcaagagtcaagagaaagtacagtaaacactattatcttatcttgactttaaggggaaataatttctcagaggattataattgtcaccgaagccttaaatccttctgtcttcctgactgaatgaaacttgaattggcagagcattttccttatggaagggatgagattcccagagacctgcattgctttctcctggttttatttaacaatcgacaaatgaaattcttacagcctgaaggcagacgtgtgcccagatgtgaaagagaccttcagtatcagccctaactcttctctcccaggaaggacttgctgggctctgtggccagctgtccagcccagccctgtgtgtgaatcgtttgtgacgtgtgcaaatgggaaaggaggggtttttacatctcctaaaggacctgatgccaacacaagtaggattgacttaaactcttaagcgcagcatattgctgtacacatttacagaatggttgctgagtgtctgtgtctgattttttcatgctggtcatgacctgaaggaaatttattagacgtataatgtatgtctggtgtttttaacttgatcatgatcagctctgaggtgcaacttcttcacatactgtacatacctgtgaccactcttgggagtgctgcagtctttaatcatgctgtttaaactgttgtggcacaagttctcttgtccaaataaaatttattaataagatctatagagagagatatatacacttttgattgttttctagatgtctaccaataaatgcaatttgtgacctgta

SEQ ID NO: 73115 - DNA, 738 bp, Homo sapiens
gattagcatggcccctgcgcaaggatgacacgcaaattcgtgaagcgttccatatttttaatgagctaccaaattgtaaaataaatcaagaagattctgtgcctttaatcagcgatgctgttgagaggtgctttgtttctgatcggaccatttcactgcagcaagcaacacagtattctgagcagaagatcgggacttgaggccatgttgcggagggccagtgacattatctggactctggagtgtgaggaatatggactccactcttcactatattcacagcgattcagacttgagcaacaatagcagttttagccctgatgaggaaaggagaactaaagtacaagatgttgtacctcaggcgttgttagatcagtatttatctatgactgacccttctcgtgcacagacggttgacactgaaattgctaagcactgtgcatatagcctccctggtgtggccttgacactcggaagacagaattggcactgcctgagagagacgtatgagactctggcctcagacatgcagtggaaagttcgacgaactctagcattctccatccacgagcttgcagttattcttggagatcaattgacagctgcagatctggttccaatttttaatggatttttaaaagacctcgatgaagtcaggataggtgttcttaaacacttgcatgattttctgaagcttctcatattgccacagagagatatctttatcacttccagagc

SEQ ID NO: 73116 - DNA, 569 bp, Homo sapiens
tactgccgtttgccacttaggaaattatagacctaatatatgttttaataatgtaataagaaaaaattttcttaaaaaatatacagattttgtcttttaaaattctagatatcggccaggtgcagtgactcatgcctgtaatcccagcactttgggaggccaaggcaggtggattgcttgagcccgggagtttgagaccagcctgggcaacatggtgaaacagcatctctactaaagatatttaaaaattagccaggtgtggtggtgcatgcctgtagtctcagctactcaggaggctgaggtgggaggattacctgagccagggaagtcaatgctgcagttagccgtgatcacaccattacactccggcctgggcaacaggaatgaggccctgtctcaaaaaattaaaattctggatattagctattgatgccattgaacatacataattttgttttttttgtgtagacaaatggtggcccggagtttgctcgatactctttaaggatagatttgtgttttcctttacctgtttaccagctccagagttttttttttttttgtaagtg

SEQ ID NO: 73117 - DNA, 545 bp, Homo sapiens
cggcacgagcgcgcgtccaccggctccccggctcgcgccgctccatgtagccccggctccccgggcggccgcggaggagggggcgaccacaagatggcggacctctcgctgcttcaggaggacctgcaggaggacgcagacggatccctggactttgtctcacaagatgaaatgttgacgcccctggggagattggacaagtatgctgcaagtgagaacatatttaacaggtatgtgcatattctttttgttaaagtggaagtggaagggtggttttattaacttcagtagggaaaatgaaagtatccactttaaaggaggtattattaacaggcacaatctgagtcaccaagttttattcataatcacagcatgagcagttttgtacttgtttattctttgatcctagtaagcatacaacatgctttctttgcaaaaaaaaaaattaccattaattaccattgcttttctgccactggacataattttggtattcatataaattgcttattgggaagtacattattccttcaacacatgatgtt

SEQ ID NO: 73118 - DNA, 472 bp, Homo sapiens
ggtggcccctctctcccagctagccaagcccctccttacactggcatgcaccacacacaccccacgtgcctgctgtatgtgcttgttccacaccacatgcctggtatgtgcgtgttctgctctgcacacattcagacgtgtgtatatgtacatttcacagtgcacatacatgcatgttcctcactgttcctcactgcatattacacaggcatacatacatgtaccccaccacacacatactgtgcacacatataccataccacggttcccactagagggtgctcatgtctgggacccagagcgcaggtgtgaaaatgaaacacctgtgaatgaacactctaggtctccgtagagcagtttaaaaactgtgtctgtccgtgtgggcagttaattatgtaatttttgatttgagttcccaagtacgtggaattttggttaaaaagcaataactaaaatttgtacctgtggtcac

SEQ ID NO: 73119 - DNA, 3890 bp, Homo sapiens
cggcacgagcgcgcgtccaccggctccccggctcgcgccgctccatgtagccccggctccccgggcggccgcggaggagggggcgaccacaagatggcggacctctcgctgcttcaggaggacctgcaggaggacgcagacggatccctggactttgtctcacaagatgaaatgttgacgcccctggggagattggacaagtatgctgcaagtgagaacatatttaacagacaaatggtggcccggagtttgctcgataccttgagggaagtctgcgatgatgaaagagattgtattgctgttttggaaagaattagcagattggccgatgattcagaaccaactgtgagagcggagctgatggaacaggtgcctcacatcgcactgttttgtcaagaaaaccggccttcaataccatatgctttttcaaaattcttactacctattgtggttagataccttgcagatcagaataatcaggtgaggaaaacaagtcaggcagctttgctggctctgttggagcaggagctcattgaacgatttgatgtggagaccaaagtgtgccctgtcctcatagagctgacagccccagatagcaatgatgatgtgaaaacagaagctgtggctataatgtgcaaaatggctcccatggttgggaaggatattacagagcgtcttatcctccctaggttttgtgagatgtgctgcgattgcagaatgtttcacgttcgaaaggtctgtgctgccaattttggagatatttgcagtgtagttggccagcaagctactgaagaaatgttgctgcccagatttttccagctttgttctgataatgtatggggagtccgaaaggcttgtgctgaatgcttcatggcggtttcatgtgcaacatgtcaagaaatccgacggaccaaattatcagcactttttattaatttgatcagtgatccttcacgttgggttcgccaagcagcttttcagtctctgggacctttcatatctacttttgctaatccatctagctcaggccagtattttaaagaagaaagcaaaagttcagaagagatgtcagtagaaaacaaaaataggaccagagatcaagaagccccagaggatgtacaagtcaggccagaggatactccttcagatctcagtgttagtaattccagtgtcatactggaaaacacgatggaagaccatgctgctgaggcatccgggaagcctctaggtgaaattagtgttccactggacagctctttactttgtactttgtcctcagaatctcaccaggaagcagctagtaatgagaatgataaaaaacctggtaactacaaatctatgttacgaccagaggttggcaccacttcacaagattcagctctcttagatcaggaattgtataactccttccatttctggaggactcctcttcctgaaatagatctagacatagagcttgaacagaactctgggggaaaacccagcccagagggaccagaggaagaatctgagggccctgtgcccagttctccaaacatcaccatggccaccagaaaggaactggaagaaatgatagaaaatctagagccccacattgatgatccagatgttaaagcacaagtggaagtgctgtccgctgcactacgtgcttccagcctggatgcacatgaagagaccatcagtatagaaaagagaagtgatttgcaagatgaactggatataaatgagctaccaaattgtaaaataaatcaagaagattctgtgcctttaatcagcgatgctgttgagaatatggactccactcttcactatattcacagcgattcagacttgagcaacaatagcagttttagccctgatgaggaaaggagaactaaagtacaagatgttgtacctcaggcgttgttagatcagtatttatctatgactgacccttctcgtgcacagacggttgacactgaaattgctaagcactgtgcatatagcctccctggtgtggccttgacactcggaagacagaattggcactgcctgagagagacgtatgagactctggcctcagacatgcagtggaaagttcgacgaactctagcattctccatccacgagcttgcagttattcttggagatcaattgacagctgcagatctggttccaatttttaatggatttttaaaagacctcgatgaagtcaggataggtgttcttaaacacttgcatgattttctgaagcttcttcatattgacaaaagaagagaatatctttatcaacttcaggagtttttggtgacagataatagtagaaattggcggtttcgagctgaactggctgaacagctgattttacttctagagttatatagtcccagagatgtttatgactatttacgtcccattgctctgaatctgtgtgcagacaaagtttcttctgttcgttggatttcctacaagttggtcagcgagatggtgaagaagctgcacgcggcaacaccaccaacgttcggagtggacctcatcaatgagcttgtggagaactttggcagatgtcccaagtggtctggtcggcaagcctttgtctttgtctgccagactgtcattgaggatgactgccttcccatggaccagtttgctgtgcatctcatgccgcatctgctaaccttagcaaatgacagggttcctaacgtgcgagtgctgcttgcaaagacattaagacaaactctactagaaaaagactatttcttggcctctgccagctgccaccaggaggctgtggagcagaccatcatggctcttcagatggaccgtgacagcgatgtcaagtattttgcaagcatccaccctgccagtaccaaaatctccgaagatgccatgagcacagcgtcctcaacctactagaaggcttgaatctcggtgtctttcctgcttccatgagagccgaggttcagtgggcattcgccacgcatgtgacctgggatagctttcgggggaggagagaccttcctctcctgcggacttcattgcaggtgcaagttgcctacacccaataccagggatttcaagagtcaagagaaagtacagtaaacactattatcttatcttgactttaaggggaaataatttctcagaggattataattgtcaccgaagccttaaatccttctgtcttcctgactgaatgaaacttgaattggcagagcattttccttatggaagggatgagattcccagagacctgcattgctttctcctggttttatttaacaatcgacaaatgaaattcttacagcctgaaggcagacgtgtgcccagatgtgaaagagaccttcagtatcagccctaactcttctctcccaggaaggacttgctgggctctgtggccagctgtccagcccagccctgtgtgtgaatcgtttgtgacgtgtgcaaatgggaaaggaggggtttttacatctcctaaaggacctgatgccaacacaagtaggattgacttaaactcttaagcgcagcatattgctgtacacatttacagaatggttgctgagtgtctgtgtctgattttttcatgctggtcatgacctgaaggaaatttattagacgtataatgtatgtctggtgtttttaacttgatcatgatcagctctgaggtgcaacttcttcacatactgtacatacctgtgaccactcttgggagtgctgcagtctttaatcatgctgtttaaactgttgtggcacaagttctcttgtccaaataaaatttattaataagatctatagagagagatatatacacttttgattgttttctagatgtctaccaataaatgcaatttgtgacctgtattaatgatttaaagtggggaaactagattaaaatatttgtcttttaacta

SEQ ID NO: 73120 - DNA, 3891 bp, Homo sapiens
cgcccggccgggttccggcactcgccgcagggtcccggccggcggcaggttgcgcgcccccgtccgcagcgctcggcgtgagggcggctcgggaggagggtacctctcgctgcttcaggaggacctgcaggaggacgcagacggatccctggactttgtctcacaagatgaaatgttgacgcccctggggagattggacaagtatgctgcaagtgagaacatatttaacagacaaatggtggcccggagtttgctcgataccttgagggaagtctgcgatgatgaaagagattgtattgctgttttggaaagaattagcagattggccgatgattcagaaccaactgtgagagcggagctgatggaacaggtgcctcacatcgcactgttttgtcaagaaaaccggccttcaataccatatgctttttcaaaattcttactacctattgtggttagataccttgcagatcagaataatcaggtgaggaaaacaagtcaggcagctttgctggctctgttggagcaggagctcattgaacgatttgatgtggagaccaaagtgtgccctgtcctcatagagctgacagccccagatagcaatgatgatgtgaaaacagaagctgtggctataatgtgcaaaatggctcccatggttgggaaggatattacagagcgtcttatcctccctaggttttgtgagatgtgctgcgattgcagaatgtttcacgttcgaaaggtctgtgctgccaattttggagatatttgcagtgtagttggccagcaagctactgaagaaatgttgctgcccagatttttccagctttgttctgataatgtatggggagtccgaaaggcttgtgctgaatgcttcatggcggtttcatgtgcaacatgtcaagaaatccgacggaccaaattatcagcactttttattaatttgatcagtgatccttcacgttgggttcgccaagcagcttttcagtctctgggacctttcatatctacttttgctaatccatctagctcaggccagtattttaaagaagaaagcaaaagttcagaagagatgtcagtagaaaacaaaaataggaccagagatcaagaagccccagaggatgtacaagtcaggccagaggatactccttcagatctcagtgttagtaattccagtgtcatactggaaaacacgatggaagaccatgctgctgaggcatccgggaagcctctaggtgaaattagtgttccactggacagctctttactttgtactttgtcctcagaatctcaccaggaagcagctagtaatgagaatgataaaaaacctggtaactacaaatctatgttacgaccagaggttggcaccacttcacaagattcagctctcttagatcaggaattgtataactccttccatttctggaggactcctcttcctgaaatagatctagacatagagcttgaacagaactctgggggaaaacccagcccagagggaccagaggaagaatctgagggccctgtgcccagttctccaaacatcaccatggccaccagaaaggaactggaagaaatgatagaaaatctagagccccacattgatgatccagatgttaaagcacaagtggaagtgctgtccgctgcactacgtgcttccagcctggatgcacatgaagagaccatcagtatagaaaagagaagtgatttgcaagatgaactggatataaatgagctaccaaattgtaaaataaatcaagaagattctgtgcctttaatcagcgatgctgttgagaatatggactccactcttcactatattcacagcgattcagacttgagcaacaatagcagttttagccctgatgaggaaaggagaactaaagtacaagatgttgtacctcaggcgttgttagatcagtatttatctatgactgacccttctcgtgcacagacggttgacactgaaattgctaagcactgtgcatatagcctccctggtgtggccttgacactcggaagacagaattggcactgcctgagagagacgtatgagactctggcctcagacatgcagtggaaagttcgacgaactctagcattctccatccacgagcttgcagttattcttggagatcaattgacagctgcagatctggttccaatttttaatggatttttaaaagacctcgatgaagtcaggataggtgttcttaaacacttgcatgattttctgaagcttcttcatattgacaaaagaagagaatatctttatcaacttcaggagtttttggtgacagataatagtagaaattggcggtttcgagctgaactggctgaacagctgattttacttctagagttatatagtcccagagatgtttatgactatttacgtcccattgctctgaatctgtgtgcagacaaagtttcttctgttcgttggatttcctacaagttggtcagcgagatggtgaagaagctgcacgcggcaacaccaccaacgttcggagtggacctcatcaatgagcttgtggagaactttggcagatgtcccaagtggtctggtcggcaagcctttgtctttgtctgccagactgtcattgaggatgactgccttcccatggaccagtttgctgtgcatctcatgccgcatctgctaaccttagcaaatgacagggttcctaacgtgcgagtgctgcttgcaaagacattaagacaaactctactagaaaaagactatttcttggcctctgccagctgccaccaggaggctgtggagcagaccatcatggctcttcagatggaccgtgacagcgatgtcaagtattttgcaagcatccaccctgccagtaccaaaatctccgaagatgccatgagcacagcgtcctcaacctactagaaggcttgaatctcggtgtctttcctgcttccatgagagccgaggttcagtgggcattcgccacgcatgtgacctgggatagctttcgggggaggagagaccttcctctcctgcggacttcattgcaggtgcaagttgcctacacccaataccagggatttcaagagtcaagagaaagtacagtaaacactattatcttatcttgactttaaggggaaataatttctcagaggattataattgtcaccgaagccttaaatccttctgtcttcctgactgaatgaaacttgaattggcagagcattttccttatggaagggatgagattcccagagacctgcattgctttctcctggttttatttaacaatcgacaaatgaaattcttacagcctgaaggcagacgtgtgcccagatgtgaaagagaccttcagtatcagccctaactcttctctcccaggaaggacttgctgggctctgtggccagctgtccagcccagccctgtgtgtgaatcgtttgtgacgtgtgcaaatgggaaaggaggggtttttacatctcctaaaggacctgatgccaacacaagtaggattgacttaaactcttaagcgcagcatattgctgtacacatttacagaatggttgctgagtgtctgtgtctgattttttcatgctggtcatgacctgaaggaaatttattagacgtataatgtatgtctggtgtttttaacttgatcatgatcagctctgaggtgcaacttcttcacatactgtacatacctgtgaccactcttgggagtgctgcagtctttaatcatgctgtttaaactgttgtggcacaagttctcttgtccaaataaaatttattaataagatctatagagagagatatatacacttttgattgttttctagatgtctaccaataaatgcaatttgtgacctgtattaatgatttaaagtggggaaactagattaaaatatttgtcttttaacta

SEQ ID NO: 73121 - DNA, 3941 bp, Homo sapiens
cggcacgagcgcgcgtccaccggctccccggctcgcgccgctccatgtagccccggctccccgggcggccgcggaggagggggcgaccacaagatggcggacctctcgctgcttcaggaggacctgcaggaggacgcagacggatttggtgtggatgactacagctcagagtctgatgtgattattataccttcagccctggactttgtctcacaagatgaaatgttgacgcccctggggagattggacaagtatgctgcaagtgagaacatatttaacagacaaatggtggcccggagtttgctcgataccttgagggaagtctgcgatgatgaaagagattgtattgctgttttggaaagaattagcagattggccgatgattcagaaccaactgtgagagcggagctgatggaacaggtgcctcacatcgcactgttttgtcaagaaaaccggccttcaataccatatgctttttcaaaattcttactacctattgtggttagataccttgcagatcagaataatcaggtgaggaaaacaagtcaggcagctttgctggctctgttggagcaggagctcattgaacgatttgatgtggagaccaaagtgtgccctgtcctcatagagctgacagccccagatagcaatgatgatgtgaaaacagaagctgtggctataatgtgcaaaatggctcccatggttgggaaggatattacagagcgtcttatcctccctaggttttgtgagatgtgctgcgattgcagaatgtttcacgttcgaaaggtctgtgctgccaattttggagatatttgcagtgtagttggccagcaagctactgaagaaatgttgctgcccagatttttccagctttgttctgataatgtatggggagtccgaaaggcttgtgctgaatgcttcatggcggtttcatgtgcaacatgtcaagaaatccgacggaccaaattatcagcactttttattaatttgatcagtgatccttcacgttgggttcgccaagcagcttttcagtctctgggacctttcatatctacttttgctaatccatctagctcaggccagtattttaaagaagaaagcaaaagttcagaagagatgtcagtagaaaacaaaaataggaccagagatcaagaagccccagaggatgtacaagtcaggccagaggatactccttcagatctcagtgttagtaattccagtgtcatactggaaaacacgatggaagaccatgctgctgaggcatccgggaagcctctaggtgaaattagtgttccactggacagctctttactttgtactttgtcctcagaatctcaccaggaagcagctagtaatgagaatgataaaaaacctggtaactacaaatctatgttacgaccagaggttggcaccacttcacaagattcagctctcttagatcaggaattgtataactccttccatttctggaggactcctcttcctgaaatagatctagacatagagcttgaacagaactctgggggaaaacccagcccagagggaccagaggaagaatctgagggccctgtgcccagttctccaaacatcaccatggccaccagaaaggaactggaagaaatgatagaaaatctagagccccacattgatgatccagatgttaaagcacaagtggaagtgctgtccgctgcactacgtgcttccagcctggatgcacatgaagagaccatcagtatagaaaagagaagtgatttgcaagatgaactggatataaatgagctaccaaattgtaaaataaatcaagaagattctgtgcctttaatcagcgatgctgttgagaatatggactccactcttcactatattcacagcgattcagacttgagcaacaatagcagttttagccctgatgaggaaaggagaactaaagtacaagatgttgtacctcaggcgttgttagatcagtatttatctatgactgacccttctcgtgcacagacggttgacactgaaattgctaagcactgtgcatatagcctccctggtgtggccttgacactcggaagacagaattggcactgcctgagagagacgtatgagactctggcctcagacatgcagtggaaagttcgacgaactctagcattctccatccacgagcttgcagttattcttggagatcaattgacagctgcagatctggttccaatttttaatggatttttaaaagacctcgatgaagtcaggataggtgttcttaaacacttgcatgattttctgaagcttcttcatattgacaaaagaagagaatatctttatcaacttcaggagtttttggtgacagataatagtagaaattggcggtttcgagctgaactggctgaacagctgattttacttctagagttatatagtcccagagatgtttatgactatttacgtcccattgctctgaatctgtgtgcagacaaagtttcttctgttcgttggatttcctacaagttggtcagcgagatggtgaagaagctgcacgcggcaacaccaccaacgttcggagtggacctcatcaatgagcttgtggagaactttggcagatgtcccaagtggtctggtcggcaagcctttgtctttgtctgccagactgtcattgaggatgactgccttcccatggaccagtttgctgtgcatctcatgccgcatctgctaaccttagcaaatgacagggttcctaacgtgcgagtgctgcttgcaaagacattaagacaaactctactagaaaaagactatttcttggcctctgccagctgccaccaggaggctgtggagcagaccatcatggctcttcagatggaccgtgacagcgatgtcaagtattttgcaagcatccaccctgccagtaccaaaatctccgaagatgccatgagcacagcgtcctcaacctactagaaggcttgaatctcggtgtctttcctgcttccatgagagccgaggttcagtgggcattcgccacgcatgtgacctgggatagctttcgggggaggagagaccttcctctcctgcggacttcattgcaggtgcaagttgcctacacccaataccagggatttcaagagtcaagagaaagtacagtaaacactattatcttatcttgactttaaggggaaataatttctcagaggattataattgtcaccgaagccttaaatccttctgtcttcctgactgaatgaaacttgaattggcagagcattttccttatggaagggatgagattcccagagacctgcattgctttctcctggttttatttaacaatcgacaaatgaaattcttacagcctgaaggcagacgtgtgcccagatgtgaaagagaccttcagtatcagccctaactcttctctcccaggaaggacttgctgggctctgtggccagctgtccagcccagccctgtgtgtgaatcgtttgtgacgtgtgcaaatgggaaaggaggggtttttacatctcctaaaggacctgatgccaacacaagtaggattgacttaaactcttaagcgcagcatattgctgtacacatttacagaatggttgctgagtgtctgtgtctgattttttcatgctggtcatgacctgaaggaaatttattagacgtataatgtatgtctggtgtttttaacttgatcatgatcagctctgaggtgcaacttcttcacatactgtacatacctgtgaccactcttgggagtgctgcagtctttaatcatgctgtttaaactgttgtggcacaagttctcttgtccaaataaaatttattaataagatctatagagagagatatatacacttttgattgttttctagatgtctaccaataaatgcaatttgtgacctgtattaatgatttaaagtggggaaactagattaaaatatttgtcttttaacta

SEQ ID NO: 73122 - DNA, 3731 bp, Homo sapiens
cggcacgagcgcgcgtccaccggctccccggctcgcgccgctccatgtagccccggctccccgggcggccgcggaggagggggcgaccacaagatggcggacctctcgctgcttcaggaggacctgcaggaggacgcagacggatccctggactttgtctcacaagatgaaatgttgacgcccctggggagattggacaagtatgctgcaagtgagaacatatttaacagacaaatggtggcccggagtttgctcgataccttgagggaagtctgcgatgatgaaagagattgtattgctgttttggaaagaattagcagattggccgatgattcagaaccaactgtgagagcggagctgatggaacaggtgcctcacatcgcactgttttgtcaagaaaaccggccttcaataccatatgctttttcaaaattcttactacctattgtggttagataccttgcagatcagaataatcaggtgaggaaaacaagtcaggcagctttgctggctctgttggagcaggagctcattgaacgatttgatgtggagaccaaagtgtgccctgtcctcatagagctgacagccccagatagcaatgatgatgtgaaaacagaagctgtggctataatgtgcaaaatggctcccatggttgggaaggatattacagagcgtcttatcctccctaggttttgtgagatgtgctgcgattgcagaatgtttcacgttcgaaaggtctgtgctgccaattttggagatatttgcagtgtagttggccagcaagctactgaagaaatgttggttcgccaagcagcttttcagtctctgggacctttcatatctacttttgctaatccatctagctcaggccagtattttaaagaagaaagcaaaagttcagaagagatgtcagtagaaaacaaaaataggaccagagatcaagaagccccagaggatgtacaagtcaggccagaggatactccttcagatctcagtgttagtaattccagtgtcatactggaaaacacgatggaagaccatgctgctgaggcatccgggaagcctctaggtgaaattagtgttccactggacagctctttactttgtactttgtcctcagaatctcaccaggaagcagctagtaatgagaatgataaaaaacctggtaactacaaatctatgttacgaccagaggttggcaccacttcacaagattcagctctcttagatcaggaattgtataactccttccatttctggaggactcctcttcctgaaatagatctagacatagagcttgaacagaactctgggggaaaacccagcccagagggaccagaggaagaatctgagggccctgtgcccagttctccaaacatcaccatggccaccagaaaggaactggaagaaatgatagaaaatctagagccccacattgatgatccagatgttaaagcacaagtggaagtgctgtccgctgcactacgtgcttccagcctggatgcacatgaagagaccatcagtatagaaaagagaagtgatttgcaagatgaactggatataaatgagctaccaaattgtaaaataaatcaagaagattctgtgcctttaatcagcgatgctgttgagaatatggactccactcttcactatattcacagcgattcagacttgagcaacaatagcagttttagccctgatgaggaaaggagaactaaagtacaagatgttgtacctcaggcgttgttagatcagtatttatctatgactgacccttctcgtgcacagacggttgacactgaaattgctaagcactgtgcatatagcctccctggtgtggccttgacactcggaagacagaattggcactgcctgagagagacgtatgagactctggcctcagacatgcagtggaaagttcgacgaactctagcattctccatccacgagcttgcagttattcttggagatcaattgacagctgcagatctggttccaatttttaatggatttttaaaagacctcgatgaagtcaggataggtgttcttaaacacttgcatgattttctgaagcttcttcatattgacaaaagaagagaatatctttatcaacttcaggagtttttggtgacagataatagtagaaattggcggtttcgagctgaactggctgaacagctgattttacttctagagttatatagtcccagagatgtttatgactatttacgtcccattgctctgaatctgtgtgcagacaaagtttcttctgttcgttggatttcctacaagttggtcagcgagatggtgaagaagctgcacgcggcaacaccaccaacgttcggagtggacctcatcaatgagcttgtggagaactttggcagatgtcccaagtggtctggtcggcaagcctttgtctttgtctgccagactgtcattgaggatgactgccttcccatggaccagtttgctgtgcatctcatgccgcatctgctaaccttagcaaatgacagggttcctaacgtgcgagtgctgcttgcaaagacattaagacaaactctactagaaaaagactatttcttggcctctgccagctgccaccaggaggctgtggagcagaccatcatggctcttcagatggaccgtgacagcgatgtcaagtattttgcaagcatccaccctgccagtaccaaaatctccgaagatgccatgagcacagcgtcctcaacctactagaaggcttgaatctcggtgtctttcctgcttccatgagagccgaggttcagtgggcattcgccacgcatgtgacctgggatagctttcgggggaggagagaccttcctctcctgcggacttcattgcaggtgcaagttgcctacacccaataccagggatttcaagagtcaagagaaagtacagtaaacactattatcttatcttgactttaaggggaaataatttctcagaggattataattgtcaccgaagccttaaatccttctgtcttcctgactgaatgaaacttgaattggcagagcattttccttatggaagggatgagattcccagagacctgcattgctttctcctggttttatttaacaatcgacaaatgaaattcttacagcctgaaggcagacgtgtgcccagatgtgaaagagaccttcagtatcagccctaactcttctctcccaggaaggacttgctgggctctgtggccagctgtccagcccagccctgtgtgtgaatcgtttgtgacgtgtgcaaatgggaaaggaggggtttttacatctcctaaaggacctgatgccaacacaagtaggattgacttaaactcttaagcgcagcatattgctgtacacatttacagaatggttgctgagtgtctgtgtctgattttttcatgctggtcatgacctgaaggaaatttattagacgtataatgtatgtctggtgtttttaacttgatcatgatcagctctgaggtgcaacttcttcacatactgtacatacctgtgaccactcttgggagtgctgcagtctttaatcatgctgtttaaactgttgtggcacaagttctcttgtccaaataaaatttattaataagatctatagagagagatatatacacttttgattgttttctagatgtctaccaataaatgcaatttgtgacctgtattaatgatttaaagtggggaaactagattaaaatatttgtcttttaacta

SEQ ID NO: 73123 - DNA, 3771 bp, Homo sapiens
cggcacgagcgcgcgtccaccggctccccggctcgcgccgctccatgtagccccggctccccgggcggccgcggaggagggggcgaccacaagatggcggacctctcgctgcttcaggaggacctgcaggaggacgcagacggatccctggactttgtctcacaagatgaaatgttgacgcccctggggagattggacaagtatgctgcaagtgagaacatatttaacagacaaatggtggcccggagtttgctcgataccttgagggaagtctgcgatgatgaaagagattgtattgctgttttggaaagaattagcagattggccgatgattcagaaccaactgtgagagcggagctgatggaacaggtgcctcacatcgcactgttttgtcaagaaaaccggccttcaataccatatgctttttcaaaattcttactacctattgtggttagataccttgcagatcagaataatcaggtgaggaaaacaagtcaggcagctttgctggctctgttggagcaggagctcattgaacgatttgatgtggagaccaaagtgtgccctgtcctcatagagctgacagccccagatagcaatgatgatgtgaaaacagaagctgtggctataatgtgcaaaatggctcccatggttgggaaggatattacagagcgtcttatcctccctaggttttgtgagatgtgctgcgattgcagaatgtttcacgttcgaaaggtctgtgctgccaattttggagatatttgcagtgtagttggccagcaagctactgaagaaatgttgctgcccagatttttccagctttgttctgataatgtatggggagtccgaaaggcttgtgctgaatgcttcatggcggtttcatgtgcaacatgtcaagaaatccgacggaccaaattatcagcactttttattaatttgatcagtgatccttcacgttgggttcgccaagcagcttttcagtctctgggacctttcatatctacttttgctaatccatctagctcaggccagtattttaaagaagaaagcaaaagttcagaagagatgtcagtagaaaacaaaaataggaccagagatcaagaagccccagaggatgtacaagtcaggccagaggatactccttcagatctcagtgttagtaattccagtgtcatactggaaaacacgatggaagaccatgctgctgaggcatccgggaagcctctaggtgaaattagtgttccactggacagctctttactttgtactttgtcctcagaatctcaccaggaagcagctagtaatgagaatgataaaaaacctggtaactacaaatctatgttacgaccagaggttggcaccacttcacaagattcagctctcttagatcaggaattgtataactccttccatttctggaggactcctcttcctgaaatagatctagacatagagcttgaacagaactctgggggaaaacccagcccagagggaccagaggaagaatctgagggccctgtgcccagttctccaaacatcaccatggccaccagaaaggaactggaagaaatgatagaaaatctagagccccacattgatgatccagatgttaaagcacaagtggaagtgctgtccgctgcactacgtgcttccagcctggatgcacatgaagagaccatcagtatagaaaagagaagtgatttgcaagatgaactggatataaatgagctaccaaattgtaaaataaatcaagaagattctgtgcctttaatcagcgatgctgttgagaatatggactccactcttcactatattcacagcgattcagacttgagcaacaatagcagttttagccctgatgaggaaaggagaactaaagtacaagatgttgtacctcaggcgttgttagatcagtatttatctatgactgacccttctcgtgcacagacggttgacactgaaattgctaagcactgtgcatatagcctccctggtgtggccttgacactcggaagacagaattggcactgcctgagagagacgtatgagactctggcctcagacatgcagtggaaagttcgacgaactctagcattctccatccacgagcttgcagttattcttggagatcaattgacagctgcagatctggttccaatttttaatggatttttaaaagacctcgatgaagtcaggataggtgttcttaaacacttgcatgattttctgaagcttcttcatattgacaaaagaagagaatatctttatcaacttcaggagtttttggtgacagataatagtagaaattggcggtttcgagctgaactggctgaacagctgattttacttctagagttatatagtcccagagatgtttatgactatttacgtcccattgctctgaatctgtgtgcagacaaagtttcttctgttcgttggatttcctacaagttggtcagcgagatggtgaagaagctgcacgcggcaacaccaccaacgttcggagtggacctcatcaatgagcttgtggagaactttggcagatgtcccaagtggtctggtcggcaagcctttgtctttgtctgccagactgtcattgaggatgactgccttcccatggaccagtttgctgtgcatctcatgccgcatctgctaaccttagcaaatgacagggttcctaacgtgcgagtgctgcttgcaaagacattaagacaaactctactagaaaaagactatttcttggcctctgccagctgccaccaggaggctgtggagcagaccatcatggctcttcagatggaccgtgacagcgatgtcaagtattttgcaagcatccaccctgccagtaccaaaatctccgaagatgccatgagcacagcgtcctcaacctactagaaggcttgaatctcggtgtctttcctgcttccatgagagccgaggttcagtgggcattcgccacgcatgtgacctgggatagctttcgggggaggagagaccttcctctcctgcggacttcattgcaggtgcaagttgcctacacccaataccagggatttcaagagtcaagagaaagtacagtaaacactattatcttatcttgactttaaggggaaataatttctcagaggattataattgtcaccgaagccttaaatccttctgtcttcctgactgaatgaaacttgaattggcagagcattttccttatggaagggatgagattcccagagacctgcattgctttctcctggttttatttaacaatcgacaaatgaaattcttacagcctgaaggcagacgtgtgcccagatgtgaaagagaccttcagtatcagccctaactcttctctcccaggaaggacttgctgggctctgtggccagctgtccagcccagccctgtgtgtgaatcgtttgtgacgtgtgcaaatgggaaaggaggggtttttacatctcctaaaggacctgatgccaacacaagtaggattgacttaaactcttaagcgcagcatattgctgtacacatttacagaatggttgctgagtgtctgtgtctgattttttcatgctggtcatgacctgaaggaaatttattagacgtataatgtatgtctggtgtttttaacttgatcatgatcagctctgaggtgcaacttcttcacatactgtacatacctgtgaccactcttgggagtgctgcagtctttaatcatgctgtttaaactgttgtggcacaagttctcttgtccaaataaaatttattaataagatcta

SEQ ID NO: 73124 - DNA, 4015 bp, Homo sapiens
cggcacgagcgcgcgtccaccggctccccggctcgcgccgctccatgtagccccggctccccgggcggccgcggaggagggggcgaccacaagatggcggacctctcgctgcttcaggaggacctgcaggaggacgcagacggatccctggactttgtctcacaagatgaaatgttgacgcccctggggagattggacaagtatgctgcaagtgagaacatatttaacagacaaatggtggcccggagtttgctcgataccttgagggaagtctgcgatgatgaaagagattgtattgctgttttggaaagaattagcagattggccgatgattcagaaccaactgtgagagcggagctgatggaacaggtgcctcacatcgcactgttttgtcaagaaaaccggccttcaataccatatgctttttcaaaattcttactacctattgtggttagataccttgcagatcagaataatcaggtgaggaaaacaagtcaggcagctttgctggctctgttggagcaggagctcattgaacgatttgatgtggagaccaaagtgtgccctgtcctcatagagctgacagccccagatagcaatgatgatgtgaaaacagaagctgtggctataatgtgcaaaatggctcccatggttgggaaggatattacagagcgtcttatcctccctaggttttgtgagatgtgctgcgattgcagaatgtttcacgttcgaaaggtctgtgctgccaattttggagatatttgcagtgtagttggccagcaagctactgaagaaatgttgctgcccagatttttccagctttgttctgataatgtatggggagtccgaaaggcttgtgctgaatgcttcatggcggtttcatgtgcaacatgtcaagaaatccgacggaccaaattatcagcactttttattaatttgatcagtgatccttcacgttgggttcgccaagcagcttttcagtctctgggacctttcatatctacttttgctaatccatctagctcaggccagtattttaaagaagaaagcaaaagttcagaagagatgtcagtagaaaacaaaaataggaccagagatcaagaagccccagaggatgtacaagtcaggccagaggatactccttcagatctcagtgttagtaattccagtgtcatactggaaaacacgatggaagaccatgctgctgaggcatccgggaagcctctaggtgaaattagtgttccactggacagctctttactttgtactttgtcctcagaatctcaccaggaagcagctagtaatgagaatgataaaaaacctggtaactacaaatctatgttacgaccagaggttggcaccacttcacaagattcagctctcttagatcaggaattgtataactccttccatttctggaggactcctcttcctgaaatagatctagacatagagcttgaacagaactctgggggaaaacccagcccagagggaccagaggaagaatctgagggccctgtgcccagttctccaaacatcaccatggccaccagaaaggaactggaagaaatgatagaaaatctagagccccacattgatgatccagatgttaaagcacaagtggaagtgctgtccgctgcactacgtgcttccagcctggatgcacatgaagagaccatcagtatagaaaagagaagtgatttgcaagatgaactggatataaatgagctaccaaattgtaaaataaatcaagaagattctgtgcctttaatcagcgatgctgttgagaggtgctttgtttctgatcggaccatttcactgcagcaagcaacacagtattctgagcagaagatcgggacttgaggccatgttgcggagggccagtgacattatctggactctggagtgtgaggaatatggactccactcttcactatattcacagcgattcagacttgagcaacaatagcagttttagccctgatgaggaaaggagaactaaagtacaagatgttgtacctcaggcgttgttagatcagtatttatctatgactgacccttctcgtgcacagacggttgacactgaaattgctaagcactgtgcatatagcctccctggtgtggccttgacactcggaagacagaattggcactgcctgagagagacgtatgagactctggcctcagacatgcagtggaaagttcgacgaactctagcattctccatccacgagcttgcagttattcttggagatcaattgacagctgcagatctggttccaatttttaatggatttttaaaagacctcgatgaagtcaggataggtgttcttaaacacttgcatgattttctgaagcttcttcatattgacaaaagaagagaatatctttatcaacttcaggagtttttggtgacagataatagtagaaattggcggtttcgagctgaactggctgaacagctgattttacttctagagttatatagtcccagagatgtttatgactatttacgtcccattgctctgaatctgtgtgcagacaaagtttcttctgttcgttggatttcctacaagttggtcagcgagatggtgaagaagctgcacgcggcaacaccaccaacgttcggagtggacctcatcaatgagcttgtggagaactttggcagatgtcccaagtggtctggtcggcaagcctttgtctttgtctgccagactgtcattgaggatgactgccttcccatggaccagtttgctgtgcatctcatgccgcatctgctaaccttagcaaatgacagggttcctaacgtgcgagtgctgcttgcaaagacattaagacaaactctactagaaaaagactatttcttggcctctgccagctgccaccaggaggctgtggagcagaccatcatggctcttcagatggaccgtgacagcgatgtcaagtattttgcaagcatccaccctgccagtaccaaaatctccgaagatgccatgagcacagcgtcctcaacctactagaaggcttgaatctcggtgtctttcctgcttccatgagagccgaggttcagtgggcattcgccacgcatgtgacctgggatagctttcgggggaggagagaccttcctctcctgcggacttcattgcaggtgcaagttgcctacacccaataccagggatttcaagagtcaagagaaagtacagtaaacactattatcttatcttgactttaaggggaaataatttctcagaggattataattgtcaccgaagccttaaatccttctgtcttcctgactgaatgaaacttgaattggcagagcattttccttatggaagggatgagattcccagagacctgcattgctttctcctggttttatttaacaatcgacaaatgaaattcttacagcctgaaggcagacgtgtgcccagatgtgaaagagaccttcagtatcagccctaactcttctctcccaggaaggacttgctgggctctgtggccagctgtccagcccagccctgtgtgtgaatcgtttgtgacgtgtgcaaatgggaaaggaggggtttttacatctcctaaaggacctgatgccaacacaagtaggattgacttaaactcttaagcgcagcatattgctgtacacatttacagaatggttgctgagtgtctgtgtctgattttttcatgctggtcatgacctgaaggaaatttattagacgtataatgtatgtctggtgtttttaacttgatcatgatcagctctgaggtgcaacttcttcacatactgtacatacctgtgaccactcttgggagtgctgcagtctttaatcatgctgtttaaactgttgtggcacaagttctcttgtccaaataaaatttattaataagatctatagagagagatatatacacttttgattgttttctagatgtctaccaataaatgcaatttgtgacctgtattaatgatttaaagtggggaaactagattaaaatatttgtcttttaacta

SEQ ID NO: 73125 - DNA, 3961 bp, Homo sapiens
cggcacgagcgcgcgtccaccggctccccggctcgcgccgctccatgtagccccggctccccgggcggccgcggaggagggggcgaccacaagatggcggacctctcgctgcttcaggaggacctgcaggaggacgcagacggatccctggactttgtctcacaagatgaaatgttgacgcccctggggagattggacaagtatgctgcaagtgagaacatatttaacagacaaatggtggcccggagtttgctcgataccttgagggaagtctgcgatgatgaaagagattgtattgctgttttggaaagaattagcagattggccgatgattcagaaccaactgtgagagcggagctgatggaacaggtgcctcacatcgcactgttttgtcaagaaaaccggccttcaataccatatgctttttcaaaattcttactacctattgtggttagataccttgcagatcagaataatcaggtgaggaaaacaagtcaggcagctttgctggctctgttggagcaggagctcattgaacgatttgatgtggagaccaaagtgtgccctgtcctcatagagctgacagccccagatagcaatgatgatgtgaaaacagaagctgtggctataatgtgcaaaatggctcccatggttgggaaggatattacagagcgtcttatcctccctaggttttgtgagatgtgctgcgattgcagaatgtttcacgttcgaaaggtctgtgctgccaattttggagatatttgcagtgtagttggccagcaagctactgaagaaatgttgctgcccagatttttccagctttgttctgataatgtatggggagtccgaaaggcttgtgctgaatgcttcatggcggtttcatgtgcaacatgtcaagaaatccgacggaccaaattatcagcactttttattaatttgatcagtgatccttcacgttgggttcgccaagcagcttttcagtctctgggacctttcatatctacttttgctaatccatctagctcaggccagtattttaaagaagaaagcaaaagttcagaagagatgtcagtagaaaacaaaaataggaccagagatcaagaagccccagaggatgtacaagtcaggccagaggatactccttcagatctcagtgttagtaattccagtgtcatactggaaaacacgatggaagaccatgctgctgaggcatccgggaagcctctaggtgaaattagtgttccactggacagctctttactttgtactttgtcctcagaatctcaccaggaagcagctagtaatgagaatgataaaaaacctggtaactacaaatctatgttacgaccagaggttggcaccacttcacaagattcagctctcttagatcaggaattgtataactccttccatttctggaggactcctcttcctgaaatagatctagacatagagcttgaacagaactctgggggaaaacccagcccagagggaccagaggaagaatctgagggccctgtgcccagttctccaaacatcaccatggccaccagaaaggaactggaagaaatgatagaaaatctagagccccacattgatgatccagatgttaaagcacaagtggaagtgctgtccgctgcactacgtgcttccagcctggatgcacatgaagagaccatcagtatagaaaagagaagtgatttgcaagatgaactggatataaatgagctaccaaattgtaaaataaatcaagaagattctgtgcctttaatcagcgatgctgttgagaggtgctttgtttctgatcggaccatttcactgcagcaagcaacacagtattctgagcagaagatcgggacttgaggccatgttgcggagggccagtgacattatctggactctggagtgtgaggaatatggactccactcttcactatattcacagcgattcagacttgagcaacaatagcagttttagccctgatgaggtatctatgactgacccttctcgtgcacagacggttgacactgaaattgctaagcactgtgcatatagcctccctggtgtggccttgacactcggaagacagaattggcactgcctgagagagacgtatgagactctggcctcagacatgcagtggaaagttcgacgaactctagcattctccatccacgagcttgcagttattcttggagatcaattgacagctgcagatctggttccaatttttaatggatttttaaaagacctcgatgaagtcaggataggtgttcttaaacacttgcatgattttctgaagcttcttcatattgacaaaagaagagaatatctttatcaacttcaggagtttttggtgacagataatagtagaaattggcggtttcgagctgaactggctgaacagctgattttacttctagagttatatagtcccagagatgtttatgactatttacgtcccattgctctgaatctgtgtgcagacaaagtttcttctgttcgttggatttcctacaagttggtcagcgagatggtgaagaagctgcacgcggcaacaccaccaacgttcggagtggacctcatcaatgagcttgtggagaactttggcagatgtcccaagtggtctggtcggcaagcctttgtctttgtctgccagactgtcattgaggatgactgccttcccatggaccagtttgctgtgcatctcatgccgcatctgctaaccttagcaaatgacagggttcctaacgtgcgagtgctgcttgcaaagacattaagacaaactctactagaaaaagactatttcttggcctctgccagctgccaccaggaggctgtggagcagaccatcatggctcttcagatggaccgtgacagcgatgtcaagtattttgcaagcatccaccctgccagtaccaaaatctccgaagatgccatgagcacagcgtcctcaacctactagaaggcttgaatctcggtgtctttcctgcttccatgagagccgaggttcagtgggcattcgccacgcatgtgacctgggatagctttcgggggaggagagaccttcctctcctgcggacttcattgcaggtgcaagttgcctacacccaataccagggatttcaagagtcaagagaaagtacagtaaacactattatcttatcttgactttaaggggaaataatttctcagaggattataattgtcaccgaagccttaaatccttctgtcttcctgactgaatgaaacttgaattggcagagcattttccttatggaagggatgagattcccagagacctgcattgctttctcctggttttatttaacaatcgacaaatgaaattcttacagcctgaaggcagacgtgtgcccagatgtgaaagagaccttcagtatcagccctaactcttctctcccaggaaggacttgctgggctctgtggccagctgtccagcccagccctgtgtgtgaatcgtttgtgacgtgtgcaaatgggaaaggaggggtttttacatctcctaaaggacctgatgccaacacaagtaggattgacttaaactcttaagcgcagcatattgctgtacacatttacagaatggttgctgagtgtctgtgtctgattttttcatgctggtcatgacctgaaggaaatttattagacgtataatgtatgtctggtgtttttaacttgatcatgatcagctctgaggtgcaacttcttcacatactgtacatacctgtgaccactcttgggagtgctgcagtctttaatcatgctgtttaaactgttgtggcacaagttctcttgtccaaataaaatttattaataagatctatagagagagatatatacacttttgattgttttctagatgtctaccaataaatgcaatttgtgacctgtattaatgatttaaagtggggaaactagattaaaatatttgtcttttaacta

SEQ ID NO: 73126 - DNA, 2529 bp, Homo sapiens
tcttttcatactaacgcagaataatgtacagtagcagataaacatttttaatctcatgaaagcatattagttttctactttttctcttgaaggactaatgatttaccacagtagaaatttttttccagctttttgattgcagtgtcaaaaaagtatatatttcattgataacgtacagtgcaaatggagaacagccttgtaagaatattgcaattgtgtttctcactttgtccatttccttattttgcctgtagcacaagtggaagtgctgtccgctgcactacgtgcttccagcctggatgcacatgaagagaccatcagtatagaaaagagaagtgatttgcaagatgaactggatataaatgagctaccaaattgtaaaataaatcaagaagattctgtgcctttaatcagcgatgctgttgagaatatggactccactcttcactatattcacagcgattcagacttgagcaacaatagcagttttagccctgatgaggaaaggagaactaaagtacaagatgttgtacctcaggcgttgttagatcagtatttatctatgactgacccttctcgtgcacagacggttgacactgaaattgctaagcactgtgcatatagcctccctggtgtggccttgacactcggaagacagaattggcactgcctgagagagacgtatgagactctggcctcagacatgcagtggaaagttcgacgaactctagcattctccatccacgagcttgcagttattcttggagatcaattgacagctgcagatctggttccaatttttaatggatttttaaaagacctcgatgaagtcaggataggtgttcttaaacacttgcatgattttctgaagcttcttcatattgacaaaagaagagaatatctttatcaacttcaggagtttttggtgacagataatagtagaaattggcggtttcgagctgaactggctgaacagctgattttacttctagagttatatagtcccagagatgtttatgactatttacgtcccattgctctgaatctgtgtgcagacaaagtttcttctgttcgttggatttcctacaagttggtcagcgagatggtgaagaagctgcacgcggcaacaccaccaacgttcggagtggacctcatcaatgagcttgtggagaactttggcagatgtcccaagtggtctggtcggcaagcctttgtctttgtctgccagactgtcattgaggatgactgccttcccatggaccagtttgctgtgcatctcatgccgcatctgctaaccttagcaaatgacagggttcctaacgtgcgagtgctgcttgcaaagacattaagacaaactctactagaaaaagactatttcttggcctctgccagctgccaccaggaggctgtggagcagaccatcatggctcttcagatggaccgtgacagcgatgtcaagtattttgcaagcatccaccctgccagtaccaaaatctccgaagatgccatgagcacagcgtcctcaacctactagaaggcttgaatctcggtgtctttcctgcttccatgagagccgaggttcagtgggcattcgccacgcatgtgacctgggatagctttcgggggaggagagaccttcctctcctgcggacttcattgcaggtgcaagttgcctacacccaataccagggatttcaagagtcaagagaaagtacagtaaacactattatcttatcttgactttaaggggaaataatttctcagaggattataattgtcaccgaagccttaaatccttctgtcttcctgactgaatgaaacttgaattggcagagcattttccttatggaagggatgagattcccagagacctgcattgctttctcctggttttatttaacaatcgacaaatgaaattcttacagcctgaaggcagacgtgtgcccagatgtgaaagagaccttcagtatcagccctaactcttctctcccaggaaggacttgctgggctctgtggccagctgtccagcccagccctgtgtgtgaatcgtttgtgacgtgtgcaaatgggaaaggaggggtttttacatctcctaaaggacctgatgccaacacaagtaggattgacttaaactcttaagcgcagcatattgctgtacacatttacagaatggttgctgagtgtctgtgtctgattttttcatgctggtcatgacctgaaggaaatttattagacgtataatgtatgtctggtgtttttaacttgatcatgatcagctctgaggtgcaacttcttcacatactgtacatacctgtgaccactcttgggagtgctgcagtctttaatcatgctgtttaaactgttgtggcacaagttctcttgtccaaataaaatttattaataagatctatagagagagatatatacacttttgattgttttctagatgtctaccaataaatgcaatttgtgacctgtattaatgatttaaagtggggaaactagattaaaatatttgtcttttaacta

SEQ ID NO: 73127 - DNA, 4181 bp, Homo sapiens
cggcacgagcgcgcgtccaccggctccccggctcgcgccgctccatgtagccccggctccccgggcggccgcggaggagggggcgaccacaagatggcggacctctcgctgcttcaggaggacctgcaggaggacgcagacggatccctggactttgtctcacaagatgaaatgttgacgcccctggggagattggacaagtatgctgcaagtgagaacatatttaacagacaaatggtggcccggagtttgctcgataccttgagggaagtctgcgatgatgaaagagattgtattgctgttttggaaagaattagcagattggccgatgattcagaaccaactgtgagagcggagctgatggaacaggtgcctcacatcgcactgttttgtcaagaaaaccggccttcaataccatatgctttttcaaaattcttactacctattgtggttagataccttgcagatcagaataatcaggtgaggaaaacaagtcaggcagctttgctggctctgttggagcaggagctcattgaacgatttgatgtggagaccaaagtgtgccctgtcctcatagagctgacagccccagatagcaatgatgatgtgaaaacagaagctgtggctataatgtgcaaaatggctcccatggttgggaaggatattacagagcgtcttatcctccctaggttttgtgagatgtgctgcgattgcagaatgtttcacgttcgaaaggtctgtgctgccaattttggagatatttgcagtgtagttggccagcaagctactgaagaaatgttgctgcccagatttttccagctttgttctgataatgtatggggagtccgaaaggcttgtgctgaatgcttcatggcggtttcatgtgcaacatgtcaagaaatccgacggaccaaattatcagcactttttattaatttgatcagtgatccttcacgttgggttcgccaagcagcttttcagtctctgggacctttcatatctacttttgctaatccatctagctcaggccagtattttaaagaagaaagcaaaagttcagaagagatgtcagtagaaaacaaaaataggaccagagatcaagaagccccagaggatgtacaagtcaggccagaggatactccttcagatctcagtgttagtaattccagtgtcatactggaaaacacgatggaagaccatgctgctgaggcatccgggaagcctctaggtgaaattagtgttccactggacagctctttactttgtactttgtcctcagaatctcaccaggaagcagctagtaatgagaatgataaaaaacctggtaactacaaatctatgttacgaccagaggttggcaccacttcacaagattcagctctcttagatcaggaattgtataactccttccatttctggaggactcctcttcctgaaatagatctagacatagagcttgaacagaactctgggggaaaacccagcccagagggaccagaggaagaatctgagggccctgtgcccagttctccaaacatcaccatggccaccagaaaggaactggaagaaatgatagaaaatctagagccccacattgatgatccagatgttaaagcacaagtggaagtgctgtccgctgcactacgtgcttccagcctggatgcacatgaagagaccatcagtatagaaaagagaagtgatttgcaagatgaactggatataaatgagctaccaaattgtaaaataaatcaagaagattctgtgcctttaatcagcgatgctgttgagaatatggactccactcttcactatattcacagcgattcagacttgagcaacaatagcagttttagccctgatgaggaaaggagaactaaagtacaagatgttgtacctcaggcgttgttagatcagtatttatctatgactgacccttctcgtgcacagacggttgacactgaaattgctaagcactgtgcatatagcctccctggtgtggccttgacactcggaagacagaattggcactgcctgagagagacgtatgagactctggcctcagacatgcagtggaaagttcgacgaactctagcattctccatccacgagcttgcagttattcttggagatcaattgacagctgcagatctggttccaatttttaatggatttttaaaagacctcgatgaagtcaggataggtgttcttaaacacttgcatgattttctgaagcttcttcatattgacaaaagaagagaatatctttatcaacttcaggagtttttggtgacagataatagtagaaattggcggtttcgagctgaactggctgaacagctgattttacttctagagttatatagtcccagagatgtttatgactatttacgtcccattgctctgaatctgtgtgcagacaaagtttcttctgttcgttggatttcctacaagttggtcagcgagatggtgaagaagctgcacgcggcaacaccaccaacgttcggagtggacctcatcaatgagcttgtggagaactttggcagatgtcccaagtggtctggtcggcaagcctttgtctttgtctgccagactgtcattgaggatgactgccttcccatggaccagtttgctgtgcatctcatgccgcatctgctaaccttagcaaatgacagggttcctaacgtgcgagtgctgcttgcaaagacattaagacaaactctactagaaaaagactatttcttggcctctgccagctgccaccaggaggctgtggagcagaccatcatggctcttcagatggaccgtgacagcgatgtcaagtattttgcaagcatccaccctgccagtaccaaaatctccgaagatgccatgagcacagcgtcctcaacctactagaaggcttgaatctcggtgtctttcctgcttccatgagagccgaggttcagtgggcattcgccacgcatgtgacctgggatagctttcgggggaggagagaccttcctctcctgcggacttcattgcaggtgcaagttgcctacacccaataccagggatttcaagagtcaagagaaagtacagtaaacactattatcttatcttgactttaaggggaaataatttctcagaggattataattgtcaccgaagccttaaatccttctgtcttcctgactgaatgaaacttgaattggcagagcattttccttatggaagggatgagattcccagagacctgcattgctttctcctggttttatttaacaatcgacaaatgaaattcttacagcctgaaggcagacgtgtgcccagatgtgaaagagaccttcagtatcagccctaactcttctctcccaggaaggacttgctgggctctgtggccagctgtccagcccagccctgtgtgtgaatcgtttgtgacgtgtgcaaatgggaaaggaggggtttttacatctcctaaaggacctgatgccaacacaagtaggattgacttaaactcttaagcgcagcatattgctgtacacatttacagaatggttgctgagtgtctgtgtctgattttttcatgctggtcatgacctgaaggaaatttattagacgtataatgtatgtctggtgtttttaacttgatcatgatcagctctgaggtgcaacttcttcacatactgtacatacctgtgaccactcttgggagtgctgcagtctttaatcatgctgtttaaactgttgtggcacaagttctcttgtccaaataaaatttattaataagatctatagagagagatatatacacttttgattgttttctagatgtctaccaataaatgcaatttgtgacctgtattaatgatttaaagtggggaaactagattaaaatatttgtcttttaactagtttattagtttctctggaatctgcctgtgtccctgggtttgggttttgctcttggcagcagcaggtgcctcttgggtgctcctcctgctcctgcctgcagccctaagagcaggtgggtgccgagtgtctggcacagcttggatgccgcccactgaagacagcagaggggggttgtcttgaagctcccgagacacagtcaagcatctctgagcctcgatgtcttcgtcagtaaaatgggaattagtaaaacctgccctgtttctcacagggttgttttgcaggcaaatgag

SEQ ID NO: 73128 - DNA, 3862 bp, Homo sapiens
cggcacgagcgcgcgtccaccggctccccggctcgcgccgctccatgtagccccggctccccgggcggccgcggaggagggggcgaccacaagatggcggacctctcgctgcttcaggaggacctgcaggaggacgcagacggatccctggactttgtctcacaagatgaaatgttgacgcccctggggagattggacaagtatgctgcaagtgagaacatatttaacagacaaatggtggcccggagtttgctcgataccttgagggaagtctgcgatgatgaaagagattgtattgctgttttggaaagaattagcagattggccgatgattcagaaccaactgtgagagcggagctgatggaacaggtgcctcacatcgcactgttttgtcaagaaaaccggccttcaataccatatgctttttcaaaattcttactacctattgtggttagataccttgcagatcagaataatcaggtgaggaaaacaagtcaggcagctttgctggctctgttggagcaggagctcattgaacgatttgatgtggagaccaaagtgtgccctgtcctcatagagctgacagccccagatagcaatgatgatgtgaaaacagaagctgtggctataatgtgcaaaatggctcccatggttgggaaggatattacagagcgtcttatcctccctaggttttgtgagatgtgctgcgattgcagaatgtttcacgttcgaaaggtctgtgctgccaattttggagatatttgcagtgtagttggccagcaagctactgaagaaatgttgctgcccagatttttccagctttgttctgataatgtatggggagtccgaaaggcttgtgctgaatgcttcatggcggtttcatgtgcaacatgtcaagaaatccgacggaccaaattatcagcactttttattaatttgatcagtgatccttcacgttgggttcgccaagcagcttttcagtctctgggacctttcatatctacttttgctaatccatctagctcaggccagtattttaaagaagaaagcaaaagttcagaagagatgtcagtagaaaacaaaaataggaccagagatcaagaagccccagaggatgtacaagtcaggccagaggatactccttcagatctcagtgttagtaattccagtgtcatactggaaaacacgatggaagaccatgctgctgaggcatccgggaagcctctaggtgaaattagtgttccactggacagctctttactttgtactttgtcctcagaatctcaccaggaagcagctagtaatgagaatgataaaaaacctggtaactacaaatctatgttacgaccagaggttggcaccacttcacaagattcagctctcttagatcaggaattgtataactccttccatttctggaggactcctcttcctgaaatagatctagacatagagcttgaacagaactctgggggaaaacccagcccagagggaccagaggaagaatctgagggccctgtgcccagttctccaaacatcaccatggccaccagaaaggaactggaagaaatgatagaaaatctagagccccacattgatgatccagatgttaaagcacaagtggaagtgctgtccgctgcactacgtgcttccagcctggatgcacatgaagagaccatcagtatagaaaagagaagtgatttgcaagatgaactggatataaatgagctaccaaattgtaaaataaatcaagaagattctgtgcctttaatcagcgatgctgttgagaatatggactccactcttcactatattcacagcgattcagacttgagcaacaatagcagttttagccctgatgaggaaaggagaactaaagtacaagatgttgtacctcaggcgttgttagatcagtatttatctatgactgacccttctcgtgcacagacggttgacactgaaattgctaagcactgtgcatatagcctccctggtgtggccttgacactcggaagacagaattggcactgcctgagagagacgtatgagactctggcctcagacatgcagtggaaagttcgacgaactctagcattctccatccacgagcttgcagttattcttggagatcaattgacagctgcagatctggttccaatttttaatggatttttaaaagacctcgatgaagtcaggataggtgttcttaaacacttgcatgattttctgaagcttcttcatattgacaaaagaagagaatatctttatcaacttcaggagtttttggtgacagataatagtagaaattggcggtttcgagctgaactggctgaacagctgattttacttctagagttatatagtcccagagatgtttatgactatttacgtcccattgctctgaatctgtgtgcagacaaagtttcttctgttcgttggatttcctacaagttggtatgtattgaacttttaaaattttagatcagcaaactctaagatcctagaatggaagctgttcctcatttctccatgctcaccctcccaggtcagcgagatggtgaagaagctgcacgcggcaacaccaccaacgttcggagtggacctcatcaatgagcttgtggagaactttggcagatgtcccaagtggtctggtcggcaagcctttgtctttgtctgccagactgtcattgaggatgactgccttcccatggaccagtttgctgtgcatctcatgccgcatctgctaaccttagcaaatgacagggttcctaacgtgcgagtgctgcttgcaaagacattaagacaaactctactagaaaaagactatttcttggcctctgccagctgccaccaggaggctgtggagcagaccatcatggctcttcagatggaccgtgacagcgatgtcaagtattttgcaagcatccaccctgccagtaccaaaatctccgaagatgccatgagcacagcgtcctcaacctactagaaggcttgaatctcggtgtctttcctgcttccatgagagccgaggttcagtgggcattcgccacgcatgtgacctgggatagctttcgggggaggagagaccttcctctcctgcggacttcattgcaggtgcaagttgcctacacccaataccagggatttcaagagtcaagagaaagtacagtaaacactattatcttatcttgactttaaggggaaataatttctcagaggattataattgtcaccgaagccttaaatccttctgtcttcctgactgaatgaaacttgaattggcagagcattttccttatggaagggatgagattcccagagacctgcattgctttctcctggttttatttaacaatcgacaaatgaaattcttacagcctgaaggcagacgtgtgcccagatgtgaaagagaccttcagtatcagccctaactcttctctcccaggaaggacttgctgggctctgtggccagctgtccagcccagccctgtgtgtgaatcgtttgtgacgtgtgcaaatgggaaaggaggggtttttacatctcctaaaggacctgatgccaacacaagtaggattgacttaaactcttaagcgcagcatattgctgtacacatttacagaatggttgctgagtgtctgtgtctgattttttcatgctggtcatgacctgaaggaaatttattagacgtataatgtatgtctggtgtttttaacttgatcatgatcagctctgaggtgcaacttcttcacatactgtacatacctgtgaccactcttgggagtgctgcagtctttaatcatgctgtttaaactgttgtggcacaagttctcttgtccaaataaaatttattaataagatcta

SEQ ID NO: 73129 - DNA, 3749 bp, Homo sapiens
cggcacgagcgcgcgtccaccggctccccggctcgcgccgctccatgtagccccggctccccgggcggccgcggaggagggggcgaccacaagatggcggacctctcgctgcttcaggaggacctgcaggaggacgcagacggatccctggactttgtctcacaagatgaaatgttgacgcccctggggagattggacaagtatgctgcaagtgagaacatatttaacagacaaatggtggcccggagtttgctcgataccttgagggaagtctgcgatgatgaaagagattgtattgctgttttggaaagaattagcagattggccgatgattcagaaccaactgtgagagcggagctgatggaacaggtgcctcacatcgcactgttttgtcaagaaaaccggccttcaataccatatgctttttcaaaattcttactacctattgtggttagataccttgcagatcagaataatcaggtgaggaaaacaagtcaggcagctttgctggctctgttggagcaggagctcattgaacgatttgatgtggagaccaaagtgtgccctgtcctcatagagctgacagccccagatagcaatgatgatgtgaaaacagaagctgtggctataatgtgcaaaatggctcccatggttgggaaggatattacagagcgtcttatcctccctaggttttgtgagatgtgctgcgattgcagaatgtttcacgttcgaaaggtctgtgctgccaattttggagatatttgcagtgtagttggccagcaagctactgaagaaatgttgctgcccagatttttccagctttgttctgataatgtatggggagtccgaaaggcttgtgctgaatgcttcatggcggtttcatgtgcaacatgtcaagaaatccgacggaccaaattatcagcactttttattaatttgatcagtgatccttcacgttgggttcgccaagcagcttttcagtctctgggacctttcatatctacttttgctaatccatctagctcaggccagtattttaaagaagaaagcaaaagttcagaagagatgtcagtagaaaacaaaaataggaccagagatcaagaagccccagaggatgtacaagtcaggccagaggatactccttcagatctcagtgttagtaattccagtgtcatactggaaaacacgatggaagaccatgctgctgaggcatccgggaagcctctaggtgaaattagtgttccactggacagctctttactttgtactttgtcctcagaatctcaccaggaagcagctagtaatgagaatgataaaaaacctggtaactacaaatctatgttacgaccagaggttggcaccacttcacaagattcagctctcttagatcaggaattgtataactccttccatttctggaggactcctcttcctgaaatagatctagacatagagcttgaacagaactctgggggaaaacccagcccagagggaccagaggaagaatctgagggccctgtgcccagttctccaaacatcaccatggccaccagaaaggaactggaagaaatgatagaaaatctagagccccacattgatgatccagatgttaaagcacaagtggaagtgctgtccgctgcactacgtgcttccagcctggatgcacatgaagagaccatcagtatagaaaagagaagtgatttgcaagatgaactggatataaatgagctaccaaattgtaaaataaatcaagaagattctgtgcctttaatcagcgatgctgttgagaatatggactccactcttcactatattcacagcgattcagacttgagcaacaatagcagttttagccctgatgaggaaaggagaactaaagtacaagatgttgtacctcaggcgttgttagatcagtatttatctatgactgacccttctcgtgcacagacggttgacactgaaattgctaagcactgtgcatatagcctccctggtgtggccttgacactcggaagacagaattggcactgcctgagagagacgtatgagactctggcctcagacatgcagtggaaagttcgacgaactctagcattctccatccacgagcttgcagttattcttggagatcaattgacagctgcagatctggttccaatttttaatggatttttaaaagacctcgatgaagtcaggataggtgttcttaaacacttgcatgattttctgaagcttcttcatattgacaaaagaagagaatatctttatcaacttcaggagtttttggtgacagataatagtagaaattggcggtttcgagctgaactggctgaacagctgattttacttctagagttatatagtcccagagatgtttatgactatttacgtcccattgctctgaatctgtgtgcagacaaagtttcttctgttcgttggatttcctacaagttggtcagcgagatggtgaagaagctgcacgcggcaacaccaccaacgttcggagtggacctcatcaatgagcttgtggagaactttggcagatgtcccaagtggtctggtcggcaagcctttgtctttgtctgccagactgtcattgaggatgactgccttcccatggaccagtttgctgtgcatctcatgccgcatctgctaaccttagcaaatgacagggttcctaacgtgcgagtgctgcttgcaaagacattaagacaaactctactagaaaaagctgccaccaggaggctgtggagcagaccatcatggctcttcagatggaccgtgacagcgatgtcaagtattttgcaagcatccaccctgccagtaccaaaatctccgaagatgccatgagcacagcgtcctcaacctactagaaggcttgaatctcggtgtctttcctgcttccatgagagccgaggttcagtgggcattcgccacgcatgtgacctgggatagctttcgggggaggagagaccttcctctcctgcggacttcattgcaggtgcaagttgcctacacccaataccagggatttcaagagtcaagagaaagtacagtaaacactattatcttatcttgactttaaggggaaataatttctcagaggattataattgtcaccgaagccttaaatccttctgtcttcctgactgaatgaaacttgaattggcagagcattttccttatggaagggatgagattcccagagacctgcattgctttctcctggttttatttaacaatcgacaaatgaaattcttacagcctgaaggcagacgtgtgcccagatgtgaaagagaccttcagtatcagccctaactcttctctcccaggaaggacttgctgggctctgtggccagctgtccagcccagccctgtgtgtgaatcgtttgtgacgtgtgcaaatgggaaaggaggggtttttacatctcctaaaggacctgatgccaacacaagtaggattgacttaaactcttaagcgcagcatattgctgtacacatttacagaatggttgctgagtgtctgtgtctgattttttcatgctggtcatgacctgaaggaaatttattagacgtataatgtatgtctggtgtttttaacttgatcatgatcagctctgaggtgcaacttcttcacatactgtacatacctgtgaccactcttgggagtgctgcagtctttaatcatgctgtttaaactgttgtggcacaagttctcttgtccaaataaaatttattaataagatcta

SEQ ID NO: 73130 - DNA, 4061 bp, Homo sapiens
  misc_feature (3772)..(3772): n is a, c, g, or t
  misc_feature (3775)..(3776): n is a, c, g, or t
  misc_feature (3779)..(3779): n is a, c, g, or t
cggcacgagcgcgcgtccaccggctccccggctcgcgccgctccatgtagccccggctccccgggcggccgcggaggagggggcgaccacaagatggcggacctctcgctgcttcaggaggacctgcaggaggacgcagacggatccctggactttgtctcacaagatgaaatgttgacgcccctggggagattggacaagtatgctgcaagtgagaacatatttaacagacaaatggtggcccggagtttgctcgataccttgagggaagtctgcgatgatgaaagagattgtattgctgttttggaaagaattagcagattggccgatgattcagaaccaactgtgagagcggagctgatggaacaggtgcctcacatcgcactgttttgtcaagaaaaccggccttcaataccatatgctttttcaaaattcttactacctattgtggttagataccttgcagatcagaataatcaggtgaggaaaacaagtcaggcagctttgctggctctgttggagcaggagctcattgaacgatttgatgtggagaccaaagtgtgccctgtcctcatagagctgacagccccagatagcaatgatgatgtgaaaacagaagctgtggctataatgtgcaaaatggctcccatggttgggaaggatattacagagcgtcttatcctccctaggttttgtgagatgtgctgcgattgcagaatgtttcacgttcgaaaggtctgtgctgccaattttggagatatttgcagtgtagttggccagcaagctactgaagaaatgttgctgcccagatttttccagctttgttctgataatgtatggggagtccgaaaggcttgtgctgaatgcttcatggcggtttcatgtgcaacatgtcaagaaatccgacggaccaaattatcagcactttttattaatttgatcagtgatccttcacgttgggttcgccaagcagcttttcagtctctgggacctttcatatctacttttgctaatccatctagctcaggccagtattttaaagaagaaagcaaaagttcagaagagatgtcagtagaaaacaaaaataggaccagagatcaagaagccccagaggatgtacaagtcaggccagaggatactccttcagatctcagtgttagtaattccagtgtcatactggaaaacacgatggaagaccatgctgctgaggcatccgggaagcctctaggtgaaattagtgttccactggacagctctttactttgtactttgtcctcagaatctcaccaggaagcagctagtaatgagaatgataaaaaacctggtaactacaaatctatgttacgaccagaggttggcaccacttcacaagattcagctctcttagatcaggaattgtataactccttccatttctggaggactcctcttcctgaaatagatctagacatagagcttgaacagaactctgggggaaaacccagcccagagggaccagaggaagaatctgagggccctgtgcccagttctccaaacatcaccatggccaccagaaaggaactggaagaaatgatagaaaatctagagccccacattgatgatccagatgttaaagcacaagtggaagtgctgtccgctgcactacgtgcttccagcctggatgcacatgaagagaccatcagtatagaaaagagaagtgatttgcaagatgaactggatataaatgagctaccaaattgtaaaataaatcaagaagattctgtgcctttaatcagcgatgctgttgagaatatggactccactcttcactatattcacagcgattcagacttgagcaacaatagcagttttagccctgatgaggaaaggagaactaaagtacaagatgttgtacctcaggcgttgttagatcagtatttatctatgactgacccttctcgtgcacagacggttgacactgaaattgctaagcactgtgcatatagcctccctggtgtggccttgacactcggaagacagaattggcactgcctgagagagacgtatgagactctggcctcagacatgcagtggaaagttcgacgaactctagcattctccatccacgagcttgcagttattcttggagatcaattgacagctgcagatctggttccaatttttaatggatttttaaaagacctcgatgaagtcaggataggtgttcttaaacacttgcatgattttctgaagcttcttcatattgacaaaagaagagaatatctttatcaacttcaggagtttttggtgacagataatagtagaaattggcggtttcgagctgaactggctgaacagctgattttacttctagagttatatagtcccagagatgtttatgactatttacgtcccattgctctgaatctgtgtgcagacaaagtttcttctgttcgttggatttcctacaagttggtcagcgagatggtgaagaagctgcacgcggcaacaccaccaacgttcggagtggacctcatcaatgagcttgtggagaactttggcagatgtcccaagtggtctggtcggcaagcctttgtctttgtctgccagactgtcattgaggatgactgccttcccatggaccagtttgctgtgcatctcatgccgcatctgctaaccttagcaaatgacagggttcctaacgtgcgagtgctgcttgcaaagacattaagacaaactctactagaaaaagactatttcttggcctctgccagctgccaccaggaggctgtggagcagaccatcatggctcttcagatggaccgtgacagcgatgtcaagtattttgcaagcatccaccctgccagtaccaaaatctccgaagatgccatgagcacagcgtcctcaacctactagaaggcttgaatctcggtgtctttcctgcttccatgagagccgaggttcagtgggcattcgccacgcatgtgacctgggatagctttcgggggaggagagaccttcctctcctgcggacttcattgcaggtgcaagttgcctacacccaataccagggatttcaagagtcaagagaaagtacagtaaacactattatcttatcttgactttaaggggaaataatttctcagaggattataattgtcaccgaagccttaaatccttctgtcttcctgactgaatgaaacttgaattggcagagcattttccttatggaagggatgagattcccagagacctgcattgctttctcctggttttatttaacaatcgacaaatgaaattcttacagcctgaaggcagacgtgtgcccagatgtgaaagagaccttcagtatcagccctaactcttctctcccaggaaggacttgctgggctctgtggccagctgtccagcccagccctgtgtgtgaatcgtttgtgacgtgtgcaaatgggaaaggaggggtttttacatctcctaaaggacctgatgccaacacaagtaggattgacttaaactcttaagcgcagcatattgctgtacacatttacagaatggttgctgagtgtctgtgtctgattttttcatgctggtcatgacctgaaggaaatttattagacgtataatgtatgtctggtgtttttaacttgatcatgatcagctctgaggtgcaacttcttcacatactgtacatacctgtgaccactcttgggagtgctgcagtctttaatcatgctgtttaaactgttgtggcacaagttctcttgtccaaataaaatttattaataagatctanaannaanaaaaaaaaaaaagaaaaacaagcaaacaaccagcccacagtaccgagaaacacaagaggcacaacacacaagaccaagaacacaaaggagggcgggcgccacaaagtagacaccaagcaggaggcgacaagaacacaggaccacagagtgtacaaaaaagaggccctacatagcgacagaaatacacgagagcagacgggcccgagatcacacgcagacggcgaaaagcagagtggggcctgagaagacacatcccgcgggagatcacagaccaccaccgcg

SEQ ID NO: 73131 - DNA, 1227 bp, Homo sapiens
ggtctaagctacgaggccgcggtgaaatcggccgagggtctgcagactgtcattgaggatgactgccttcccatggaccagtttgctgtgcatctcatgccgcatctgctaaccttagcaaatgacagggttcctaacgtgcgagtgctgcttgcaaagacattaagacaaactctactagaaaaagactatttcttggcctctgccagctgccaccaggaggctgtggagcagaccatcatggctcttcagatggaccgtgacagcgatgtcaagtattttgcaagcatccaccctgccagtaccaaaatctccgaagatgccatgagcacagcgtcctcaacctactagaaggcttgaatctcggtgtctttcctgcttccatgagagccgaggttcagtgggcattcgccacgcatgtgacctgggatagctttcgggggaggagagaccttcctctcctgcggacttcattgcaggtgcaagttgcctacacccaataccagggatttcaagagtcaagagaaagtacagtaaacactattatcttatcttgactttaaggggaaataatttctcagaggattataattgtcaccgaagccttaaatccttctgtcttcctgactgaatgaaacttgaattggcagagcattttccttatggaagggatgagattcccagagacctgcattgctttctcctggttttatttaacaatcgacaaatgaaattcttacagcctgaaggcagacgtgtgcccagatgtgaaagagaccttcagtatcagccctaactcttctctcccaggaaggacttgctgggctctgtggccagctgtccagcccagccctgtgtgtgaatcgtttgtgacgtgtgcaaatgggaaaggaggggtttttacatctcctaaaggacctgatgccaacacaagtaggattgacttaaactcttaagcgcagcatattgctgtacacatttacagaatggttgctgagtgtctgtgtctgattttttcatgctggtcatgacctgaaggaaatttattagacgtataatgtatgtctggtgtttttaacttgatcatgatcagctctgaggtgcaacttcttcacatactgtacatacctgtgaccactcttgggagtgctgcagtctttaatcatgctgtttaaactgttgtggcacaagttctcttgtccaaataaaatttattaataagatcta

SEQ ID NO: 73132 - DNA, 1160 bp, Homo sapiens
tcttaagcactggggaggactctaagacactggggcatctgctaaccttagcaaatgacagggttcctaacgtgcgagtgctgcttgcaaagacattaagacaaactctactagaaaaagactatttcttggcctctgccagctgccaccaggaggctgtggagcagaccatcatggctcttcagatggaccgtgacagcgatgtcaagtattttgcaagcatccaccctgccagtaccaaaatctccgaagatgccatgagcacagcgtcctcaacctactagaaggcttgaatctcggtgtctttcctgcttccatgagagccgaggttcagtgggcattcgccacgcatgtgacctgggatagctttcgggggaggagagaccttcctctcctgcggacttcattgcaggtgcaagttgcctacacccaataccagggatttcaagagtcaagagaaagtacagtaaacactattatcttatcttgactttaaggggaaataatttctcagaggattataattgtcaccgaagccttaaatccttctgtcttcctgactgaatgaaacttgaattggcagagcattttccttatggaagggatgagattcccagagacctgcattgctttctcctggttttatttaacaatcgacaaatgaaattcttacagcctgaaggcagacgtgtgcccagatgtgaaagagaccttcagtatcagccctaactcttctctcccaggaaggacttgctgggctctgtggccagctgtccagcccagccctgtgtgtgaatcgtttgtgacgtgtgcaaatgggaaaggaggggtttttacatctcctaaaggacctgatgccaacacaagtaggattgacttaaactcttaagcgcagcatattgctgtacacatttacagaatggttgctgagtgtctgtgtctgattttttcatgctggtcatgacctgaaggaaatttattagacgtataatgtatgtctggtgtttttaacttgatcatgatcagctctgaggtgcaacttcttcacatactgtacatacctgtgaccactcttgggagtgctgcagtctttaatcatgctgtttaaactgttgtggcacaagttctcttgtccaaataaaatttattaataagatcta

SEQ ID NO: 73133 - DNA, 1213 bp, Homo sapiens
tctggcactttttcttcctataacaaatcagtttggattactgtttatgtttcagtgtggcttgtttgtacttgtagaaatacccagtttaactgtttacactcgtacttgacggaactctgaagtgttccgttggactggtttcatctgtcctatgcacatgtcatttccagactatttcttggcctctgccagctgccaccaggaggctgtggagcagaccatcatggctcttcagatggaccgtgacagcgatgtcaagtattttgcaagcatccaccctgccagtaccaaaatctccgaagatgccatgagcacagcgtcctcaacctactagaaggcttgaatctcggtgtctttcctgcttccatgagagccgaggttcagtgggcattcgccacgcatgtgacctgggatagctttcgggggaggagagaccttcctctcctgcggacttcattgcaggtgcaagttgcctacacccaataccagggatttcaagagtcaagagaaagtacagtaaacactattatcttatcttgactttaaggggaaataatttctcagaggattataattgtcaccgaagccttaaatccttctgtcttcctgactgaatgaaacttgaattggcagagcattttccttatggaagggatgagattcccagagacctgcattgctttctcctggttttatttaacaatcgacaaatgaaattcttacagcctgaaggcagacgtgtgcccagatgtgaaagagaccttcagtatcagccctaactcttctctcccaggaaggacttgctgggctctgtggccagctgtccagcccagccctgtgtgtgaatcgtttgtgacgtgtgcaaatgggaaaggaggggtttttacatctcctaaaggacctgatgccaacacaagtaggattgacttaaactcttaagcgcagcatattgctgtacacatttacagaatggttgctgagtgtctgtgtctgattttttcatgctggtcatgacctgaaggaaatttattagacgtataatgtatgtctggtgtttttaacttgatcatgatcagctctgaggtgcaacttcttcacatactgtacatacctgtgaccactcttgggagtgctgcagtctttaatcatgctgtttaaactgttgtggcacaagttctcttgtccaaataaaatttattaataagatcta

SEQ ID NO: 73134 - DNA, 648 bp, Homo sapiens
caggaaacaagctagtgacccatgattagcggaaattccgagcatacggtacccgctcctagcaatggcagagcattttccttatggaagggatgagattcccagagacctgcattgctttctcctggttttatttaacaatcgacaaatgaaattcttacagcctgaaggcagacgtgtgcccagatgtgaaagagaccttcagtatcagccctaactcttctctcccaggaaggacttgctgggctctgtggccagctgtccagcccagccctgtgtgtgaatcgtttgtgacgtgtgcaaatgggaaaggaggggtttttacatctcctaaaggacctgatgccaacacaagtaggattgacttaaactcttaagcgcagcatattgctgtacacatttacagaatggttgctgagtgtctgtgtctgattttttcatgctggtcatgacctgaaggaaatttattagacgtataatgtatgtctggtgtttttaacttgatcatgatcagctctgaggtgcaacttcttcacatactgtacatacctgtgaccactcttgggagtgctgcagtctttaatcatgctgtttaaactgttgtggcacaagttctcttgtccaaataaaatttattaataagatcta

SEQ ID NO: 73135 - DNA, 2382 bp, Homo sapiens
cggcacgagcgcgcgtccaccggctccccggctcgcgccgctccatgtagccccggctccccgggcggccgcggaggagggggcgaccacaagatggcggacctctcgctgcttcaggaggacctgcaggaggacgcagacggatccctggactttgtctcacaagatgaaatgttgacgcccctggggagattggacaagtatgctgcaagtgagaacatatttaacagacaaatggtggcccggagtttgctcgataccttgagggaagtctgcgatgatgaaagagattgtattgctgttttggaaagaattagcagattggccgatgattcagaaccaactgtgagagcggagctgatggaacaggtgcctcacatcgcactgttttgtcaagaaaaccggccttcaataccatatgctttttcaaaattcttactacctattgtggttagataccttgcagatcagaataatcaggtgaggaaaacaagtcaggcagctttgctggctctgttggagcaggagctcattgaacgatttgatgtggagaccaaagtgtgccctgtcctcatagagctgacagccccagatagcaatgatgatgtgaaaacagaagctgtggctataatgtgcaaaatggctcccatggttgggaaggatattacagagcgtcttatcctccctaggttttgtgagatgtgctgcgattgcagaatgtttcacgttcgaaaggtctgtgctgccaattttggagatatttgcagtgtagttggccagcaagctactgaagaaatgttgctgcccagatttttccagctttgttctgataatgtatggggagtccgaaaggcttgtgctgaatgcttcatggcggtttcatgtgcaacatgtcaagaaatccgacggaccaaattatcagcactttttattaatttgatcagtgatccttcacgttgggttcgccaagcagcttttcagtctctgggacctttcatatctacttttgctaatccatctagctcaggccagtattttaaagaagaaagcaaaagttcagaagagatgtcagtagaaaacaaaaataggaccagagatcaagaagccccagaggatgtacaagtcaggccagaggatactccttcagatctcagtgttagtaattccagtgtcatactggaaaacacgatggaagaccatgctgctgaggcatccgggaagcctctaggtgaaattagtgttccactggacagctctttactttgtactttgtcctcagaatctcaccaggaagcagctagtaatgagaatgataaaaaacctggtaactacaaatctatgttacgaccagaggttggcaccacttcacaagattcagctctcttagatcaggaattgtataactccttccatttctggaggactcctcttcctgaaatagatctagacatagagcttgaacagaactctgggggaaaacccagcccagagggaccagaggaagaatctgagggccctgtgcccagttctccaaacatcaccatggccaccagaaaggaactggaagaaatgatagaaaatctagagccccacattgatgatccagatgttaaagcacaagtggaagtgctgtccgctgcactacgtgcttccagcctggatgcacatgaagagaccatcagtatagaaaagagaagtgatttgcaagatgaactggatataaatgagctaccaaattgtaaaataaatcaagaagattctgtgcctttaatcagcgatgctgttgagaatatggactccactcttcactatattcacagcgattcagacttgagcaacaatagcagttttagccctgatgaggaaaggagaactaaagtacaagatgttgtacctcaggcgttgttagatcagtatttatctatgactgacccttctcgtgcacagacggttgacactgaaattgctaagcactgtgcatatagcctccctggtgtggccttgacactcggaagacagaattggcactgcctgagagagacgtatgagactctggcctcagacatgcagtggaaagttcgacgaactctagcattctccatccacgagcttgcagttattcttggagatcaattgacagctgcagatctggttccaatttttaatggatttttaaaagacctcgatgaagtcaggataggtgttcttaaacacttgcatgattttctgaagcttcttcatattgacaaaagaagagaatatctttatcaacttcaggagtttttggtgacagataatagtagaaattggcggtttcgagctgaactggctgaacagctgattttacttctagagtatatgccactccagcggggatcctcg

SEQ ID NO: 73136 - DNA, 1806 bp, Homo sapiens
cggcacgagcgcgcgtccaccggctccccggctcgcgccgctccatgtagccccggctccccgggcggccgcggaggagggggcgaccacaagatggcggacctctcgctgcttcaggaggacctgcaggaggacgcagacggatccctggactttgtctcacaagatgaaatgttgacgcccctggggagattggacaagtatgctgcaagtgagaacatatttaacagacaaatggtggcccggagtttgctcgataccttgagggaagtctgcgatgatgaaagagattgtattgctgttttggaaagaattagcagattggccgatgattcagaaccaactgtgagagcggagctgatggaacaggtgcctcacatcgcactgttttgtcaagaaaaccggccttcaataccatatgctttttcaaaattcttactacctattgtggttagataccttgcagatcagaataatcaggtgaggaaaacaagtcaggcagctttgctggctctgttggagcaggagctcattgaacgatttgatgtggagaccaaagtgtgccctgtcctcatagagctgacagccccagatagcaatgatgatgtgaaaacagaagctgtggctataatgtgcaaaatggctcccatggttgggaaggatattacagagcgtcttatcctccctaggttttgtgagatgtgctgcgattgcagaatgtttcacgttcgaaaggtctgtgctgccaattttggagatatttgcagtgtagttggccagcaagctactgaagaaatgttgctgcccagatttttccagctttgttctgataatgtatggggagtccgaaaggcttgtgctgaatgcttcatggcggtttcatgtgcaacatgtcaagaaatccgacggaccaaattatcagcactttttattaatttgatcagtgatccttcacgttgggttcgccaagcagcttttcagtctctgggacctttcatatctacttttgctaatccatctagctcaggccagtattttaaagaagaaagcaaaagttcagaagagatgtcagtagaaaacaaaaataggaccagagatcaagaagccccagaggatgtacaagtcaggccagaggatactccttcagatctcagtgttagtaattccagtgtcatactggaaaacacgatggaagaccatgctgctgaggcatccgggaagcctctaggtgaaattagtgttccactggacagctctttactttgtactttgtcctcagaatctcaccaggaagcagctagtaatgagaatgataaaaaacctggtaactacaaatctatgttacgaccagaggttggcaccacttcacaagattcagctctcttagatcaggaattgtataactccttccatttctggaggactcctcttcctgaaatagatctagacatagagcttgaacagaactctgggggaaaacccagcccagagggaccagaggaagaatctgagggccctgtgcccagttctccaaacatcaccatggccaccagaaaggaactggaagaaatgatagaaaatctagagccccacattgatgatccagatgttaaagcacaagtggaagtgctgtccgctgcactacgtgcttccagcctggatgcacatgaagagaccatcagtatagaaaagagaagtgatttgcaagatgaactggatataaatgagctaccaaattgtaaaataaatcaagaagatctagtgctcatcagggattgctatgaggcactgcgccccaggtacctg

SEQ ID NO: 73137 - DNA, 1107 bp, Homo sapiens
cggcacgagcgcgcgtccaccggctccccggctcgcgccgctccatgtagccccggctccccgggcggccgcggaggagggggcgaccacaagatggcggacctctcgctgcttcaggaggacctgcaggaggacgcagacggatccctggactttgtctcacaagatgaaatgttgacgcccctggggagattggacaagtatgctgcaagtgagaacatatttaacagacaaatggtggcccggagtttgctcgataccttgagggaagtctgcgatgatgaaagagattgtattgctgttttggaaagaattagcagattggccgatgattcagaaccaactgtgagagcggagctgatggaacaggtgcctcacatcgcactgttttgtcaagaaaaccggccttcaataccatatgctttttcaaaattcttactacctattgtggttagataccttgcagatcagaataatcaggtgaggaaaacaagtcaggcagctttgctggctctgttggagcaggagctcattgaacgatttgatgtggagaccaaagtgtgccctgtcctcatagagctgacagccccagatagcaatgatgatgtgaaaacagaagctgtggctataatgtgcaaaatggctcccatggttgggaaggatattacagagcgtcttatcctccctaggttttgtgagatgtgctgcgattgcagaatgtttcacgttcgaaaggtctgtgctgccaattttggagatatttgcagtgtagttggccagcaagctactgaagaaatgttgctgcccagatttttccagctttgttctgataatgtatggggagtccgaaaggcttgtgctgaatgcttcatggcggtttcatgtgcaacatgtcaagaaatccgacggaccaaattatcagcactttttattaatttgatcagtgatccttcacgttgggttcgccaagcagcttttcagtctctgggacctttcatatctacttttgctaatccatctagctcaggccagtattttaaagaagatatgaaaggtcccagagactgaaaagctgcttgatcccaacgaattccggaccagtaccaa

SEQ ID NO: 73138 - DNA, 403 bp, Homo sapiens
gtgaatgaacactctaggtctccgtagagcagtttaaaaactgtgtctgtccgtgtgggcagttaattatgtaatttttgatttgagttcccaagtacgtggaattttggttaaaaagcaataactaaaatttgtacctgtggtcactcagagattttgttagccagtagtcgagtttttggctacattgacagagaagcctagagcagctgtttctcttccccagactgtcattgaggatgactgccttcccatggaccagtttgctgtgcatctcatgccgcatctgctaaccttagcaaatgacagggttcctaacgtgcgagtgctgcttgcaaagacattaagacaaactctactagaaaaaggtaggtagtgactccactagaagaagcgtgtgagt

SEQ ID NO: 73139 - DNA, 630 bp, Homo sapiens
aggaaaaccttggggagtagagatgaatattttagaagaaacagaagtaatatttacactcaagcagattttaatatattttgtgagatagcaaataagtatctttcctactactatcttaaaattgtttttattttattttccttgtgtaatgtaagcaaataggctttaggtctcagctttgcaatatgtcgttggagtagagaggtaatacaaataaccctaaaaataaaataatttaaatgttgttatgtatcttaaaatgattgtaggaatttctgtttccactacttttctttagttatttattattgaaattagcatggtgttatagaatcccaggattcttaaatgttaccttctctaactaatatatattgcttgactatctagacttatacttaacaggtatttacatctttgaacacagaacagctgatggagaaagaagcattataaataatatacataaactcagtttgtacagataatccgtaatttttaatgtttaacttgtctaaatgctatatgtaatatctttcatcagtttttttaaagtaattatcctttcatattgtttttttcccaccaaataaaacaataaaaggaccagagatcaagaagccccag

SEQ ID NO: 73140 - DNA, 422 bp, Homo sapiens
cagatttgtactgcttcagacaggcaaggggtacattttagtttcaaagtgttataaggagtatttctgatgtctctgatagttggtgtggatgactacagctcagagtctgatgtgattattataccttcagccctggactttgtctcacaagatgaaatgttgacgcccctggggagattggacaagtatgctgcaagtgagaacatatttaacaggtatgtgcatattctttttgttaaagtggaagtggaagggtggttttattaacttcagtagggaaaatgaaagtatccactttaaaggaggtattattaacaggcacaatctgagtcaccaagttttattcataatcacagcatgagcagttttgtacttgtttattctttgatcctagtaagcatacaacatgctttctttgc

SEQ ID NO: 73141 - DNA, 1679 bp, Homo sapiens
cggcacgagcgcgcgtccaccggctccccggctcgcgccgctccatgtagccccggctccccgggcggccgcggaggagggggcgaccacaagatggcggacctctcgctgcttcaggaggacctgcaggaggacgcagacggatccctggactttgtctcacaagatgaaatgttgacgcccctggggagattggacaagtatgctgcaagtgagaacatatttaacagacaaatggtggcccggagtttgctcgataccttgagggaagtctgcgatgatgaaagagattgtattgctgttttggaaagaattagcagattggccgatgattcagaaccaactgtgagagcggagctgatggaacaggtgcctcacatcgcactgttttgtcaagaaaaccggccttcaataccatatgctttttcaaaattcttactacctattgtggttagataccttgcagatcagaataatcaggtgaggaaaacaagtcaggcagctttgctggctctgttggagcaggagctcattgaacgatttgatgtggagaccaaagtgtgccctgtcctcatagagctgacagccccagatagcaatgatgatgtgaaaacagaagctgtggctataatgtgcaaaatggctcccatggttgggaaggatattacagagcgtcttatcctccctaggttttgtgagatgtgctgcgattgcagaatgtttcacgttcgaaaggtctgtgctgccaattttggagatatttgcagtgtagttggccagcaagctactgaagaaatgttgctgcccagatttttccagctttgttctgataatgtatggggagtccgaaaggcttgtgctgaatgcttcatggcggtttcatgtgcaacatgtcaagaaatccgacggaccaaattatcagcactttttattaatttgatcagtgatccttcacgttgggttcgccaagcagcttttcagtctctgggacctttcatatctacttttgctaatccatctagctcaggccagtattttaaagaagaaagcaaaagttcagaagagatgtcagtagaaaacaaaaataggaccagagatcaagaagccccagaggatgtacaagtcaggccagaggatactccttcagatctcagtgttagtaattccagtgtcatactggaaaacacgatggaagaccatgctgctgaggcatccgggaagcctctaggtgaaattagtgttccactggacagctctttactttgtactttgtcctcagaatctcaccaggaagcagctagtaatgagaatgataaaaaacctggtaactacaaatctatgttacgaccagaggttggcaccacttcacaagattcagctctcttagatcaggaattgtataactccttccatttctggaggactcctcttcctgaaatagatctagacatagagcttgaacagaactctgggggaaaacccagcccagagggaccagaggaagaatctgagggccctgtgcccagttctccaaacatcaccatggccaccagaaaggaactggaagaaatgatagaaaatctagagccccacattgatgatccagatgttaaaggtatggaagtcaatcaagttatttattctgaaattgattaaaaatattagtgtctatcttaaaa

SEQ ID NO: 73142 - DNA, 1039 bp, Homo sapiens
  misc_feature (1006)..(1006): n is a, c, g, or t
  misc_feature (1009)..(1009): n is a, c, g, or t
cggcacgagcgcgcgtccaccggctccccggctcgcgccgctccatgtagccccggctccccgggcggccgcggaggagggggcgaccacaagatggcggacctctcgctgcttcaggaggacctgcaggaggacgcagacggatccctggactttgtctcacaagatgaaatgttgacgcccctggggagattggacaagtatgctgcaagtgagaacatatttaacagacaaatggtggcccggagtttgctcgataccttgagggaagtctgcgatgatgaaagagattgtattgctgttttggaaagaattagcagattggccgatgattcagaaccaactgtgagagcggagctgatggaacaggtgcctcacatcgcactgttttgtcaagaaaaccggccttcaataccatatgctttttcaaaattcttactacctattgtggttagataccttgcagatcagaataatcaggtgaggaaaacaagtcaggcagctttgctggctctgttggagcaggagctcattgaacgatttgatgtggagaccaaagtgtgccctgtcctcatagagctgacagccccagatagcaatgatgatgtgaaaacagaagctgtggctataatgtgcaaaatggctcccatggttgggaaggatattacagagcgtcttatcctccctaggttttgtgagatgtgctgcgattgcagaatgtttcacgttcgaaaggtctgtgctgccaattttggagatatttgcagtgtagttggccagcaagctactgaagaaatgttgctgcccagatttttccagctttgttctgataatgtatggggagtccgaaaggcttgtgctgaatgcttcatggcggtttcatgtgcaacatgtcaagaaatccgacggaccaaattatcagcactttttattaatttgatcagtgatccttcacgttggtcgccaagcagcttttcagtctctgggcctgaagaggcagacctanagnccactctgaatgccaggggggatcctaaga

SEQ ID NO: 73143 - DNA, 2440 bp, Homo sapiens
tccttgtagcggacattttgtttctgtcaggctgtccctggccggggttctgtaacgcttgtgtgggccgcaggtggaggtgttgggaaagcgcggaggagatgttgtccccagtgtcccgagacgcgtctgatgctctgcagggacggaagtgcctgcgtccccgatcgagacgcctgccgctcccggcagctgtccgcgcccacggtcctatggcggagctaacggactccgcgcggggctgtgtggtctttgaggatgtgtttgtatacttctctcgggaagaatgggagcttcttgatgatgctcagagacttttgtaccatgatgtgatgctggagaactttgcacttttagcctcactgggaattgcattttccagatcacgtgcagtcatgaaactagagcgaggagaagagccctgggtgtatgaccaggtggatatgacttcagccacagaaagagaggcccagaggggacttagacctggttgttggcatggagtggaggatgaagaggtatcttctgagcagagcatttttgtagtaggagtgtcagaggtcaggactctcatggcagagctggagtctcacccatgtgacatatgtggcccaatattgaaagataccttacacctggctaaataccatgggggaaaagccaggcagaaaccatacttgtgtggggcatgtggaaagcaattctggttcagtacagactttgaccagcaccagaaccagcccaatggagggaaacttttcccaaggaaggagggcagagactctgtgaaaagctgcagagtccatgtgccagagaagaccctcacatgtgggaaaggtaggagagacttttcagccacatctggccttcttcagcatcaggcctctctcagcagcatgaagccccacaagagcactaagcttgtgagtggctttctcatgggacagaggtatcacaggtgtggtgaatgtgggaaagccttcacccgcaaagacacacttgctcggcatcagagaatccacactggagaaaggccttatgagtgtaacgaatgtgggaaattcttcagccaaagctatgacctctttaaacaccagacagttcacactggagaaaggccatacgagtgcagcgaatgtgggaaattctttagacaaatctccggcctgattgagcacaggcgagttcacacgggtgaaagactctatcagtgtggcaaatgtgggaaattttttagcagtaagtctaatctcattcgacaccaggaagttcacacaggagccaggccttatgtatgcagcgaatgtgggaaagagttcagtcggaaacacacacttgttctgcaccaacgaactcacactggagaaaggccttatgagtgcagtgaatgtgggaaggcctttagccaaagctcccaccttaatgtacactggagaattcacagcagtgattatgagtgtagcagatgtggtaaagctttcagctgcatctccaaactcattcagcaccagaaagttcactctggagaaaagccttatgagtgcagcaagtgcgggaaagccttcactcaaagacccaacctcatcaggcactggaaagtccacactggggaaaggccttatgtgtgtagtgagtgcgggagagaattcatccggaaacagacacttgttctgcaccagagggttcatgctggagaaaagctttaagagtgtagcaaatgtgggggaaagtcttaggccaatgcccccgacttactatatggtggggaactagcagtagttaatgagtgcagcagatgcaggaaagccttcccctggaggctgaaccttacccgccattgggaatttcacaccggacacaggccttagcagtctaagcaatgtgctgtctctgttcagcccaacagctcaccctagagtggaactctgggagcagccattgggagggaaccatcagtaagaagtgaaacttcatagatatggacattcccactggggagattccctgtgagtgccaagtatgtgagatgctttcagcagctgtgttgcactttttaaatggctattggcctttgctggggcaggagccatctgctcctaccatctggcagaatcatactgcgtttaccatttaccccagcatgcttgtgacgggcagacctctcttctctccccagtccctaaaaggtgttgtgagtggtctcacagcccactaggggtcttaatttcctctcttttgatgtaaatggcatggaaataatcagctttgttcaagaggacacagaaggattctgcaaatagcctgcagagacttacctgtgttgattgatttcatatgatgctcgttatggatatatccaatatccaagtcacccagctctggaactgcctgcttcacattgctcatgataataaaggcctgttctttaagccaccaaaaa

SEQ ID NO: 73144 - DNA, 2768 bp, Homo sapiens
catgcccagctaatttttgtattttttttttttttttttttagtagagacggggtttcaccatgttggccaggatagtctcgctctcttgacctcgtgatctgccttcggcaagcactcttaatgctatgtgtagagtgacatttggggagtccagggagatggggtgggccagtagggtgggggggaagctggagatgtgagggagacatagtccagagtgatgtgtatgagaggagggagtgtgagctgacggtcctgtgacttggggcttaactgagaaaaatgagcctaggttcatacctgggatttgtgatcttgggtaccccaggggagttggctggctcagagtgtaaatggcatttatctgtcagcctgtctgttgttgtggtgggctgacacagtgattgctggggtgatcaggagagagtgaggatcagtggtactagtgcctggtatctctgacttgggaacctgggaggttagttagcaggatgttgtgggtaggtagactggggatcattggtcaagagactttttatggtccttcctgtcccttttgttgcagggctgtgtggtctttgaggatgtgtttgtatacttctctcgggaagaatgggagcttcttgatgatgctcagagacttttgtaccatgatgtgatgctggagaactttgcacttttagcctcactgggaattgcattttccagatcacgtgcagtcatgaaactagagcgaggagaagagccctgggtgtatgaccaggtggatatgacttcagccacagaaagagaggcccagaggggacttagacctggttgttggcatggagtggaggatgaagaggtatcttctgagcagagcatttttgtagtaggagtgtcagaggtcaggactctcatggcagagctggagtctcacccatgtgacatatgtggcccaatattgaaagataccttacacctggctaaataccatgggggaaaagccaggcagaaaccatacttgtgtggggcatgtggaaagcaattctggttcagtacagactttgaccagcaccagaaccagcccaatggagggaaacttttcccaaggaaggagggcagagactctgtgaaaagctgcagagtccatgtgccagagaagaccctcacatgtgggaaaggtaggagagacttttcagccacatctggccttcttcagcatcaggcctctctcagcagcatgaagccccacaagagcactaagcttgtgagtggctttctcatgggacagaggtatcacaggtgtggtgaatgtgggaaagccttcacccgcaaagacacacttgctcggcatcagagaatccacactggagaaaggccttatgagtgtaacgaatgtgggaaattcttcagccaaagctatgacctctttaaacaccagacagttcacactggagaaaggccatacgagtgcagcgaatgtgggaaattctttagacaaatctccggcctgattgagcacaggcgagttcacacgggtgaaagactctatcagtgtggcaaatgtgggaaattttttagcagtaagtctaatctcattcgacaccaggaagttcacacaggagccaggccttatgtatgcagcgaatgtgggaaagagttcagtcggaaacacacacttgttctgcaccaacgaactcacactggagaaaggccttatgagtgcagtgaatgtgggaaggcctttagccaaagctcccaccttaatgtacactggagaattcacagcagtgattatgagtgtagcagatgtggtaaagctttcagctgcatctccaaactcattcagcaccagaaagttcactctggagaaaagccttatgagtgcagcaagtgcgggaaagccttcactcaaagacccaacctcatcaggcactggaaagtccacactggggaaaggccttatgtgtgtagtgagtgcgggagagaattcatccggaaacagacacttgttctgcaccagagggttcatgctggagaaaagctttaagagtgtagcaaatgtgggggaaagtcttaggccaatgcccccgacttactatatggtggggaactagcagtagttaatgagtgcagcagatgcaggaaagccttcccctggaggctgaaccttacccgccattgggaatttcacaccggacacaggccttagcagtctaagcaatgtgctgtctctgttcagcccaacagctcaccctagagtggaactctgggagcagccattgggagggaaccatcagtaagaagtgaaacttcatagatatggacattcccactggggagattccctgtgagtgccaagtatgtgagatgctttcagcagctgtgttgcactttttaaatggctattggcctttgctggggcaggagccatctgctcctaccatctggcagaatcatactgcgtttaccatttaccccagcatgcttgtgacgggcagacctctcttctctccccagtccctaaaaggtgttgtgagtggtctcacagcccactaggggtcttaatttcctctcttttgatgtaaatggcatggaaataatcagctttgttcaagaggacacagaaggattctgcaaatagcctgcagagacttacctgtgttgattgatttcatatgatgctcgttatggatatatccaatatccaagtcacccagctctggaactgcctgcttcacattgctcatgataataaaggcctgttctttaagccaccaaaaa

SEQ ID NO: 73145 - DNA, 2434 bp, Homo sapiens
gtggaggcggaatatgtgagtacctcgattacgtagaatgggccgagattatgaggcggtacagtcgattttgccggcaacccgcagattcggttttatgacagtcggccaagggggcatttgtcgttggacctgacacctgggaggttagttagcaggatgttgtgggtaggtagactggggatcattggtcaagagactttttatggtccttcctgtcccttttgttgcagggctgtgtggtctttgaggatgtgtttgtatacttctctcgggaagaatgggagcttcttgatgatgctcagagacttttgtaccatgatgtgatgctggagaactttgcacttttagcctcactgggaattgcattttccagatcacgtgcagtcatgaaactagagcgaggagaagagccctgggtgtatgaccaggtggatatgacttcagccacagaaagagaggcccagaggggacttagacctggttgttggcatggagtggaggatgaagaggtatcttctgagcagagcatttttgtagtaggagtgtcagaggtcaggactctcatggcagagctggagtctcacccatgtgacatatgtggcccaatattgaaagataccttacacctggctaaataccatgggggaaaagccaggcagaaaccatacttgtgtggggcatgtggaaagcaattctggttcagtacagactttgaccagcaccagaaccagcccaatggagggaaacttttcccaaggaaggagggcagagactctgtgaaaagctgcagagtccatgtgccagagaagaccctcacatgtgggaaaggtaggagagacttttcagccacatctggccttcttcagcatcaggcctctctcagcagcatgaagccccacaagagcactaagcttgtgagtggctttctcatgggacagaggtatcacaggtgtggtgaatgtgggaaagccttcacccgcaaagacacacttgctcggcatcagagaatccacactggagaaaggccttatgagtgtaacgaatgtgggaaattcttcagccaaagctatgacctctttaaacaccagacagttcacactggagaaaggccatacgagtgcagcgaatgtgggaaattctttagacaaatctccggcctgattgagcacaggcgagttcacacgggtgaaagactctatcagtgtggcaaatgtgggaaattttttagcagtaagtctaatctcattcgacaccaggaagttcacacaggagccaggccttatgtatgcagcgaatgtgggaaagagttcagtcggaaacacacacttgttctgcaccaacgaactcacactggagaaaggccttatgagtgcagtgaatgtgggaaggcctttagccaaagctcccaccttaatgtacactggagaattcacagcagtgattatgagtgtagcagatgtggtaaagctttcagctgcatctccaaactcattcagcaccagaaagttcactctggagaaaagccttatgagtgcagcaagtgcgggaaagccttcactcaaagacccaacctcatcaggcactggaaagtccacactggggaaaggccttatgtgtgtagtgagtgcgggagagaattcatccggaaacagacacttgttctgcaccagagggttcatgctggagaaaagctttaagagtgtagcaaatgtgggggaaagtcttaggccaatgcccccgacttactatatggtggggaactagcagtagttaatgagtgcagcagatgcaggaaagccttcccctggaggctgaaccttacccgccattgggaatttcacaccggacacaggccttagcagtctaagcaatgtgctgtctctgttcagcccaacagctcaccctagagtggaactctgggagcagccattgggagggaaccatcagtaagaagtgaaacttcatagatatggacattcccactggggagattccctgtgagtgccaagtatgtgagatgctttcagcagctgtgttgcactttttaaatggctattggcctttgctggggcaggagccatctgctcctaccatctggcagaatcatactgcgtttaccatttaccccagcatgcttgtgacgggcagacctctcttctctccccagtccctaaaaggtgttgtgagtggtctcacagcccactaggggtcttaatttcctctcttttgatgtaaatggcatggaaataatcagctttgttcaagaggacacagaaggattctgcaaatagcctgcagagacttacctgtgttgattgatttcatatgatgctcgttatggatatatccaatatccaagtcacccagctctggaactgcctgcttcacattgctcatgataataaaggcctgttctttaagccaccaaaaa

SEQ ID NO: 73146 - DNA, 2127 bp, Homo sapiens
agcgcgcgcgcgcccggcggcaaacccaattcctgtgcagggtggggacgagagattcgcgggcccgtaggtgtggagcggggcgcggagggatccgtgggagccgcagtgcggcggcgcgcgggccgggtggggcggggccgagcgaggcggggcgcgcgcggcggccgttgagggaccgttggggcgggaggcggcggcggcggcggcgcgcgctgcgggcagtgagtgtggaggcgcggacgcgcggcggagctggaactgctgcagctgctgccgccgccggaggaaccttgatccccgtgctccggacaccccgggcctcgccatggctgaccagctgactgaggagcagattgcagagttcaaggaggccttctccctctttgacaaggatggagatggcactatcaccaccaaggagttggggacagtgatgagatccctgggacagaaccccactgaagcagagctgcaggatatgatcaatgaggtggatgcagatgggaacgggaccattgacttcccggagttcctgaccatgatggccagaaagatgaaggacacagacagtgaggaggagatccgagaggcgttccgtgtctttgacaaggatgggaatggctacatcagcgccgcagagctgcgtcacgtaatgacgaacctgggggagaagctgaccagtctctctccatgcccctcatctcttccttttgccctcgcctcttccatccacgtcttccaaggcctgatgcattcataagttgaagccctccccagatccccttggggagcctctgccctcctccagcccggatggctctcctccattttggtttgtttcctcttgtttgtcatcttattttgggtgctggggtggctgccagccctgtcccgggacctgctgggagggacaagaggccctcccccaggcagaagagcatgccctttgccgttgcatgcaaccagccctgtgattccacgtgcagatcccagcagcctgttggggcaggggtgccaagagaggcattccagaaggactgagggggcgttgaggaattgtggcgttgactggatgtggcccaggagggggtcgagggggccaactcacagaaggggactgacagtgggcaacactcacatcccactggctgctgttctgaaaccatctgattggctttctgaggtttggctgggtggggactgctcatttggccactctgcagattggacttgcccgcgttcctgaagcgctctcgagctgttctgtaaatacctggtgctaacatcccatgccgctccctcctcacgatgcacccaccgccctgagggcccgtcctaggaatggatgtggggatggtcgctttgtaatgtgctggttctctttttttttctttcccctctatggcccttaagactttcattttgttcagaaccatgctgggctagctaaagggtggggagagggaagatgggccccaccacgctctcaagagaacgcacctgcaataaaacagtcttgtcggccagctgcccaggggacggcagctacagcagcctctgcgtcctggtccgccagcacctcccgcttctccgtggtgacttggcgccgcttcctcacatctgtgctccgtgccctcttccctgcctcttccctcgcccacctgcctgcccccatactcccccagcggagagcatgatccgtgcccttgcttctgactttcgcctctgggacaagtaagtcaatgtgggcagttcagtcgtctgggttttttccccttttctgttcatttcatctggctccccccaccacctccccaccccaccccccaccccctgcttcccctcactgcccaggtcgatcaagtggcttttcctgggacctgcccagctttgagaatctcttctcatccaccctctggcacccagcctctgagggaaggagggatggggcatagtgggagacccagccaagagctgagggtaagggcaggtaggcgtgaggctgtggacattttcggaatgttttggttttgttttttttaaaccgggcaatattgtgttcagttcaagctgtgaagaaaaatatatatcaatgttttccaataaaatacagtgactacctga

SEQ ID NO: 73147 - DNA, 621 bp, Homo sapiens
agccgcagtgacttagagatcccccgggccagtatgtggcccaggagggggtcgagggggccaactcacagaaggggactgacagtgggcaacactcacatcccactggctgctgttctgaaaccatctgattggctttctgaggtttggctgggtggggactgctcatttggccactctgcagattggacttgcccgcgttcctgaagcgctctcgagctgttctgtaaatacctggtgctaacatcccatgccgctccctcctcacgatgcacccaccgccctgagggcccgtcctaggaatggatgtggggatggtcgctttgtaatgtgctggttctctttttttttctttcccctctatggcccttaagactttcattttgttcagaaccatgctgggctagctaaagggtggggagagggaagatgggccccaccacgctctcaagagaacgcacctgcaataaaacagtcttgtcggccagctgcccaggggacggcagctacagcagcctctgcgtcctggtccgccagcacctcccgcttctccgtggtgacttggcgccgcttcctcacatctgtcgtactgcccgggggatctctaaagtcgactgcagg

SEQ ID NO: 73148 - DNA, 415 bp, Homo sapiens
aaatggagtttttgccagctggcaaggcagaatccataggcggccatcgtcatctgaaccagttcatagctcatgctgctctagacctcgtagatgagaacctccccaccccaccccccaccccctgcttcccctcactgcccaggtcgatcaagtggcttttcctgggacctgcccagctttgagaatctcttctcatccaccctctggcacccagcctctgagggaaggagggatggggcatagtgggagacccagccaagagctgagggtaagggcaggtaggcgtgaggctgtggacattttcggaatgttttggttttgttttttttaaaccgggcaatattgtgttcagttcaagctgtgaagaaaaatatatatcaatgttttccaataaaatacagtgactacctga

SEQ ID NO: 73149 - DNA, 316 bp, Homo sapiens
gagcctggtccgggagtggagagagaagggaacgggaccattgacttcccggagttcctgaccatgatggccagaaagatgaaggacacagacagtgaggaggagatccgagaggcgttccgtgtctttgacaaggatgggaatggctacatcagcgccgcagagctgcgtcacgtaatgacgaacctgggggagaagctgaccagagagatcaagagaacgggcatcgccagctgcccggggggccttcactttgcagtcatcatctgtacaaactcttcataattgacctggccatctccatcgatgtcagcct

SEQ ID NO: 73150 - DNA, 296 bp, Homo sapiens
  misc_feature (269)..(269): n is a, c, g, or t
  misc_feature (279)..(279): n is a, c, g, or t
ctgaccccttgtgcttcccaggtgaggtgatgcctcgccctgcttcggctcacgctcggtgcgctgcaccactgtcctgaacccactgtcgagttggggacagtgatgagatccctgggacagaaccccactgaagcagagctgcaggatatgatcaatgaggtggatgcagatgggaacgggaccattgacttcccggagttcctgaccatgatggccagaaagatgaaggacacatattatgtagtaccatagttagtaaattcgtnaaaaccttgngaagccattattttggt

SEQ ID NO: 73151 - DNA, 449 bp, Homo sapiens
ttctccatcctttccccaccttccagggaacgggaccattgacttcccggagttcctgaccatgatggccagaaagatgaaggacacagacagtgaggaggagatccgagaggcgttccgtgtctttgacaaggatgggaatggctacatcagcgccgcagagctgcgtcacgtaatgacgaacctgggggagaagctgaccgatgaggaggtggatgagatgatcagggaggctgacatcgatggagatggccaggtcaattatgaagagtttgtacagatgatgactgcaaagtgaaggccccccgggcagctggcgatgcccgttctcttgatctctctcttctcgcgcgcgcactctctcttcaacactcccctgcgtaccccggttctagcaaacaccaattgattgactgagaatctgataaagcaacaaaagatttgtccca

SEQ ID NO: 73152 - DNA, 645 bp, Homo sapiens
gctgtggccttcccactcagcactgctagctcctcatcctcctggcttggcagccgtcccctcgctttccatccccccatcaaccccacgcactgtccgtcagccatgttctgctgccgaccacccccacgctcaccacacgcagtggctcagctcctttggaagctggtagcacccacggcaaggaacagggctgccagtcagaagggagtggatgcctgcatttcctcttcaggccggccagaggcattctgcagcctcccctcctcgtcccagccagccaaccctggctaacacactcagacaaagaatcctttcggctctcattcactccatgactttggttcatttcatcatttcaagggagaagtcaaagccagggaccaaacagaaatgtagaatcatctaaggacagctgtcagaccattttccccactgtcttcactggctggccagaaaaatagcttcacctagcacagtgttgatgttcaataactgttgaatgaaggttggaagggctttgccctgagcactgaggagagagagctggttgcgtgggacttgaagtctgtctcagtttctttaggtatctgagtgcctgtaaggatttttaagggcttgctagtttaaggcaggacctctata

SEQ ID NO: 73153 - DNA, 2321 bp, Homo sapiens
gaaaaggggaaaaaacccagacgactgaactgcccacattgacttacttgtcccagaggcgaaagtcagaagcaagggcacggttcatgctctccgctgggggagtatgggggcaggcaggtgggcgagggaagggcagtgagtgtggaggcgcggacgcgcggcggagctggaactgctgcagctgctgccgccgccggaggaaccttgatccccgtgctccggacaccccgggcctcgccatggctgaccagctgactgaggagcagattgcagagttcaaggaggccttctccctctttgacaaggatggagatggcactatcaccaccaaggagttggggacagtgatgagatccctgggacagaaccccactgaagcagagctgcaggatatgatcaatgaggtggatgcagatgggaacgggaccattgacttcccggagttcctgaccatgatggccagaaagatgaaggacacagacagtgaggaggagatccgagaggcgttccgtgtctttgacaaggatgggaatggctacatcagcgccgcagagctgcgtcacgtaatgacgaacctgggggagaagctgaccgatgaggaggtggatgagatgatcagggaggctgacatcgatggagatggccaggtcaattatgaagagtttgtacagatgatgactgcaaagtgaaggccccccgggcagctggcgatgcccgttctcttgatctctctcttctcgcgcgcgcactctctcttcaacactcccctgcgtaccccggttctagcaaacaccaattgattgactgagaatctgataaagcaacaaaagatttgtcccaagctgcatgattgctctttctccttcttccctgagtctctctccatgcccctcatctcttccttttgccctcgcctcttccatccacgtcttccaaggcctgatgcattcataagttgaagccctccccagatccccttggggagcctctgccctcctccagcccggatggctctcctccattttggtttgtttcctcttgtttgtcatcttattttgggtgctggggtggctgccagccctgtcccgggacctgctgggagggacaagaggccctcccccaggcagaagagcatgccctttgccgttgcatgcaaccagccctgtgattccacgtgcagatcccagcagcctgttggggcaggggtgccaagagaggcattccagaaggactgagggggcgttgaggaattgtggcgttgactggatgtggcccaggagggggtcgagggggccaactcacagaaggggactgacagtgggcaacactcacatcccactggctgctgttctgaaaccatctgattggctttctgaggtttggctgggtggggactgctcatttggccactctgcagattggacttgcccgcgttcctgaagcgctctcgagctgttctgtaaatacctggtgctaacatcccatgccgctccctcctcacgatgcacccaccgccctgagggcccgtcctaggaatggatgtggggatggtcgctttgtaatgtgctggttctctttttttttctttcccctctatggcccttaagactttcattttgttcagaaccatgctgggctagctaaagggtggggagagggaagatgggccccaccacgctctcaagagaacgcacctgcaataaaacagtcttgtcggccagctgcccaggggacggcagctacagcagcctctgcgtcctggtccgccagcacctcccgcttctccgtggtgacttggcgccgcttcctcacatctgtgctccgtgccctcttccctgcctcttccctcgcccacctgcctgcccccatactcccccagcggagagcatgatccgtgcccttgcttctgactttcgcctctgggacaagtaagtcaatgtgggcagttcagtcgtctgggttttttccccttttctgttcatttcatctggctccccccaccacctccccaccccaccccccaccccctgcttcccctcactgcccaggtcgatcaagtggcttttcctgggacctgcccagctttgagaatctcttctcatccaccctctggcacccagcctctgagggaaggagggatggggcatagtgggagacccagccaagagctgagggtaagggcaggtaggcgtgaggctgtggacattttcggaatgttttggttttgttttttttaaaccgggcaatattgtgttcagttcaagctgtgaagaaaaatatatatcaatgttttccaataaaatacagtgactacctga

SEQ ID NO: 73154 - DNA, 2193 bp, Homo sapiens
aggtatctagagatccgtgtcatccccttcgcgcggcggagctggaactgctgcagctgctgccgccgccggaggaaccttgatccccgtgctccggacaccccgggcctcgccatggctgaccagctgactgaggagcagattgcagagttcaaggaggccttctccctctttgacaaggatggagatggcactatcaccaccaaggagttggggacagtgatgagatccctgggacagaaccccactgaagcagagctgcaggatatgatcaatgaggtggatgcagatgggaacgggaccattgacttcccggagttcctgaccatgatggccagaaagatgaaggacacagacagtgaggaggagatccgagaggcgttccgtgtctttgacaaggatgggaatggctacatcagcgccgcagagctgcgtcacgtaatgacgaacctgggggagaagctgaccgatgaggaggtggatgagatgatcagggaggctgacatcgatggagatggccaggtcaattatgaagagtttgtacagatgatgactgcaaagtgaaggccccccgggcagctggcgatgcccgttctcttgatctctctcttctcgcgcgcgcactctctcttcaacactcccctgcgtaccccggttctagcaaacaccaattgattgactgagaatctgataaagcaacaaaagatttgtcccaagctgcatgattgctctttctccttcttccctgagtctctctccatgcccctcatctcttccttttgccctcgcctcttccatccacgtcttccaaggcctgatgcattcataagttgaagccctccccagatccccttggggagcctctgccctcctccagcccggatggctctcctccattttggtttgtttcctcttgtttgtcatcttattttgggtgctggggtggctgccagccctgtcccgggacctgctgggagggacaagaggccctcccccaggcagaagagcatgccctttgccgttgcatgcaaccagccctgtgattccacgtgcagatcccagcagcctgttggggcaggggtgccaagagaggcattccagaaggactgagggggcgttgaggaattgtggcgttgactggatgtggcccaggagggggtcgagggggccaactcacagaaggggactgacagtgggcaacactcacatcccactggctgctgttctgaaaccatctgattggctttctgaggtttggctgggtggggactgctcatttggccactctgcagattggacttgcccgcgttcctgaagcgctctcgagctgttctgtaaatacctggtgctaacatcccatgccgctccctcctcacgatgcacccaccgccctgagggcccgtcctaggaatggatgtggggatggtcgctttgtaatgtgctggttctctttttttttctttcccctctatggcccttaagactttcattttgttcagaaccatgctgggctagctaaagggtggggagagggaagatgggccccaccacgctctcaagagaacgcacctgcaataaaacagtcttgtcggccagctgcccaggggacggcagctacagcagcctctgcgtcctggtccgccagcacctcccgcttctccgtggtgacttggcgccgcttcctcacatctgtgctccgtgccctcttccctgcctcttccctcgcccacctgcctgcccccatactcccccagcggagagcatgatccgtgcccttgcttctgactttcgcctctgggacaagtaagtcaatgtgggcagttcagtcgtctgggttttttccccttttctgttcatttcatctggctccccccaccacctccccaccccaccccccaccccctgcttcccctcactgcccaggtcgatcaagtggcttttcctgggacctgcccagctttgagaatctcttctcatccaccctctggcacccagcctctgagggaaggagggatggggcatagtgggagacccagccaagagctgagggtaagggcaggtaggcgtgaggctgtggacattttcggaatgttttggttttgttttttttaaaccgggcaatattgtgttcagttcaagctgtgaagaaaaatatatatcaatgttttccaataaaatacagtgactacctga

SEQ ID NO: 73155 - DNA, 2123 bp, Homo sapiens
agcgcgcgcgcgcccggcggcaaacccaattcctgtgcagggtggggacgagagattcgcgggcccgtaggtgtggagcggggcgcggagggatccgtgggagccgcagtgcggcggcgcgcgggccgggtggggcggggccgagcgaggcggggcgcgcgcggcggccgttgagggaccgttggggcgggaggcggcggcggcggcggcgcgcgctgcgggcagtgagtgtggaggcgcggacgcgcggcggagctggaactgctgcagctgctgccgccgccggaggaaccttgatccccgtgctccggacaccccgggcctcgccatggctgaccagctgactgaggagcagattgcagagttcaaggaggccttctccctctttgacaaggatggagatggcactatcaccaccaaggagttggggacagtgatgagatccctgggacagaaccccactgaagcagagctgcaggatatgatcaatgaggtggatgcagatgggaacgggaccattgacttcccggagttcctgaccatgatggccagaaagatgaaggacacagacagtgaggaggagatccgagaggcgttccgtgtctttgacaaggatgggaatggctacatcagcgccgcagagctgcgtcacgtaatgacgaacctgggggagaagctgaccgatgaggaggtggatgagatgatcagggaggctgacatcgatggagatggccaggtcaattatgaagagtttgtacagatgatgactgcaaagtgaaggccccccgggcagctggcgatgcccgttctcttgatctctctcttctcgcgcgcgcactctctcttcaacactcccctgcgtaccccggttctagcaaacaccaattgattgactgagaatctgataaagcaacaaaagatttgtcccaagctgcatgattgctctttctccttcttccctgagtctctctccatgcccctcatctcttccttttgccctcgcctcttccatccacgtcttccaaggcctgatgcattcataagttgaagccctccccagatccccttggggagcctctgccctcctccagcccggatggctctcctccattttggtttgtttcctcttgtttgtcatcttattttgggtgctggggtggctgccagccctgtcccgggacctgctgggagggacaagaggccctcccccaggcagaagagcatgccctttgccgttgcatgcaaccagccctgtgattccacgtgcagatcccagcagcctgttggggcaggggtgccaagagaggcattccagaaggactgagggggcgttgaggaattgtggcgttgactggatgtggcccaggagggggtcgagggggccaactcacagaaggggactgacagtgggcaacactcacatcccactggctgctgttctgaaaccatctgattggctttctgaggtttggctgggtggggactgctcatttggccactctgcagattggacttgcccgcgttcctgaagcgctctcgagctgttctgtaaatacctggtgctaacatcccatgccgctccctcctcacgatgcacccaccgccctgagggcccgtcctaggaatggatgtggggatggtcgctttgtaatgtgctggttctctttttttttctttcccctctatggcccttaagactttcattttgttcagaaccatgctgggctagctaaagggtggggagagggaagatgggccccaccacgctctcaagagaacgcacctgcaataaaacagtcttgtcggccagctgcccaggggacggcagctacagcagcctctgcgtcctggtccgccagcacctcccgcttctccgtggtgacttggcgccgcttcctcacatctgtgctccgtgccctcttccctgcctcttccctcgcccacctgcctgcccccatactcccccagcggagagcatgatccgtgcccttgcttctgactttcgcctctgggacaagtaagtcaatgtgggcagttcagtcgtctgggttttttccccttttctgttcatttcatctggctccccccacctcaggctagtcgggtaatccctggagagtcac

SEQ ID NO: 73156 - DNA, 2118 bp, Homo sapiens
agcgcgcgcgcgcccggcggcaaacccaattcctgtgcagggtggggacgagagattcgcgggcccgtaggtgtggagcggggcgcggagggatccgtgggagccgcagtgcggcggcgcgcgggccgggtggggcggggccgagcgaggcggggcgcgcgcggcggccgttgagggaccgttggggcgggaggcggcggcggcggcggcgcgcgctgcgggcagtgagtgtggaggcgcggacgcgcggcggagctggaactgctgcagctgctgccgccgccggaggaaccttgatccccgtgctccggacaccccgggcctcgccatggctgaccagctgactgaggagcagattgcagagttcaaggaggccttctccctctttgacaaggatggagatggcactatcaccaccaaggagttggggacagtgatgagatccctgggacagaaccccactgaagcagagctgcaggatatgatcaatgaggtggatgcagatgggaacgggaccattgacttcccggagttcctgaccatgatggccagaaagatgaaggacacagacagtgaggaggagatccgagaggcgttccgtgtctttgacaaggatgggaatggctacatcagcgccgcagagctgcgtcacgtaatgacgaacctgggggagaagctgaccgatgaggaggtggatgagatgatcagggaggctgacatcgatggagatggccaggtcaattatgaagagtttgtacagatgatgactgcaaagtgaaggccccccgggcagctggcgatgcccgttctcttgatctctctcttctcgcgcgcgcactctctcttcaacactcccctgcgtaccccggttctagcaaacaccaattgattgactgagaatctgataaagcaacaaaagatttgtcccaagctgcatgattgctctttctccttcttccctgagtctctctccatgcccctcatctcttccttttgccctcgcctcttccatccacgtcttccaaggcctgatgcattcataagttgaagccctccccagatccccttggggagcctctgccctcctccagcccggatggctctcctccattttggtttgtttcctcttgtttgtcatcttattttgggtgctggggtggctgccagccctgtcccgggacctgctgggagggacaagaggccctcccccaggcagaagagcatgccctttgccgttgcatgcaaccagccctgtgattccacgtgcagatcccagcagcctgttggggcaggggtgccaagagaggcattccagaaggactgagggggcgttgaggaattgtggcgttgactggatgtggcccaggagggggtcgagggggccaactcacagaaggggactgacagtgggcaacactcacatcccactggctgctgttctgaaaccatctgattggctttctgaggtttggctgggtggggactgctcatttggccactctgcagattggacttgcccgcgttcctgaagcgctctcgagctgttctgtaaatacctggtgctaacatcccatgccgctccctcctcacgatgcacccaccgccctgagggcccgtcctaggaatggatgtggggatggtcgctttgtaatgtgctggttctctttttttttctttcccctctatggcccttaagactttcattttgttcagaaccatgctgggctagctaaagggtggggagagggaagatgggccccaccacgctctcaagagaacgcacctgcaataaaacagtcttgtcggccagctgcccaggggacggcagctacagcagcctctgcgtcctggtccgccagcacctcccgcttctccgtggtgacttggcgccgcttcctcacatctgtgctccgtgccctcttccctgcctcttccctcgcccacctgcctgcccccatactcccccagcggagagcatgatccgtgcccttgcttctgactttcgcctctgggacaagtaagtcaatgtgggcagttcagtcgtctgggttttttccccttttctgttcatttcatctggctccccccaccccaatcaacctctatgctttcttctta

SEQ ID NO: 73157 - DNA, 1943 bp, Homo sapiens
agcgcgcgcgcgcccggcggcaaacccaattcctgtgcagggtggggacgagagattcgcgggcccgtaggtgtggagcggggcgcggagggatccgtgggagccgcagtgcggcggcgcgcgggccgggtggggcggggccgagcgaggcggggcgcgcgcggcggccgttgagggaccgttggggcgggaggcggcggcggcggcggcgcgcgctgcgggcagtgagtgtggaggcgcggacgcgcggcggagctggaactgctgcagctgctgccgccgccggaggaaccttgatccccgtgctccggacaccccgggcctcgccatggctgaccagctgactgaggagcagattgcagagttcaaggaggccttctccctctttgacaaggatggagatggcactatcaccaccaaggagttggggacagtgatgagatccctgggacagaaccccactgaagcagagctgcaggatatgatcaatgaggtggatgcagatgggaacgggaccattgacttcccggagttcctgaccatgatggccagaaagatgaaggacacagacagtgaggaggagatccgagaggcgttccgtgtctttgacaaggatgggaatggctacatcagcgccgcagagctgcgtcacgtaatgacgaacctgggggagaagctgaccgatgaggaggtggatgagatgatcagggaggctgacatcgatggagatggccaggtcaattatgaagagtttgtacagatgatgactgcaaagtgaaggccccccgggcagctggcgatgcccgttctcttgatctctctcttctcgcgcgcgcactctctcttcaacactcccctgcgtaccccggttctagcaaacaccaattgattgactgagaatctgataaagcaacaaaagatttgtcccaagctgcatgattgctctttctccttcttccctgagtctctctccatgcccctcatctcttccttttgccctcgcctcttccatccacgtcttccaaggcctgatgcattcataagttgaagccctccccagatccccttggggagcctctgccctcctccagcccggatggctctcctccattttggtttgtttcctcttgtttgtcatcttattttgggtgctggggtggctgccagccctgtcccgggacctgctgggagggacaagaggccctcccccaggcagaagagcatgccctttgccgttgcatgcaaccagccctgtgattccacgtgcagatcccagcagcctgttggggcaggggtgccaagagaggcattccagaaggactgagggggcgttgaggaattgtggcgttgactggatgtggcccaggagggggtcgagggggccaactcacagaaggggactgacagtgggcaacactcacatcccactggctgctgttctgaaaccatctgattggctttctgaggtttggctgggtggggactgctcatttggccactctgcagattggacttgcccgcgttcctgaagcgctctcgagctgttctgtaaatacctggtgctaacatcccatgccgctccctcctcacgatgcacccaccgccctgagggcccgtcctaggaatggatgtggggatggtcgctttgtaatgtgctggttctctttttttttctttcccctctatggcccttaagactttcattttgttcagaaccatgctgggctagctaaagggtggggagagggaagatgggccccaccacgctctcaagagaacgcacctgcaataaaacagtcttgtcggccagctgcccaggggacggcagctacagcagcctctgcgtcctggtccgccagcacctcccgcttctccgtggtgacttggcgccgcttcctcacatctgtcgtactgcccgggggatctctaaagtcgactgcagg

SEQ ID NO: 73158 - DNA, 1941 bp, Homo sapiens
agcgcgcgcgcgcccggcggcaaacccaattcctgtgcagggtggggacgagagattcgcgggcccgtaggtgtggagcggggcgcggagggatccgtgggagccgcagtgcggcggcgcgcgggccgggtggggcggggccgagcgaggcggggcgcgcgcggcggccgttgagggaccgttggggcgggaggcggcggcggcggcggcgcgcgctgcgggcagtgagtgtggaggcgcggacgcgcggcggagctggaactgctgcagctgctgccgccgccggaggaaccttgatccccgtgctccggacaccccgggcctcgccatggctgaccagctgactgaggagcagattgcagagttcaaggaggccttctccctctttgacaaggatggagatggcactatcaccaccaaggagttggggacagtgatgagatccctgggacagaaccccactgaagcagagctgcaggatatgatcaatgaggtggatgcagatgggaacgggaccattgacttcccggagttcctgaccatgatggccagaaagatgaaggacacagacagtgaggaggagatccgagaggcgttccgtgtctttgacaaggatgggaatggctacatcagcgccgcagagctgcgtcacgtaatgacgaacctgggggagaagctgaccgatgaggaggtggatgagatgatcagggaggctgacatcgatggagatggccaggtcaattatgaagagtttgtacagatgatgactgcaaagtgaaggccccccgggcagctggcgatgcccgttctcttgatctctctcttctcgcgcgcgcactctctcttcaacactcccctgcgtaccccggttctagcaaacaccaattgattgactgagaatctgataaagcaacaaaagatttgtcccaagctgcatgattgctctttctccttcttccctgagtctctctccatgcccctcatctcttccttttgccctcgcctcttccatccacgtcttccaaggcctgatgcattcataagttgaagccctccccagatccccttggggagcctctgccctcctccagcccggatggctctcctccattttggtttgtttcctcttgtttgtcatcttattttgggtgctggggtggctgccagccctgtcccgggacctgctgggagggacaagaggccctcccccaggcagaagagcatgccctttgccgttgcatgcaaccagccctgtgattccacgtgcagatcccagcagcctgttggggcaggggtgccaagagaggcattccagaaggactgagggggcgttgaggaattgtggcgttgactggatgtggcccaggagggggtcgagggggccaactcacagaaggggactgacagtgggcaacactcacatcccactggctgctgttctgaaaccatctgattggctttctgaggtttggctgggtggggactgctcatttggccactctgcagattggacttgcccgcgttcctgaagcgctctcgagctgttctgtaaatacctggtgctaacatcccatgccgctccctcctcacgatgcacccaccgccctgagggcccgtcctaggaatggatgtggggatggtcgctttgtaatgtgctggttctctttttttttctttcccctctatggcccttaagactttcattttgttcagaaccatgctgggctagctaaagggtggggagagggaagatgggccccaccacgctctcaagagaacgcacctgcaataaaacagtcttgtcggccagctgcccaggggacggcagctacagcagcctctgcgtcctggtccgccagcacctcccgcttctccgtggtgacttggcgccgcttcctcacatctgttgagtcccacaatcgaaggggatccatcatagag

SEQ ID NO: 73159 - DNA, 2146 bp, Homo sapiens
agcgcgcgcgcgcccggcggcaaacccaattcctgtgcagggtggggacgagagattcgcgggcccgtaggctgaccagctgactgaggagcagattgcagagttcaaggaggccttctccctctttgacaaggatggagatggcactatcaccaccaaggagttggggacagtgatgagatccctgggacagaaccccactgaagcagagctgcaggatatgatcaatgaggtggatgcagatgggaacgggaccattgacttcccggagttcctgaccatgatggccagaaagatgaaggacacagacagtgaggaggagatccgagaggcgttccgtgtctttgacaaggatgggaatggctacatcagcgccgcagagctgcgtcacgtaatgacgaacctgggggagaagctgaccgatgaggaggtggatgagatgatcagggaggctgacatcgatggagatggccaggtcaattatgaagagtttgtacagatgatgactgcaaagtgaaggccccccgggcagctggcgatgcccgttctcttgatctctctcttctcgcgcgcgcactctctcttcaacactcccctgcgtaccccggttctagcaaacaccaattgattgactgagaatctgataaagcaacaaaagatttgtcccaagctgcatgattgctctttctccttcttccctgagtctctctccatgcccctcatctcttccttttgccctcgcctcttccatccacgtcttccaaggcctgatgcattcataagttgaagccctccccagatccccttggggagcctctgccctcctccagcccggatggctctcctccattttggtttgtttcctcttgtttgtcatcttattttgggtgctggggtggctgccagccctgtcccgggacctgctgggagggacaagaggccctcccccaggcagaagagcatgccctttgccgttgcatgcaaccagccctgtgattccacgtgcagatcccagcagcctgttggggcaggggtgccaagagaggcattccagaaggactgagggggcgttgaggaattgtggcgttgactggatgtggcccaggagggggtcgagggggccaactcacagaaggggactgacagtgggcaacactcacatcccactggctgctgttctgaaaccatctgattggctttctgaggtttggctgggtggggactgctcatttggccactctgcagattggacttgcccgcgttcctgaagcgctctcgagctgttctgtaaatacctggtgctaacatcccatgccgctccctcctcacgatgcacccaccgccctgagggcccgtcctaggaatggatgtggggatggtcgctttgtaatgtgctggttctctttttttttctttcccctctatggcccttaagactttcattttgttcagaaccatgctgggctagctaaagggtggggagagggaagatgggccccaccacgctctcaagagaacgcacctgcaataaaacagtcttgtcggccagctgcccaggggacggcagctacagcagcctctgcgtcctggtccgccagcacctcccgcttctccgtggtgacttggcgccgcttcctcacatctgtgctccgtgccctcttccctgcctcttccctcgcccacctgcctgcccccatactcccccagcggagagcatgatccgtgcccttgcttctgactttcgcctctgggacaagtaagtcaatgtgggcagttcagtcgtctgggttttttccccttttctgttcatttcatctggctccccccaccacctccccaccccaccccccaccccctgcttcccctcactgcccaggtcgatcaagtggcttttcctgggacctgcccagctttgagaatctcttctcatccaccctctggcacccagcctctgagggaaggagggatggggcatagtgggagacccagccaagagctgagggtaagggcaggtaggcgtgaggctgtggacattttcggaatgttttggttttgttttttttaaaccgggcaatattgtgttcagttcaagctgtgaagaaaaatatatatcaatgttttccaataaaatacagtgactacctga

SEQ ID NO: 73160 - DNA, 2219 bp, Homo sapiens
tcctgcaggctctgtctgaggcgccgcatctcttcctgtgtgggctcgcgctcttccatccatgtcttccaaggcctgatgcattcataagttgaagccctccccatcattttcttcttccggacaccccgggcctcgccatggctgaccagctgactgaggagcagattgcagagttcaaggaggccttctccctctttgacaaggatggagatggcactatcaccaccaaggagttggggacagtgatgagatccctgggacagaaccccactgaagcagagctgcaggatatgatcaatgaggtggatgcagatgggaacgggaccattgacttcccggagttcctgaccatgatggccagaaagatgaaggacacagacagtgaggaggagatccgagaggcgttccgtgtctttgacaaggatgggaatggctacatcagcgccgcagagctgcgtcacgtaatgacgaacctgggggagaagctgaccgatgaggaggtggatgagatgatcagggaggctgacatcgatggagatggccaggtcaattatgaagagtttgtacagatgatgactgcaaagtgaaggccccccgggcagctggcgatgcccgttctcttgatctctctcttctcgcgcgcgcactctctcttcaacactcccctgcgtaccccggttctagcaaacaccaattgattgactgagaatctgataaagcaacaaaagatttgtcccaagctgcatgattgctctttctccttcttccctgagtctctctccatgcccctcatctcttccttttgccctcgcctcttccatccacgtcttccaaggcctgatgcattcataagttgaagccctccccagatccccttggggagcctctgccctcctccagcccggatggctctcctccattttggtttgtttcctcttgtttgtcatcttattttgggtgctggggtggctgccagccctgtcccgggacctgctgggagggacaagaggccctcccccaggcagaagagcatgccctttgccgttgcatgcaaccagccctgtgattccacgtgcagatcccagcagcctgttggggcaggggtgccaagagaggcattccagaaggactgagggggcgttgaggaattgtggcgttgactggatgtggcccaggagggggtcgagggggccaactcacagaaggggactgacagtgggcaacactcacatcccactggctgctgttctgaaaccatctgattggctttctgaggtttggctgggtggggactgctcatttggccactctgcagattggacttgcccgcgttcctgaagcgctctcgagctgttctgtaaatacctggtgctaacatcccatgccgctccctcctcacgatgcacccaccgccctgagggcccgtcctaggaatggatgtggggatggtcgctttgtaatgtgctggttctctttttttttctttcccctctatggcccttaagactttcattttgttcagaaccatgctgggctagctaaagggtggggagagggaagatgggccccaccacgctctcaagagaacgcacctgcaataaaacagtcttgtcggccagctgcccaggggacggcagctacagcagcctctgcgtcctggtccgccagcacctcccgcttctccgtggtgacttggcgccgcttcctcacatctgtgctccgtgccctcttccctgcctcttccctcgcccacctgcctgcccccatactcccccagcggagagcatgatccgtgcccttgcttctgactttcgcctctgggacaagtaagtcaatgtgggcagttcagtcgtctgggttttttccccttttctgttcatttcatctggctccccccaccacctccccaccccaccccccaccccctgcttcccctcactgcccaggtcgatcaagtggcttttcctgggacctgcccagctttgagaatctcttctcatccaccctctggcacccagcctctgagggaaggagggatggggcatagtgggagacccagccaagagctgagggtaagggcaggtaggcgtgaggctgtggacattttcggaatgttttggttttgttttttttaaaccgggcaatattgtgttcagttcaagctgtgaagaaaaatatatatcaatgttttccaataaaatacagtgactacctga

SEQ ID NO: 73161 - DNA, 2291 bp, Homo sapiens
agcgcgcgcgcgcccggcggcaaacccaattcctgtgcagggtggggacgagagattcgcgggcccgtaggtgtggagcggggcgcggagggatccgtgggagccgcagtgcggcggcgcgcgggccgggtggggcggggccgagcgaggcggggcgcgcgcggcggccgttgagggaccgttggggcgggaggcggcggcggcggcggcgcgcgctgcgggcagtgagtgtggaggcgcggacgcgcggcggagctggaactgctgcagctgctgccgccgccggaggaaccttgatccccgtgctccggacaccccgggcctcgccatggctgaccagctgactgaggagcagattgcagagttcaaggaggccttctccctctttgacaaggatggagatggcactatcaccaccaaggagttggggacagtgatgagatccctgggacagaaccccactgaagcagagctgcaggatatgatcaatgaggtggatgcagatgggaacgggaccattgacttcccggagttcctgaccatgatggccagaaagatgaaggacacagacagtgaggaggagatccgagaggcgttccgtgtctttgacaaggatgggaatggctacatcagcgccgcagagctgcgtcacgtaatgacgaacctgggggagaagctgaccgatgaggaggtggatgagatgatcagggaggctgacatcgatggagatggccaggtcaattatgaagagtttgtacagatgatgactgcaaagtgaaggccccccgggcagctggcgatgcccgttctcttgatctctctcttctcgcgcgcgcactctctcttcaacactcccctgcgtaccccggttctagcaaacaccaattgattgactgagaatctgataaagcaacaaaagatttgtcccaagctgcatgattgctctttctccttcttccctgagtctctctccatgcccctcatctcttccttttgccctcgcctcttccatccacgtcttccaaggcctgatgcattcataagttgaagccctccccagatccccttggggagcggacaagaggccctcccccaggcagaagagcatgccctttgccgttgcatgcaaccagccctgtgattccacgtgcagatcccagcagcctgttggggcaggggtgccaagagaggcattccagaaggactgagggggcgttgaggaattgtggcgttgactggatgtggcccaggagggggtcgagggggccaactcacagaaggggactgacagtgggcaacactcacatcccactggctgctgttctgaaaccatctgattggctttctgaggtttggctgggtggggactgctcatttggccactctgcagattggacttgcccgcgttcctgaagcgctctcgagctgttctgtaaatacctggtgctaacatcccatgccgctccctcctcacgatgcacccaccgccctgagggcccgtcctaggaatggatgtggggatggtcgctttgtaatgtgctggttctctttttttttctttcccctctatggcccttaagactttcattttgttcagaaccatgctgggctagctaaagggtggggagagggaagatgggccccaccacgctctcaagagaacgcacctgcaataaaacagtcttgtcggccagctgcccaggggacggcagctacagcagcctctgcgtcctggtccgccagcacctcccgcttctccgtggtgacttggcgccgcttcctcacatctgtgctccgtgccctcttccctgcctcttccctcgcccacctgcctgcccccatactcccccagcggagagcatgatccgtgcccttgcttctgactttcgcctctgggacaagtaagtcaatgtgggcagttcagtcgtctgggttttttccccttttctgttcatttcatctggctccccccaccacctccccaccccaccccccaccccctgcttcccctcactgcccaggtcgatcaagtggcttttcctgggacctgcccagctttgagaatctcttctcatccaccctctggcacccagcctctgagggaaggagggatggggcatagtgggagacccagccaagagctgagggtaagggcaggtaggcgtgaggctgtggacattttcggaatgttttggttttgttttttttaaaccgggcaatattgtgttcagttcaagctgtgaagaaaaatatatatcaatgttttccaataaaatacagtgactacctga

SEQ ID NO: 73162 - DNA, 2238 bp, Homo sapiens
agcgcgcgcgcgcccggcggcaaacccaattcctgtgcagggtggggacgagagattcgcgggcccgtaggtgtggagcggggcgcggagggatccgtgggagccgcagtgcggcggcgcgcgggccgggtggggcggggccgagcgaggcggggcgcgcgcggcggccgttgagggaccgttggggcgggaggcggcggcggcggcggcgcgcgctgcgggcagtgagtgtggaggcgcggacgcgcggcggagctggaactgctgcagctgctgccgccgccggaggaaccttgatccccgtgctccggacaccccgggcctcgccatggctgaccagctgactgaggagcagattgcagagttcaaggaggccttctccctctttgacaaggatggagatggcactatcaccaccaaggagttggggacagtgatgagatccctgggacagaaccccactgaagcagagctgcaggatatgatcaatgaggtggatgcagatgggaacgggaccattgacttcccggagttcctgaccatgatggccagaaagatgaaggacacagacagtgaggaggagatccgagaggcgttccgtgtctttgacaaggatgggaatggctacatcagcgccgcagagctgcgtcacgtaatgacgaacctgggggagaagctgaccgatgaggaggtggatgagatgatcagggaggctgacatcgatggagatggccaggtcaattatgaagagtttgtacagatgatgactgcaaagtgaaggccccccgggcagctggcgatgcccgttctcttgatctctctcttctcgcgcgcgcactctctcttcaacactcccctgcgtaccccggttctagcaaacaccaattgattgactgagaatctgataaagcaacaaaagatttgtcccaagctgcatgattgctctttctccttcttccctgagtctctctccatgcccctcatctcttccttttgccctcgcctcttccatccacgtcttccaaggcctgatgcattcataagttgaagccctccccagatccccttggggagcctctgccctcctccagcccggatggctctcctccattttggtttgtttcctcttgtttgtcatcttattttgggtgctggggtggctgccagccctgtcccgggacctgctgggagggacaagaggccctcccccaggcagaagagcatgccctttgccgttgcatgcaaccagccctgtgattccacgtgcagatcccagcagcctgttggggcaggggtgccaagagaggcattccagaaggactgagggggcgttgaggaattgtggcgttgactggatgtggcccaggagggggtcgagggggccaactcacagaaggggactgacagtgggcaacactcacgatgcacccaccgccctgagggcccgtcctaggaatggatgtggggatggtcgctttgtaatgtgctggttctctttttttttctttcccctctatggcccttaagactttcattttgttcagaaccatgctgggctagctaaagggtggggagagggaagatgggccccaccacgctctcaagagaacgcacctgcaataaaacagtcttgtcggccagctgcccaggggacggcagctacagcagcctctgcgtcctggtccgccagcacctcccgcttctccgtggtgacttggcgccgcttcctcacatctgtgctccgtgccctcttccctgcctcttccctcgcccacctgcctgcccccatactcccccagcggagagcatgatccgtgcccttgcttctgactttcgcctctgggacaagtaagtcaatgtgggcagttcagtcgtctgggttttttccccttttctgttcatttcatctggctccccccaccacctccccaccccaccccccaccccctgcttcccctcactgcccaggtcgatcaagtggcttttcctgggacctgcccagctttgagaatctcttctcatccaccctctggcacccagcctctgagggaaggagggatggggcatagtgggagacccagccaagagctgagggtaagggcaggtaggcgtgaggctgtggacattttcggaatgttttggttttgttttttttaaaccgggcaatattgtgttcagttcaagctgtgaagaaaaatatatatcaatgttttccaataaaatacagtgactacctga

SEQ ID NO: 73163 - DNA, 1923 bp, Homo sapiens
tcggccggtccgggagtggagaggaacgggaccattgacttcccggagttcctgaccatgatggccagaaagatgaaggacacagacagtgaggaggagatccgagaggcgttccgtgtctttgacaaggatgggaatggctacatcagcgccgcagagctgcgtcacgtaatgacgaacctgggggagaagctgaccgatgaggaggtggatgagatgatcagggaggctgacatcgatggagatggccaggtcaattatgaagagtttgtacagatgatgactgcaaagtgaaggccccccgggcagctggcgatgcccgttctcttgatctctctcttctcgcgcgcgcactctctcttcaacactcccctgcgtaccccggttctagcaaacaccaattgattgactgagaatctgataaagcaacaaaagatttgtcccaagctgcatgattgctctttctccttcttccctgagtctctctccatgcccctcatctcttccttttgccctcgcctcttccatccacgtcttccaaggcctgatgcattcataagttgaagccctccccagatccccttggggagcctctgccctcctccagcccggatggctctcctccattttggtttgtttcctcttgtttgtcatcttattttgggtgctggggtggctgccagccctgtcccgggacctgctgggagggacaagaggccctcccccaggcagaagagcatgccctttgccgttgcatgcaaccagccctgtgattccacgtgcagatcccagcagcctgttggggcaggggtgccaagagaggcattccagaaggactgagggggcgttgaggaattgtggcgttgactggatgtggcccaggagggggtcgagggggccaactcacagaaggggactgacagtgggcaacactcacatcccactggctgctgttctgaaaccatctgattggctttctgaggtttggctgggtggggactgctcatttggccactctgcagattggacttgcccgcgttcctgaagcgctctcgagctgttctgtaaatacctggtgctaacatcccatgccgctccctcctcacgatgcacccaccgccctgagggcccgtcctaggaatggatgtggggatggtcgctttgtaatgtgctggttctctttttttttctttcccctctatggcccttaagactttcattttgttcagaaccatgctgggctagctaaagggtggggagagggaagatgggccccaccacgctctcaagagaacgcacctgcaataaaacagtcttgtcggccagctgcccaggggacggcagctacagcagcctctgcgtcctggtccgccagcacctcccgcttctccgtggtgacttggcgccgcttcctcacatctgtgctccgtgccctcttccctgcctcttccctcgcccacctgcctgcccccatactcccccagcggagagcatgatccgtgcccttgcttctgactttcgcctctgggacaagtaagtcaatgtgggcagttcagtcgtctgggttttttccccttttctgttcatttcatctggctccccccaccacctccccaccccaccccccaccccctgcttcccctcactgcccaggtcgatcaagtggcttttcctgggacctgcccagctttgagaatctcttctcatccaccctctggcacccagcctctgagggaaggagggatggggcatagtgggagacccagccaagagctgagggtaagggcaggtaggcgtgaggctgtggacattttcggaatgttttggttttgttttttttaaaccgggcaatattgtgttcagttcaagctgtgaagaaaaatatatatcaatgttttccaataaaatacagtgactacctga

SEQ ID NO: 73164 - DNA, 1724 bp, Homo sapiens
  misc_feature (1703)..(1703): n is a, c, g, or t
  misc_feature (1705)..(1705): n is a, c, g, or t
agcgcgcgcgcgcccggcggcaaacccaattcctgtgcagggtggggacgagagattcgcgggcccgtaggtgtggagcggggcgcggagggatccgtgggagccgcagtgcggcggcgcgcgggccgggtggggcggggccgagcgaggcggggcgcgcgcggcggccgttgagggaccgttggggcgggaggcggcggcggcggcggcgcgcgctgcgggcagtgagtgtggaggcgcggacgcgcggcggagctggaactgctgcagctgctgccgccgccggaggaaccttgatccccgtgctccggacaccccgggcctcgccatggctgaccagctgactgaggagcagattgcagagttcaaggaggccttctccctctttgacaaggatggagatggcactatcaccaccaaggagttggggacagtgatgagatccctgggacagaaccccactgaagcagagctgcaggatatgatcaatgaggtggatgcagatgggaacgggaccattgacttcccggagttcctgaccatgatggccagaaagatgaaggacacagacagtgaggaggagatccgagaggcgttccgtgtctttgacaaggatgggaatggctacatcagcgccgcagagctgcgtcacgtaatgacgaacctgggggagaagctgaccgatgaggaggtggatgagatgatcagggaggctgacatcgatggagatggccaggtcaattatgaagagtttgtacagatgatgactgcaaagtgaaggccccccgggcagctggcgatgcccgttctcttgatctctctcttctcgcgcgcgcactctctcttcaacactcccctgcgtaccccggttctagcaaacaccaattgattgactgagaatctgataaagcaacaaaagatttgtcccaagctgcatgattgctctttctccttcttccctgagtctctctccatgcccctcatctcttccttttgccctcgcctcttccatccacgtcttccaaggcctgatgcattcataagttgaagccctccccagatccccttggggagcctctgccctcctccagcccggatggctctcctccattttggtttgtttcctcttgtttgtcatcttattttgggtgctggggtggctgccagccctgtcccgggacctgctgggagggacaagaggccctcccccaggcagaagagcatgccctttgccgttgcatgcaaccagccctgtgattccacgtgcagatcccagcagcctgttggggcaggggtgccaagagaggcattccagaaggactgagggggcgttgaggaattgtggcgttgactggatgtggcccaggagggggtcgagggggccaactcacagaaggggactgacagtgggcaacactcacatcccactggctgctgttctgaaaccatctgattggctttctgaggtttggctgggtggggactgctcatttggccactctgcagattggacttgcccgcgttcctgaagcgctctcgagctgttctgtaaatacctggtgctaacatcccatgccgctccctcctcacgatgcacccaccgccctgagggcccgtcctaggaatggatgtggggatggtcgctttgtaatgtgctggttctctttttttttctttcccctctatggcctccgaggggtacnanctcgagttcgatactgtac

SEQ ID NO: 73165 - DNA, 1723 bp, Homo sapiens
agcgcgcgcgcgcccggcggcaaacccaattcctgtgcagggtggggacgagagattcgcgggcccgtaggtgtggagcggggcgcggagggatccgtgggagccgcagtgcggcggcgcgcgggccgggtggggcggggccgagcgaggcggggcgcgcgcggcggccgttgagggaccgttggggcgggaggcggcggcggcggcggcgcgcgctgcgggcagtgagtgtggaggcgcggacgcgcggcggagctggaactgctgcagctgctgccgccgccggaggaaccttgatccccgtgctccggacaccccgggcctcgccatggctgaccagctgactgaggagcagattgcagagttcaaggaggccttctccctctttgacaaggatggagatggcactatcaccaccaaggagttggggacagtgatgagatccctgggacagaaccccactgaagcagagctgcaggatatgatcaatgaggtggatgcagatgggaacgggaccattgacttcccggagttcctgaccatgatggccagaaagatgaaggacacagacagtgaggaggagatccgagaggcgttccgtgtctttgacaaggatgggaatggctacatcagcgccgcagagctgcgtcacgtaatgacgaacctgggggagaagctgaccgatgaggaggtggatgagatgatcagggaggctgacatcgatggagatggccaggtcaattatgaagagtttgtacagatgatgactgcaaagtgaaggccccccgggcagctggcgatgcccgttctcttgatctctctcttctcgcgcgcgcactctctcttcaacactcccctgcgtaccccggttctagcaaacaccaattgattgactgagaatctgataaagcaacaaaagatttgtcccaagctgcatgattgctctttctccttcttccctgagtctctctccatgcccctcatctcttccttttgccctcgcctcttccatccacgtcttccaaggcctgatgcattcataagttgaagccctccccagatccccttggggagcctctgccctcctccagcccggatggctctcctccattttggtttgtttcctcttgtttgtcatcttattttgggtgctggggtggctgccagccctgtcccgggacctgctgggagggacaagaggccctcccccaggcagaagagcatgccctttgccgttgcatgcaaccagccctgtgattccacgtgcagatcccagcagcctgttggggcaggggtgccaagagaggcattccagaaggactgagggggcgttgaggaattgtggcgttgactggatgtggcccaggagggggtcgagggggccaactcacagaaggggactgacagtgggcaacactcacatcccactggctgctgttctgaaaccatctgattggctttctgaggtttggctgggtggggactgctcatttggccactctgcagattggacttgcccgcgttcctgaagcgctctcgagctgttctgtaaatacctggtgctaacatcccatgccgctccctcctcacgatgcacccaccgccctgagggcccgtcctaggaatggatgtggggatggtcgctttgtaatgtgctggttctctttttttttctttcccctctatggccctggcccttatcgagggtactgagctcgagttc

SEQ ID NO: 73166 - DNA, 2214 bp, Homo sapiens
gaaaaggggaaaaaacccagacgactgaactgcccacattgacttacttgtcccagaggcgaaagtcagaagcaagggcacggttcatgctctccgctgggggagtatgggggcaggcaggtgggcgagggaagggcagtgagtgtggaggcgcggacgcgcggcggagctggaactgctgcagctgctgccgccgccggaggaaccttgatccccgtgctccggacaccccgggcctcgccatggctgaccagctgactgaggagcagattgcagagttcaaggaggccttctccctctttgacaaggatggagatggcactatcaccaccaaggagttggggacagtgatgagatccctgggacagaaccccactgaagcagagctgcaggatatgatcaatgaggtggatgcagatggatgggaatggctacatcagcgccgcagagctgcgtcacgtaatgacgaacctgggggagaagctgaccgatgaggaggtggatgagatgatcagggaggctgacatcgatggagatggccaggtcaattatgaagagtttgtacagatgatgactgcaaagtgaaggccccccgggcagctggcgatgcccgttctcttgatctctctcttctcgcgcgcgcactctctcttcaacactcccctgcgtaccccggttctagcaaacaccaattgattgactgagaatctgataaagcaacaaaagatttgtcccaagctgcatgattgctctttctccttcttccctgagtctctctccatgcccctcatctcttccttttgccctcgcctcttccatccacgtcttccaaggcctgatgcattcataagttgaagccctccccagatccccttggggagcctctgccctcctccagcccggatggctctcctccattttggtttgtttcctcttgtttgtcatcttattttgggtgctggggtggctgccagccctgtcccgggacctgctgggagggacaagaggccctcccccaggcagaagagcatgccctttgccgttgcatgcaaccagccctgtgattccacgtgcagatcccagcagcctgttggggcaggggtgccaagagaggcattccagaaggactgagggggcgttgaggaattgtggcgttgactggatgtggcccaggagggggtcgagggggccaactcacagaaggggactgacagtgggcaacactcacatcccactggctgctgttctgaaaccatctgattggctttctgaggtttggctgggtggggactgctcatttggccactctgcagattggacttgcccgcgttcctgaagcgctctcgagctgttctgtaaatacctggtgctaacatcccatgccgctccctcctcacgatgcacccaccgccctgagggcccgtcctaggaatggatgtggggatggtcgctttgtaatgtgctggttctctttttttttctttcccctctatggcccttaagactttcattttgttcagaaccatgctgggctagctaaagggtggggagagggaagatgggccccaccacgctctcaagagaacgcacctgcaataaaacagtcttgtcggccagctgcccaggggacggcagctacagcagcctctgcgtcctggtccgccagcacctcccgcttctccgtggtgacttggcgccgcttcctcacatctgtgctccgtgccctcttccctgcctcttccctcgcccacctgcctgcccccatactcccccagcggagagcatgatccgtgcccttgcttctgactttcgcctctgggacaagtaagtcaatgtgggcagttcagtcgtctgggttttttccccttttctgttcatttcatctggctccccccaccacctccccaccccaccccccaccccctgcttcccctcactgcccaggtcgatcaagtggcttttcctgggacctgcccagctttgagaatctcttctcatccaccctctggcacccagcctctgagggaaggagggatggggcatagtgggagacccagccaagagctgagggtaagggcaggtaggcgtgaggctgtggacattttcggaatgttttggttttgttttttttaaaccgggcaatattgtgttcagttcaagctgtgaagaaaaatatatatcaatgttttccaataaaatacagtgactacctga

SEQ ID NO: 73167 - DNA, 2245 bp, Homo sapiens
agcgcgcgcgcgcccggcggcaaacccaattcctgtgcagggtggggacgagagattcgcgggcccgtaggtgtggagcggggcgcggagggatccgtgggagccgcagtgcggcggcgcgcgggccgggtggggcggggccgagcgaggcggggcgcgcgcggcggccgttgagggaccgttggggcgggaggcggcggcggcggcggcgcgcgctgcgggcagtgagtgtggaggcgcggacgcgcggcggagctggaactgctgcagctgctgccgccgccggaggaaccttgatccccgtgctccggacaccccgggcctcgccatggctgaccagctgactgaggagcagattgcagagttcaaggaggccttctccctctttgacaaggatggagatggcactatcaccaccaaggagttggggacagtgatgagatccctgggacagaaccccactgaagcagagctgcaggatatgatcaatgaggtggatgcagatgggaacgggaccattgacttcccggagttcctgaccatgatggccagaaagatgaaggacacagacagtgaggaggagatccgagaggcgttccgtgtctttgacaaggatgggaatggctacatcagcgccgcagagctgcgtcacgtaatgacgaacctgggggagaagctgaccgatgaggaggtggatgagatgatcagggaggctgacatcgatggagatggccaggtcaattatgaagagtttgtacagatgatgactgcaaagtgaaggccccccgggcagctggcgatgcccgttctcttgatctctctcttctcgcgcgcgcactctctcttcaacactcccctgcgtaccccggttctagcaaacaccaattgattgactgagaatctgataaagcaacaaaagatttgtcccaagctgcatgattgctctttctccttcttccctgagtctctctccatgcccctcatctcttccttttgccctcgcctcttccatccacgtcttccaaggcctgatgcattcataagttgaagccctccccagatccccttggggagcctctgccctcctccagcccggatggctctcctccattttggtttgtttcctcttgtttgtcatcttattttgggtgctggggtggctgccagccctgtcccgggacctgctgggagggacaagaggccctcccccaggcagaagagcatgccctttgccgttgcatgcaaccagccctgtgattccacgtgcagatcccagcagcctgttggggcaggggtgccaagagaggcattccagaaggactgagggggcgttgaggaattgtggcgttgactggatgtggcccaggagggggtcgagggggccaactcacagaaggggactgacagtgggcaacactcacatcccactggctgctgttctgaaaccatctgattggctttctgaggtttggctgggtggggactgctcatttggccactctgcagattggacttgcccgcgttcctgaagcgctctcgagctgttctgcaataaaacagtcttgtcggccagctgcccaggggacggcagctacagcagcctctgcgtcctggtccgccagcacctcccgcttctccgtggtgacttggcgccgcttcctcacatctgtgctccgtgccctcttccctgcctcttccctcgcccacctgcctgcccccatactcccccagcggagagcatgatccgtgcccttgcttctgactttcgcctctgggacaagtaagtcaatgtgggcagttcagtcgtctgggttttttccccttttctgttcatttcatctggctccccccaccacctccccaccccaccccccaccccctgcttcccctcactgcccaggtcgatcaagtggcttttcctgggacctgcccagctttgagaatctcttctcatccaccctctggcacccagcctctgagggaaggagggatggggcatagtgggagacccagccaagagctgagggtaagggcaggtaggcgtgaggctgtggacattttcggaatgttttggttttgttttttttaaaccgggcaatattgtgttcagttcaagcaaccccagcactgactcctttggcccagaggtggaagagcctctcctcaaagctggctctgaagctgtgtccagtcagtgcagcccagtggacgcctctgaaccacagttctgatcccagctagatcg

SEQ ID NO: 73168 - DNA, 1409 bp, Homo sapiens
agcgcgcgcgcgcccggcggcaaacccaattcctgtgcagggtggggacgagagattcgcgggcccgtaggtgtggagcggggcgcggagggatccgtgggagccgcagtgcggcggcgcgcgggccgggtggggcggggccgagcgaggcggggcgcgcgcggcggccgttgagggaccgttggggcgggaggcggcggcggcggcggcgcgcgctgcgggcagtgagtgtggaggcgcggacgcgcggcggagctggaactgctgcagctgctgccgccgccggaggaaccttgatccccgtgctccggacaccccgggcctcgccatggctgaccagctgactgaggagcagattgcagagttcaaggaggccttctccctctttgacaaggatggagatggcactatcaccaccaaggagttggggacagtgatgagatccctgggacagaaccccactgaagcagagctgcaggatatgatcaatgaggtggatgcagatgggaacgggaccattgacttcccggagttcctgaccatgatggccagaaagatgaaggacacagacagtgaggaggagatccgagaggcgttccgtgtctttgacaaggatgggaatggctacatcagcgccgcagagctgcgtcacgtaatgacgaacctgggggagaagctgaccgatgaggaggtggatgagatgatcagggaggctgacatcgatggagatggccaggtcaattatgaagagtttgtacagatgatgactgcaaagtgaaggccccccgggcagctggcgatgcccgttctcttgatctctctcttctcgcgcgcgcactctctcttcaacactcccctgcgtaccccggttctagcaaacaccaattgattgactgagaatctgataaagcaacaaaagatttgtcccaagctgcatgattgctctttctccttcttccctgagtctctctccatgcccctcatctcttccttttgccctcgcctcttccatccacgtcttccaaggcctgatgcattcataagttgaagccctccccagatccccttggggagcctctgccctcctccagcccggatggctctcctccattttggtttgtttcctcttgtttgtcatcttattttgggtgctggggtggctgccagccctgtcccgggacctgctgggagggacaagaggccctcccccaggcagaagagcatgccctttgccgttgcatgcaaccagccctgtgattccacgtgcagatcccagcagcctgttggggcaggggtgccaagagaggcattccagaaggactgagggggcgttgaggaattgtggcgttgactggaatgccccctcaccccctcctgggccacatccgtactgcccggtaccgaggctc

SEQ ID NO: 73169 - DNA, 1690 bp, Homo sapiens
gctcggtacccgtactgttccacagggtatgaagtttgtacagatgatgactgcaaagtgaaggccccccgggcagctggcgatgcccgttctcttgatctctctcttctcgcgcgcgcactctctcttcaacactcccctgcgtaccccggttctagcaaacaccaattgattgactgagaatctgataaagcaacaaaagatttgtcccaagctgcatgattgctctttctccttcttccctgagtctctctccatgcccctcatctcttccttttgccctcgcctcttccatccacgtcttccaaggcctgatgcattcataagttgaagccctccccagatccccttggggagcctctgccctcctccagcccggatggctctcctccattttggtttgtttcctcttgtttgtcatcttattttgggtgctggggtggctgccagccctgtcccgggacctgctgggagggacaagaggccctcccccaggcagaagagcatgccctttgccgttgcatgcaaccagccctgtgattccacgtgcagatcccagcagcctgttggggcaggggtgccaagagaggcattccagaaggactgagggggcgttgaggaattgtggcgttgactggatgtggcccaggagggggtcgagggggccaactcacagaaggggactgacagtgggcaacactcacatcccactggctgctgttctgaaaccatctgattggctttctgaggtttggctgggtggggactgctcatttggccactctgcagattggacttgcccgcgttcctgaagcgctctcgagctgttctgtaaatacctggtgctaacatcccatgccgctccctcctcacgatgcacccaccgccctgagggcccgtcctaggaatggatgtggggatggtcgctttgtaatgtgctggttctctttttttttctttcccctctatggcccttaagactttcattttgttcagaaccatgctgggctagctaaagggtggggagagggaagatgggccccaccacgctctcaagagaacgcacctgcaataaaacagtcttgtcggccagctgcccaggggacggcagctacagcagcctctgcgtcctggtccgccagcacctcccgcttctccgtggtgacttggcgccgcttcctcacatctgtgctccgtgccctcttccctgcctcttccctcgcccacctgcctgcccccatactcccccagcggagagcatgatccgtgcccttgcttctgactttcgcctctgggacaagtaagtcaatgtgggcagttcagtcgtctgggttttttccccttttctgttcatttcatctggctccccccaccacctccccaccccaccccccaccccctgcttcccctcactgcccaggtcgatcaagtggcttttcctgggacctgcccagctttgagaatctcttctcatccaccctctggcacccagcctctgagggaaggagggatggggcatagtgggagacccagccaagagctgagggtaagggcaggtaggcgtgaggctgtggacattttcggaatgttttggttttgttttttttaaaccgggcaatattgtgttcagttcaagctgtgaagaaaaatatatatcaatgttttccaataaaatacagtgactacctga

SEQ ID NO: 73170 - DNA, 1717 bp, Homo sapiens
ctcgatactcgagctgtttctgccggtgacatcgatcgagatggccagctcaattatgaagtttgtacagatgatgactgcaaagtgaaggccccccgggcagctggcgatgcccgttctcttgatctctctcttctcgcgcgcgcactctctcttcaacactcccctgcgtaccccggttctagcaaacaccaattgattgactgagaatctgataaagcaacaaaagatttgtcccaagctgcatgattgctctttctccttcttccctgagtctctctccatgcccctcatctcttccttttgccctcgcctcttccatccacgtcttccaaggcctgatgcattcataagttgaagccctccccagatccccttggggagcctctgccctcctccagcccggatggctctcctccattttggtttgtttcctcttgtttgtcatcttattttgggtgctggggtggctgccagccctgtcccgggacctgctgggagggacaagaggccctcccccaggcagaagagcatgccctttgccgttgcatgcaaccagccctgtgattccacgtgcagatcccagcagcctgttggggcaggggtgccaagagaggcattccagaaggactgagggggcgttgaggaattgtggcgttgactggatgtggcccaggagggggtcgagggggccaactcacagaaggggactgacagtgggcaacactcacatcccactggctgctgttctgaaaccatctgattggctttctgaggtttggctgggtggggactgctcatttggccactctgcagattggacttgcccgcgttcctgaagcgctctcgagctgttctgtaaatacctggtgctaacatcccatgccgctccctcctcacgatgcacccaccgccctgagggcccgtcctaggaatggatgtggggatggtcgctttgtaatgtgctggttctctttttttttctttcccctctatggcccttaagactttcattttgttcagaaccatgctgggctagctaaagggtggggagagggaagatgggccccaccacgctctcaagagaacgcacctgcaataaaacagtcttgtcggccagctgcccaggggacggcagctacagcagcctctgcgtcctggtccgccagcacctcccgcttctccgtggtgacttggcgccgcttcctcacatctgtgctccgtgccctcttccctgcctcttccctcgcccacctgcctgcccccatactcccccagcggagagcatgatccgtgcccttgcttctgactttcgcctctgggacaagtaagtcaatgtgggcagttcagtcgtctgggttttttccccttttctgttcatttcatctggctccccccaccacctccccaccccaccccccaccccctgcttcccctcactgcccaggtcgatcaagtggcttttcctgggacctgcccagctttgagaatctcttctcatccaccctctggcacccagcctctgagggaaggagggatggggcatagtgggagacccagccaagagctgagggtaagggcaggtaggcgtgaggctgtggacattttcggaatgttttggttttgttttttttaaaccgggcaatattgtgttcagttcaagctgtgaagaaaaatatatatcaatgttttccaataaaatacagtgactacctga

SEQ ID NO: 73171 - DNA, 1832 bp, Homo sapiens
ggtagacagcggtggtaattggacagaggtatcgctcgagagcttatacgtagtgacgaacctgagggtagaactgtccgatgagcgataggtgtcgtatcatgatcacagcatggctgagtatcgatggaggatagcagtgtgaacttatgaatagttagtacaagatagattgactagtaaacgtagaagttgcccctgggtagtagatcagtgagctggcgatgcccgttctcttgatctctctcttctcgcgcgcgcactctctcttcaacactcccctgcgtaccccggttctagcaaacaccaattgattgactgagaatctgataaagcaacaaaagatttgtcccaagctgcatgattgctctttctccttcttccctgagtctctctccatgcccctcatctcttccttttgccctcgcctcttccatccacgtcttccaaggcctgatgcattcataagttgaagccctccccagatccccttggggagcctctgccctcctccagcccggatggctctcctccattttggtttgtttcctcttgtttgtcatcttattttgggtgctggggtggctgccagccctgtcccgggacctgctgggagggacaagaggccctcccccaggcagaagagcatgccctttgccgttgcatgcaaccagccctgtgattccacgtgcagatcccagcagcctgttggggcaggggtgccaagagaggcattccagaaggactgagggggcgttgaggaattgtggcgttgactggatgtggcccaggagggggtcgagggggccaactcacagaaggggactgacagtgggcaacactcacatcccactggctgctgttctgaaaccatctgattggctttctgaggtttggctgggtggggactgctcatttggccactctgcagattggacttgcccgcgttcctgaagcgctctcgagctgttctgtaaatacctggtgctaacatcccatgccgctccctcctcacgatgcacccaccgccctgagggcccgtcctaggaatggatgtggggatggtcgctttgtaatgtgctggttctctttttttttctttcccctctatggcccttaagactttcattttgttcagaaccatgctgggctagctaaagggtggggagagggaagatgggccccaccacgctctcaagagaacgcacctgcaataaaacagtcttgtcggccagctgcccaggggacggcagctacagcagcctctgcgtcctggtccgccagcacctcccgcttctccgtggtgacttggcgccgcttcctcacatctgtgctccgtgccctcttccctgcctcttccctcgcccacctgcctgcccccatactcccccagcggagagcatgatccgtgcccttgcttctgactttcgcctctgggacaagtaagtcaatgtgggcagttcagtcgtctgggttttttccccttttctgttcatttcatctggctccccccaccacctccccaccccaccccccaccccctgcttcccctcactgcccaggtcgatcaagtggcttttcctgggacctgcccagctttgagaatctcttctcatccaccctctggcacccagcctctgagggaaggagggatggggcatagtgggagacccagccaagagctgagggtaagggcaggtaggcgtgaggctgtggacattttcggaatgttttggttttgttttttttaaaccgggcaatattgtgttcagttcaagctgtgaagaaaaatatatatcaatgttttccaataaaatacagtgactacctga

SEQ ID NO: 73172 - DNA, 1641 bp, Homo sapiens
ggacgcgtgggtcgacccacgcgtcggctggcgatgcccgttctcttgatctctctcttctcgcgcgcgcactctctcttcaacactcccctgcgtaccccggttctagcaaacaccaattgattgactgagaatctgataaagcaacaaaagatttgtcccaagctgcatgattgctctttctccttcttccctgagtctctctccatgcccctcatctcttccttttgccctcgcctcttccatccacgtcttccaaggcctgatgcattcataagttgaagccctccccagatccccttggggagcctctgccctcctccagcccggatggctctcctccattttggtttgtttcctcttgtttgtcatcttattttgggtgctggggtggctgccagccctgtcccgggacctgctgggagggacaagaggccctcccccaggcagaagagcatgccctttgccgttgcatgcaaccagccctgtgattccacgtgcagatcccagcagcctgttggggcaggggtgccaagagaggcattccagaaggactgagggggcgttgaggaattgtggcgttgactggatgtggcccaggagggggtcgagggggccaactcacagaaggggactgacagtgggcaacactcacatcccactggctgctgttctgaaaccatctgattggctttctgaggtttggctgggtggggactgctcatttggccactctgcagattggacttgcccgcgttcctgaagcgctctcgagctgttctgtaaatacctggtgctaacatcccatgccgctccctcctcacgatgcacccaccgccctgagggcccgtcctaggaatggatgtggggatggtcgctttgtaatgtgctggttctctttttttttctttcccctctatggcccttaagactttcattttgttcagaaccatgctgggctagctaaagggtggggagagggaagatgggccccaccacgctctcaagagaacgcacctgcaataaaacagtcttgtcggccagctgcccaggggacggcagctacagcagcctctgcgtcctggtccgccagcacctcccgcttctccgtggtgacttggcgccgcttcctcacatctgtgctccgtgccctcttccctgcctcttccctcgcccacctgcctgcccccatactcccccagcggagagcatgatccgtgcccttgcttctgactttcgcctctgggacaagtaagtcaatgtgggcagttcagtcgtctgggttttttccccttttctgttcatttcatctggctccccccaccacctccccaccccaccccccaccccctgcttcccctcactgcccaggtcgatcaagtggcttttcctgggacctgcccagctttgagaatctcttctcatccaccctctggcacccagcctctgagggaaggagggatggggcatagtgggagacccagccaagagctgagggtaagggcaggtaggcgtgaggctgtggacattttcggaatgttttggttttgttttttttaaaccgggcaatattgtgttcagttcaagctgtgaagaaaaatatatatcaatgttttccaataaaatacagtgactacctga

SEQ ID NO: 73173 - DNA, 1548 bp, Homo sapiens
ctgatttcaaatgcttctgatgctttaggattgactgagaatctgataaagcaacaaaagatttgtcccaagctgcatgattgctctttctccttcttccctgagtctctctccatgcccctcatctcttccttttgccctcgcctcttccatccacgtcttccaaggcctgatgcattcataagttgaagccctccccagatccccttggggagcctctgccctcctccagcccggatggctctcctccattttggtttgtttcctcttgtttgtcatcttattttgggtgctggggtggctgccagccctgtcccgggacctgctgggagggacaagaggccctcccccaggcagaagagcatgccctttgccgttgcatgcaaccagccctgtgattccacgtgcagatcccagcagcctgttggggcaggggtgccaagagaggcattccagaaggactgagggggcgttgaggaattgtggcgttgactggatgtggcccaggagggggtcgagggggccaactcacagaaggggactgacagtgggcaacactcacatcccactggctgctgttctgaaaccatctgattggctttctgaggtttggctgggtggggactgctcatttggccactctgcagattggacttgcccgcgttcctgaagcgctctcgagctgttctgtaaatacctggtgctaacatcccatgccgctccctcctcacgatgcacccaccgccctgagggcccgtcctaggaatggatgtggggatggtcgctttgtaatgtgctggttctctttttttttctttcccctctatggcccttaagactttcattttgttcagaaccatgctgggctagctaaagggtggggagagggaagatgggccccaccacgctctcaagagaacgcacctgcaataaaacagtcttgtcggccagctgcccaggggacggcagctacagcagcctctgcgtcctggtccgccagcacctcccgcttctccgtggtgacttggcgccgcttcctcacatctgtgctccgtgccctcttccctgcctcttccctcgcccacctgcctgcccccatactcccccagcggagagcatgatccgtgcccttgcttctgactttcgcctctgggacaagtaagtcaatgtgggcagttcagtcgtctgggttttttccccttttctgttcatttcatctggctccccccaccacctccccaccccaccccccaccccctgcttcccctcactgcccaggtcgatcaagtggcttttcctgggacctgcccagctttgagaatctcttctcatccaccctctggcacccagcctctgagggaaggagggatggggcatagtgggagacccagccaagagctgagggtaagggcaggtaggcgtgaggctgtggacattttcggaatgttttggttttgttttttttaaaccgggcaatattgtgttcagttcaagctgtgaagaaaaatatatatcaatgttttccaataaaatacagtgactacctga

SEQ ID NO: 73174 - DNA, 1434 bp, Homo sapiens
ggacgcgtgggtcgacccacgcgtcgtcgcctcttccatccacgtcttccaaggcctgatgcattcataagttgaagccctccccagatccccttggggagcctctgccctcctccagcccggatggctctcctccattttggtttgtttcctcttgtttgtcatcttattttgggtgctggggtggctgccagccctgtcccgggacctgctgggagggacaagaggccctcccccaggcagaagagcatgccctttgccgttgcatgcaaccagccctgtgattccacgtgcagatcccagcagcctgttggggcaggggtgccaagagaggcattccagaaggactgagggggcgttgaggaattgtggcgttgactggatgtggcccaggagggggtcgagggggccaactcacagaaggggactgacagtgggcaacactcacatcccactggctgctgttctgaaaccatctgattggctttctgaggtttggctgggtggggactgctcatttggccactctgcagattggacttgcccgcgttcctgaagcgctctcgagctgttctgtaaatacctggtgctaacatcccatgccgctccctcctcacgatgcacccaccgccctgagggcccgtcctaggaatggatgtggggatggtcgctttgtaatgtgctggttctctttttttttctttcccctctatggcccttaagactttcattttgttcagaaccatgctgggctagctaaagggtggggagagggaagatgggccccaccacgctctcaagagaacgcacctgcaataaaacagtcttgtcggccagctgcccaggggacggcagctacagcagcctctgcgtcctggtccgccagcacctcccgcttctccgtggtgacttggcgccgcttcctcacatctgtgctccgtgccctcttccctgcctcttccctcgcccacctgcctgcccccatactcccccagcggagagcatgatccgtgcccttgcttctgactttcgcctctgggacaagtaagtcaatgtgggcagttcagtcgtctgggttttttccccttttctgttcatttcatctggctccccccaccacctccccaccccaccccccaccccctgcttcccctcactgcccaggtcgatcaagtggcttttcctgggacctgcccagctttgagaatctcttctcatccaccctctggcacccagcctctgagggaaggagggatggggcatagtgggagacccagccaagagctgagggtaagggcaggtaggcgtgaggctgtggacattttcggaatgttttggttttgttttttttaaaccgggcaatattgtgttcagttcaagctgtgaagaaaaatatatatcaatgttttccaataaaatacagtgactacctga

SEQ ID NO: 73175 - DNA, 1447 bp, Homo sapiens
  misc_feature (1447)..(1447): n is a, c, g, or t
agcgcgcgcgcgcccggcggcaaacccaattcctgtgcagggtggggacgagagattcgcgggcccgtaggtgtggagcggggcgcggagggatccgtgggagccgcagtgcggcggcgcgcgggccgggtggggcggggccgagcgaggcggggcgcgcgcggcggccgttgagggaccgttggggcgggaggcggcggcggcggcggcgcgcgctgcgggcagtgagtgtggaggcgcggacgcgcggcggagctggaactgctgcagctgctgccgccgccggaggaaccttgatccccgtgctccggacaccccgggcctcgccatggctgaccagctgactgaggagcagattgcagagttcaaggaggccttctccctctttgacaaggatggagatggcactatcaccaccaaggagttggggacagtgatgagatccctgggacagaaccccactgaagcagagctgcaggatatgatcaatgaggtggatgcagatgggaacgggaccattgacttcccggagttcctgaccatgatggccagaaagatgaaggacacagacagtgaggaggagatccgagaggcgttccgtgtctttgacaaggatgggaatggctacatcagcgccgcagagctgcgtcacgtaatgacgaacctgggggagaagctgaccgatgaggaggtggatgagatgatcagggaggctgacatcgatggagatggccaggtcaattatgaagagtttgtacagatgatgactgcaaagtgaaggccccccgggcagctggcgatgcccgttctcttgatctctctcttctcgcgcgcgcactctctcttcaacactcccctgcgtaccccggttctagcaaacaccaattgattgactgagaatctgataaagcaacaaaagatttgtcccaagctgcatgattgctctttctccttcttccctgagtctctctccatgcccctcatctcttccttttgccctcgcctcttccatccacgtcttccaaggcctgatgcattcataagttgaagccctccccagatccccttggggagcctctgccctcctccagcccggatggctctcctccgttcccctgagttggacaacctaattgggggcccgcggcatggatggaccagcccccggctcccaggacacccgcttggagagggcaaaaaaggggctcccccaggaaaaaagcagccactttgggagtcatagaaccagcgcggaataagccgtgaaaccaccacgctggtggagagagcgtcaactaaacgcacacgaagcggcagatagcaaactacagttagaccgagaagaacggacgaaagcaggagagcgagcaagtcggttactgacagccacagcagaatgaaataacgaaagcgacccagtccacctaggccacgcactgcattatgn

SEQ ID NO: 73176 - DNA, 1076 bp, Homo sapiens
ataaacagctcggtaccgggcagtatgtggcccaggagggggtcgagggggccaactcacagaaggggactgacagtgggcaacactcacatcccactggctgctgttctgaaaccatctgattggctttctgaggtttggctgggtggggactgctcatttggccactctgcagattggacttgcccgcgttcctgaagcgctctcgagctgttctgtaaatacctggtgctaacatcccatgccgctccctcctcacgatgcacccaccgccctgagggcccgtcctaggaatggatgtggggatggtcgctttgtaatgtgctggttctctttttttttctttcccctctatggcccttaagactttcattttgttcagaaccatgctgggctagctaaagggtggggagagggaagatgggccccaccacgctctcaagagaacgcacctgcaataaaacagtcttgtcggccagctgcccaggggacggcagctacagcagcctctgcgtcctggtccgccagcacctcccgcttctccgtggtgacttggcgccgcttcctcacatctgtgctccgtgccctcttccctgcctcttccctcgcccacctgcctgcccccatactcccccagcggagagcatgatccgtgcccttgcttctgactttcgcctctgggacaagtaagtcaatgtgggcagttcagtcgtctgggttttttccccttttctgttcatttcatctggctccccccaccacctccccaccccaccccccaccccctgcttcccctcactgcccaggtcgatcaagtggcttttcctgggacctgcccagctttgagaatctcttctcatccaccctctggcacccagcctctgagggaaggagggatggggcatagtgggagacccagccaagagctgagggtaagggcaggtaggcgtgaggctgtggacattttcggaatgttttggttttgttttttttaaaccgggcaatattgtgttcagttcaagctgtgaagaaaaatatatatcaatgttttccaataaaatacagtgactacctga

SEQ ID NO: 73177 - DNA, 1085 bp, Homo sapiens
agccgcagtgacttagagatcccccgggccagtatgtggcccaggagggggtcgagggggccaactcacagaaggggactgacagtgggcaacactcacatcccactggctgctgttctgaaaccatctgattggctttctgaggtttggctgggtggggactgctcatttggccactctgcagattggacttgcccgcgttcctgaagcgctctcgagctgttctgtaaatacctggtgctaacatcccatgccgctccctcctcacgatgcacccaccgccctgagggcccgtcctaggaatggatgtggggatggtcgctttgtaatgtgctggttctctttttttttctttcccctctatggcccttaagactttcattttgttcagaaccatgctgggctagctaaagggtggggagagggaagatgggccccaccacgctctcaagagaacgcacctgcaataaaacagtcttgtcggccagctgcccaggggacggcagctacagcagcctctgcgtcctggtccgccagcacctcccgcttctccgtggtgacttggcgccgcttcctcacatctgtgctccgtgccctcttccctgcctcttccctcgcccacctgcctgcccccatactcccccagcggagagcatgatccgtgcccttgcttctgactttcgcctctgggacaagtaagtcaatgtgggcagttcagtcgtctgggttttttccccttttctgttcatttcatctggctccccccaccacctccccaccccaccccccaccccctgcttcccctcactgcccaggtcgatcaagtggcttttcctgggacctgcccagctttgagaatctcttctcatccaccctctggcacccagcctctgagggaaggagggatggggcatagtgggagacccagccaagagctgagggtaagggcaggtaggcgtgaggctgtggacattttcggaatgttttggttttgttttttttaaaccgggcaatattgtgttcagttcaagctgtgaagaaaaatatatatcaatgttttccaataaaatacagtgactacctga

SEQ ID NO: 73178 - DNA, 1097 bp, Homo sapiens
  misc_feature (46)..(46): n is a, c, g, or t
gcggcgttatagaggatccccgtgacaggacagataggtaccaggntgtggcccaggagggggtcgagggggccaactcacagaaggggactgacagtgggcaacactcacatcccactggctgctgttctgaaaccatctgattggctttctgaggtttggctgggtggggactgctcatttggccactctgcagattggacttgcccgcgttcctgaagcgctctcgagctgttctgtaaatacctggtgctaacatcccatgccgctccctcctcacgatgcacccaccgccctgagggcccgtcctaggaatggatgtggggatggtcgctttgtaatgtgctggttctctttttttttctttcccctctatggcccttaagactttcattttgttcagaaccatgctgggctagctaaagggtggggagagggaagatgggccccaccacgctctcaagagaacgcacctgcaataaaacagtcttgtcggccagctgcccaggggacggcagctacagcagcctctgcgtcctggtccgccagcacctcccgcttctccgtggtgacttggcgccgcttcctcacatctgtgctccgtgccctcttccctgcctcttccctcgcccacctgcctgcccccatactcccccagcggagagcatgatccgtgcccttgcttctgactttcgcctctgggacaagtaagtcaatgtgggcagttcagtcgtctgggttttttccccttttctgttcatttcatctggctccccccaccacctccccaccccaccccccaccccctgcttcccctcactgcccaggtcgatcaagtggcttttcctgggacctgcccagctttgagaatctcttctcatccaccctctggcacccagcctctgagggaaggagggatggggcatagtgggagacccagccaagagctgagggtaagggcaggtaggcgtgaggctgtggacattttcggaatgttttggttttgttttttttaaaccgggcaatattgtgttcagttcaagctgtgaagaaaaatatatatcaatgttttccaataaaatacagtgactacctga

SEQ ID NO: 73179 - DNA, 1196 bp, Homo sapiens
agcgcgcgcgcgcccggcggcaaacccaattcctgtgcagggtggggacgagagattcgcgggcccgtaggtgtggagcggggcgcggagggatccgtgggagccgcagtgcggcggcgcgcgggccgggtggggcggggccgagcgaggcggggcgcgcgcggcggccgttgagggaccgttggggcgggaggcggcggcggcggcggcgcgcgctgcgggcagtgagtgtggaggcgcggacgcgcggcggagctggaactgctgcagctgctgccgccgccggaggaaccttgatccccgtgctccggacaccccgggcctcgccatggctgaccagctgactgaggagcagattgcagagttcaaggaggccttctccctctttgacaaggatggagatggcactatcaccaccaaggagttggggacagtgatgagatccctgggacagaaccccactgaagcagagctgcaggatatgatcaatgaggtggatgcagatgggaacgggaccattgacttcccggagttcctgaccatgatggccagaaagatgaaggacacagacagtgaggaggagatccgagaggcgttccgtgtctttgacaaggatgggaatggctacatcagcgccgcagagctgcgtcacgtaatgacgaacctgggggagaagctgaccgatgaggaggtggatgagatgatcagggaggctgacatcgatggagatggccaggtcaattatgaagagtttgtacagatgatgactgcaaagtgaaggccccccgggcagctggcgatgcccgttctcttgatctctctcttctcgcgcgcgcactctctcttcaacactcccctgcgtaccccggttctagcaaacaccaattgattgactgagaatctgataaagcaacaaaagatttgtcccaagctgcatgattgctctttctccttcttccctgagtctctctccatgcccctcatctcttccttttgcccctctgagggaaggagggatggggcatagtgggagacccagccaagagctgagggtaagggcaggtaggcgtgaggctgtggacattttcggaatgttttggttttgttttttttaaaccgggcaatattgtgttcagttcaagctgtgaagaaaaatatatatcaatgttttccaataaaatacagtgactacctga

SEQ ID NO: 73180 - DNA, 1044 bp, Homo sapiens
tgatacgacttcgagttcaggtactcacagaaggggactgacagtgggcaacactcacatcccactggctgctgttctgaaaccatctgattggctttctgaggtttggctgggtggggactgctcatttggccactctgcagattggacttgcccgcgttcctgaagcgctctcgagctgttctgtaaatacctggtgctaacatcccatgccgctccctcctcacgatgcacccaccgccctgagggcccgtcctaggaatggatgtggggatggtcgctttgtaatgtgctggttctctttttttttctttcccctctatggcccttaagactttcattttgttcagaaccatgctgggctagctaaagggtggggagagggaagatgggccccaccacgctctcaagagaacgcacctgcaataaaacagtcttgtcggccagctgcccaggggacggcagctacagcagcctctgcgtcctggtccgccagcacctcccgcttctccgtggtgacttggcgccgcttcctcacatctgtgctccgtgccctcttccctgcctcttccctcgcccacctgcctgcccccatactcccccagcggagagcatgatccgtgcccttgcttctgactttcgcctctgggacaagtaagtcaatgtgggcagttcagtcgtctgggttttttccccttttctgttcatttcatctggctccccccaccacctccccaccccaccccccaccccctgcttcccctcactgcccaggtcgatcaagtggcttttcctgggacctgcccagctttgagaatctcttctcatccaccctctggcacccagcctctgagggaaggagggatggggcatagtgggagacccagccaagagctgagggtaagggcaggtaggcgtgaggctgtggacattttcggaatgttttggttttgttttttttaaaccgggcaatattgtgttcagttcaagctgtgaagaaaaatatatatcaatgttttccaataaaatacagtgactacctga

SEQ ID NO: 73181 - DNA, 1029 bp, Homo sapiens
agcgcgcgcgcgcccggcggcaaacccaattcctgtgcagggtggggacgagagattcgcgggcccgtaggtgtggagcggggcgcggagggatccgtgggagccgcagtgcggcggcgcgcgggccgggtggggcggggccgagcgaggcggggcgcgcgcggcggccgttgagggaccgttggggcgggaggcggcggcggcggcggcgcgcgctgcgggcagtgagtgtggaggcgcggacgcgcggcggagctggaactgctgcagctgctgccgccgccggaggaaccttgatccccgtgctccggacaccccgggcctcgccatggctgaccagctgactgaggagcagattgcagagttcaaggaggccttctccctctttgacaaggatggagatggcactatcaccaccaaggagttggggacagtgatgagatccctgggacagaaccccactgaagcagagctgcaggatatgatcaatgaggtggatgcagatgggaacgggaccattgacttcccggagttcctgaccatgatggccagaaagatgaaggacacagacagtgaggaggagatccgagaggcgttccgtgtctttgacaaggatgggaatggctacatcagcgccgcagagctgcgtcacgtaatgacgaacctgggggagaagctgaccgatgaggaggtggatgagatgatcagggaggctgacatcgatggagatggccaggtcaattatgaagagtttgtacagatgatgactgcaaagtgaaggccccccgggcagctggcgatgcccgttctcttgatctctctcttctcgcgcgcgcactctctcttcaacactcccctgcgtaccccggttctagcaaacaccaattgattgactgagaatctgataaagcaacaaaagatttgtcccaagctgcatgattgctctttctccttcttccctgagtctctctccatgcccctcatctcttccttttgcccagttgatagcggaatcgcctcagttgatag

SEQ ID NO: 73182 - DNA, 929 bp, Homo sapiens
agcgcgcgcgcgcccggcggcaaacccaattcctgtgcagggtggggacgagagattcgcgggcccgtaggtgtggagcggggcgcggagggatccgtgggagccgcagtgcggcggcgcgcgggccgggtggggcggggccgagcgaggcggggcgcgcgcggcggccgttgagggaccgttggggcgggaggcggcggcggcggcggcgcgcgctgcgggcagtgagtgtggaggcgcggacgcgcggcggagctggaactgctgcagctgctgccgccgccggaggaaccttgatccccgtgctccggacaccccgggcctcgccatggctgaccagctgactgaggagcagattgcagagttcaaggaggccttctccctctttgacaaggatggagatggcactatcaccaccaaggagttggggacagtgatgagatccctgggacagaaccccactgaagcagagctgcaggatatgatcaatgaggtggatgcagatgggaacgggaccattgacttcccggagttcctgaccatgatggccagaaagatgaaggacacagacagtgaggaggagatccgagaggcgttccgtgtctttgacaaggatgggaatggctacatcagcgccgcagagctgcgtcacgtaatgacgaacctgggggagaagctgaccgatgaggaggtggatgagatgatcagggaggctgacatcgatggagatggccaggtcaattatgaagagtttgtacagatgatgactgcaaagtgaaggccccccgggcagctggcgatgcccgttctcttgatctctctcttctcgcgcgcgcactctctcttcaacactcccctgcgtaccccggttctagcaaacaccaattgattgactgagaatctgataaagcaacaaaagatttgtccca

SEQ ID NO: 73183 - DNA, 993 bp, Homo sapiens
agcgcgcgcgcgcccggcggcaaacccaattcctgtgcagggtggggacgagagattcgcgggcccgtaggtgtggagcggggcgcggagggatccgtgggagccgcagtgcggcggcgcgcgggccgggtggggcggggccgagcgaggcggggcgcgcgcggcggccgttgagggaccgttggggcgggaggcggcggcggcggcggcgcgcgctgcgggcagtgagtgtggaggcgcggacgcgcggcggagctggaactgctgcagctgctgccgccgccggaggaaccttgatccccgtgctccggacaccccgggcctcgccatggctgaccagctgactgaggagcagattgcagagttcaaggaggccttctccctctttgacaaggatggagatggcactatcaccaccaaggagttggggacagtgatgagatccctgggacagaaccccactgaagcagagctgcaggatatgatcaatgaggtggatgcagatgggaacgggaccattgacttcccggagttcctgaccatgatggccagaaagatgaaggacacagacagtgaggaggagatccgagaggcgttccgtgtctttgacaaggatgggaatggctacatcagcgccgcagagctgcgtcacgtaatgacgaacctgggggagaagctgaccgatgaggaggtggatgagatgatcagggaggctgacatcgatggagatggccaggtcaattatgaagagtttgtacagatgatgactgcaaagtgaaggccccccgggcagctggcgatgcccgttctcttgatctctctcttctcgcgcgcgcactctctcttcaacactcccctgcgtaccccggttctagcaaacaccaattgattgactgagaatctgataaagcaacaaaagatttgtcccaagctgcatgattgctctttctccttcttccctgtgaaaagtaggggatcctcctagagtcaccc

SEQ ID NO: 73184 - DNA, 1152 bp, Homo sapiens
atgggatcaggtcacagaatgaataagaggcagatttagagttttaacccaggtccttgctctatatatagtgtttttgatgggaatggctacatcagcgccgcagagctgcgtcacgtaatgacgaacctgggggagaagctgaccgatgaggaggtggatgagatgatcagggaggctgacatcgatggagatggccaggtcaattatgaagtggctgggtggggactgctcatttggccactctgcagattggacttgcccgcgttcctgaagcgctctcgagctgttctgtaaatacctggtgctaacatcccatgccgctccctcctcacgatgcacccaccgccctgagggcccgtcctaggaatggatgtggggatggtcgctttgtaatgtgctggttctctttttttttctttcccctctatggcccttaagactttcattttgttcagaaccatgctgggctagctaaagggtggggagagggaagatgggccccaccacgctctcaagagaacgcacctgcaataaaacagtcttgtcggccagctgcccaggggacggcagctacagcagcctctgcgtcctggtccgccagcacctcccgcttctccgtggtgacttggcgccgcttcctcacatctgtgctccgtgccctcttccctgcctcttccctcgcccacctgcctgcccccatactcccccagcggagagcatgatccgtgcccttgcttctgactttcgcctctgggacaagtaagtcaatgtgggcagttcagtcgtctgggttttttccccttttctgttcatttcatctggctccccccaccacctccccaccccaccccccaccccctgcttcccctcactgcccaggtcgatcaagtggcttttcctgggacctgcccagctttgagaatctcttctcatccaccctctggcacccagcctctgagggaaggagggatggggcatagtgggagacccagccaagagctgagggtaagggcaggtaggcgtgaggctgtggacattttcggaatgttttggttttgttttttttaaaccgggcaatattgtgttcagttcaagctgtgaagaaaaatatatatcaatgttttccaataaaatacagtgactacctga

SEQ ID NO: 73185 - DNA, 1032 bp, Homo sapiens
ctaatagctaaatcactctacagcagactgacctagaacaaggagatactttccacgtggatcgttgttctgtgcacatttgatagtgttcgtgatgttagaatgtctggacagggatcatctctggcgcgattggacttgcccgcgttcctgaagcgctctcgagctgttctgtaaatacctggtgctaacatcccatgccgctccctcctcacgatgcacccaccgccctgagggcccgtcctaggaatggatgtggggatggtcgctttgtaatgtgctggttctctttttttttctttcccctctatggcccttaagactttcattttgttcagaaccatgctgggctagctaaagggtggggagagggaagatgggccccaccacgctctcaagagaacgcacctgcaataaaacagtcttgtcggccagctgcccaggggacggcagctacagcagcctctgcgtcctggtccgccagcacctcccgcttctccgtggtgacttggcgccgcttcctcacatctgtgctccgtgccctcttccctgcctcttccctcgcccacctgcctgcccccatactcccccagcggagagcatgatccgtgcccttgcttctgactttcgcctctgggacaagtaagtcaatgtgggcagttcagtcgtctgggttttttccccttttctgttcatttcatctggctccccccaccacctccccaccccaccccccaccccctgcttcccctcactgcccaggtcgatcaagtggcttttcctgggacctgcccagctttgagaatctcttctcatccaccctctggcacccagcctctgagggaaggagggatggggcatagtgggagacccagccaagagctgagggtaagggcaggtaggcgtgaggctgtggacattttcggaatgttttggttttgttttttttaaaccgggcaatattgtgttcagttcaagctgtgaagaaaaatatatatcaatgttttccaataaaatacagtgactacctga

SEQ ID NO: 73186 - DNA, 1636 bp, Homo sapiens
  misc_feature (961)..(961): n is a, c, g, or t
  misc_feature (967)..(967): n is a, c, g, or t
agcgcgcgcgcgcccggcggcaaacccaattcctgtgcagggtggggacgagagattcgcgggcccgtaggtgtggagcggggcgcggagggatccgtgggagccgcagtgcggcggcgcgcgggccgggtggggcggggccgagcgaggcggggcgcgcgcggcggccgttgagggaccgttggggcgggaggcggcggcggcggcggcgcgcgctgcgggcagtgagtgtggaggcgcggacgcgcggcggagctggaactgctgcagctgctgccgccgccggaggaaccttgatccccgtgctccggacaccccgggcctcgccatggctgaccagctgactgaggagcagattgcagagttcaaggaggccttctccctctttgacaaggatggagatggcactatcaccaccaaggagttggggacagtgatgagatccctgggacagaaccccactgaagcagagctgcaggatatgatcaatgaggtggatgcagatgggaacgggaccattgacttcccggagttcctgaccatgatggccagaaagatgaaggacacagacagtgaggaggagatccgagaggcgttccgtgtctttgacaaggatgggaatggctacatcagcgccgcagagctgcgtcacgtaatgacgaacctgggggagaagctgaccgatgaggaggtggatgagatgatcagggaggctgacatcgatggagatggccaggtcaattatgaagagtttgtacagatgatgactgcaaagtgaaggccccccgggcagctggcgatgcccgttctcttgatctctctcttctcgcgcgcgcactctctcttcaacactcccctgcgtaccccggttctagcaaacaccaattgattgactgagaatctgataaagcaacaaaagatttgtcccaaaaaaaaacaaaaaaaaaaaaaaaaaaaaaanaaaaanaaaaaaaaaaaaaaaaaaaaaaaaaaaaaaaaaaaaaaggaatgattcccgccccagaaaaaaaaccccctcggtggggccgcaccaacaaccccgcatgaaaaaagaggaggaggtgaattctacaccccccaaagcgaccccaccgaagtaaacaagcgcccctgggcggcgcacaaagcgagcggtccaacaaagggaggaaggcggcggaccgggtcacagacgacggggaaaccccaccgccgaacgactcgcgggggacacaagccgacgcagggggtgccttccaaccaaaggacaacataggagcaggagacccaccggcccgcggggagagggagcgccaaacaaaaaacactccggtggctgtgtgtgtgtaggtaaccccaacaaatgaatggcgcagagtaacattttgtgggtcgaacataccacgcgtgccaagtctttcgccacaaagacgatgctctgtcgggtgccgtttgtgataagctccgccgccgatattacaaatggcgtgtttaggctggacccaattgctccggcggaataccaactgagcgtggcgacaaccttgtagtagcggggcacagcgggagataaattcgccttgtcgcaaagatgtgagtgtgccgcgcagcattggtgcttctgggaccgtataag

SEQ ID NO: 73187 - DNA, 1163 bp, Homo sapiens
agcgcgcgcgcgcccggcggcaaacccaattcctgtgcagggtggggacgagagattcgcgggcccgtaggtgtggagcggggcgcggagggatccgtgggagccgcagtgcggcggcgcgcgggccgggtggggcggggccgagcgaggcggggcgcgcgcggcggccgttgagggaccgttggggcgggaggcggcggcggcggcggcgcgcgctgcgggcagtgagtgtggaggcgcggacgcgcggcggagctggaactgctgcagctgctgccgccgccggaggaaccttgatccccgtgctccggacaccccgggcctcgccatggctgaccagctgactgaggagcagattgcagagttcaaggaggccttctccctctttgacaaggatggagatggcactatcaccaccaaggagttggggacagtgatgagatccctgggacagaaccccactgaagcagagctgcaggatatgatcaatgaggtggatgcagatgggaacgggaccattgacttcccggagttcctgaccatgatggccagaaagatgaaggacacagacagtgaggaggagatccgagaggcgttccgtgtctttgacaaggatgggaatggctacatcagcgccgcagagctgcgtcacgtaatgacgaacctgggggagaagctgaccgatgaggaggtggatgagatgatcagggaggctgacatcgatggagatggccaggtcaattatgaagagtttgtacagatgatgactgcaaagtgaaggccccccgggcagctggcgatgcccgttctcttgatctctctcttctcgcgcgcgcactctctcttcaacactcccctgcgtaccccggttctagcaaacaccaattgattgactgagaatctgataaagcaacaaaagatttgtcccacacaagaagacactggggcatatttacccgtgatcaacctcaatataaattaaaagaatctccgggggggggccccggtgcccaatagcccctaatatgggggctttctcatttcactgggccggatgaaatcaacggggagcaggaaagatccctttgcgatacccagatcttaaagttcgaagcgacttcatcttgtggaacggtctccgaggccactcgcatgggctctac

SEQ ID NO: 73188 - DNA, 980 bp, Homo sapiens
ggttttccgagatcccaaaaaccaggttaccccggctttattgcaaatttaatacgagtccctcccttaatagggagacccccgccgaatattttccccctcttgtacacaaaaaaacggggtccacagaaaaaaacccaagaaaacacctctggcccctttctatctataaccctctttttccccccacccaaaaaaaaagcccccgaaatttttttttttttttttttttttttttttttttttctttcccctctatggcccttaagactttcattttgttcagaaccatgctgggctagctaaagggtggggagagggaagatgggccccaccacgctctcaagagaacgcacctgcaataaaacagtcttgtcggccagctgcccaggggacggcagctacagcagcctctgcgtcctggtccgccagcacctcccgcttctccgtggtgacttggcgccgcttcctcacatctgtgctccgtgccctcttccctgcctcttccctcgcccacctgcctgcccccatactcccccagcggagagcatgatccgtgcccttgcttctgactttcgcctctgggacaagtaagtcaatgtgggcagttcagtcgtctgggttttttccccttttctgttcatttcatctggctccccccaccacctccccaccccaccccccaccccctgcttcccctcactgcccaggtcgatcaagtggcttttcctgggacctgcccagctttgagaatctcttctcatccaccctctggcacccagcctctgagggaaggagggatggggcatagtgggagacccagccaagagctgagggtaagggcaggtaggcgtgaggctgtggacattttcggaatgttttggttttgttttttttaaaccgggcaatattgtgttcagttcaagctgtgaagaaaaatatatatcaatgttttccaataaaatacagtgactacctga

SEQ ID NO: 73189 - DNA, 991 bp, Homo sapiens
agcgcgcgcgcgcccggcggcaaacccaattcctgtgcagggtggggacgagagattcgcgggcccgtaggtgtggagcggggcgcggagggatccgtgggagccgcagtgcggcggcgcgcgggccgggtggggcggggccgagcgaggcggggcgcgcgcggcggccgttgagggaccgttggggcgggaggcggcggcggcggcggcgcgcgctgcgggcagtgagtgtggaggcgcggacgcgcggcggagctggaactgctgcagctgctgccgccgccggaggaaccttgatccccgtgctccggacaccccgggcctcgccatggctgaccagctgactgaggagcagattgcagagttcaaggaggccttctccctctttgacaaggatggagatggcactatcaccaccaaggagttggggacagtgatgagatccctgggacagaaccccactgaagcagagctgcaggatatgatcaatgaggtggatgcagatgggaacgggaccattgacttcccggagttcctgaccatgatggccagaaagatgaaggacacagacagtgaggaggagatccgagaggcgttccgtgtctttgacaaggatgggaatggctacatcagcgccgcagagctgcgtcacgtaatgacgaacctgggggagaagctgaccgatgaggaggtggatgagatgatcagggaggctgacatcgatggagatggccaggtcaattatgaagagtttgtacagatgatgactgcaaagtgaaggccccccgggcagctggcgatgcccgttctcttgatctctctcttctcgcgcgcgcactctctcttcaacactcccctgcgtacatgcgcgcacaccgactgaaggaggatgagcatatgattaagcaacccaagagttgacactcagtcgcagtgtttgatatttttccttattgaccagactatctctaccaggcccctcatatcggtc

SEQ ID NO: 73190 - DNA, 690 bp, Homo sapiens
agcgcgcgcgcgcccggcggcaaacccaattcctgtgcagggtggggacgagagattcgcgggcccgtaggtgtggagcggggcgcggagggatccgtgggagccgcagtgcggcggcgcgcgggccgggtggggcggggccgagcgaggcggggcgcgcgcggcggccgttgagggaccgttggggcgggaggcggcggcggcggcggcgcgcgctgcgggcagtgagtgtggaggcgcggacgcgcggcggagctggaactgctgcagctgctgccgccgccggaggaaccttgatccccgtgctccggacaccccgggcctcgccatggctgaccagctgactgaggagcagattgcagagttcaaggaggccttctccctctttgacaaggatggagatggcactatcaccaccaaggagttggggacagtgatgagatccctgggacagaaccccactgaagcagagctgcaggatatgatcaatgaggtggatgcagatgggaacgggaccattgacttcccggagttcctgaccatgatggccagaaagatgaaggacacagacagtgaggaggagatccgagaggcgttccgtgtctttgacaagatgggaatggctccaagcgccacccaacgtgccacccgatgtgcctccccaagcgccacccaaagagccaccaagag

SEQ ID NO: 73191 - DNA, 557 bp, Homo sapiens
aggtatctagagatccgtgtcatccccttcgcgcggcggagctggaactgctgcagctgctgccgccgccggaggaaccttgatccccgtgctccggacaccccgggcctcgccatggctgaccagctgactgaggagcagattgcagagttcaaggaggccttctccctctttgacaaggatggagatggcactatcaccaccaaggagtttgtacagatgatgactgcaaagtgaaggccccccgggcagctggcgatgcccgttctcttgatctctctcttctcgcgcgcgcactctctcttcaacactcccctgcgtaccccggttctagcaaacaccaattgattgactgagaatctgataaagcaacaaaagatttgtcccaagctgcatgattgctctttctccttcttccctgccaagattgagctctctgcccttgatcagccccacctggcctagaccagcagacagagccaggagaagctcactgcattcccagccccacccccaagttctccaacatcacacccacccgcccgccgggatctcta

SEQ ID NO: 73192 - DNA, 388 bp, Homo sapiens
aggtatctagagatccgtgtcatccccttcgcgcggcggagctggaactgctgcagctgctgccgccgccggaggaaccttgatccccgtgctccggacaccccgggcctcgccatggctgaccagctgactgaggagcagattgcagagttcaaggaggccttctccctctttgacaaggatggagatggcactatcaccaccaaggagtttgtacagatgatgactgcaaagtgaaggccccccgggcagctggcgatgcccgttctcttgatctctctcttctcgcgcgcgcactctctcttcaacactcccctgcgtaccccggttctagcaaacaccaattgattgactgagaatctgataaagcaacaaaagatttgtccca

SEQ ID NO: 73193 - DNA, 387 bp, Homo sapiens
tggctgttctagaggatcccaactcaggggcgagctgcaggatatgatcaatgaggtggatgcagatgggaacgggaccattgacttcccggagttcctgaccatgatggccagaaagatgaaggacacagacagtgaggaggagatccgagaggcgttccgtgtctttgacaaggatgggaatggctacatcagcgccgcagagctgcgtcacgtaatgacgaacctgggggagaagctgaccgatgaggaggtggatgagatgatcagggaggctgacatcgatggagatggccaggtcaattatgaagagtttgtacagatgatgactgcaaagtgaaggccccccgggcacgcccctgagttgcagctcgccactgagctgca

SEQ ID NO: 73194 - DNA, 310 bp, Homo sapiens
ccacccgacggcgtgcgggggagagagagagtccagaattcgccccgaactggctgggtggggactgctcatttggccactctgcagattggacttgcccgcgttcctgaagcgctctcgagctgttctgtaaatacctggtgctaacatcccatgccgctccctcctcacgatgcacccaccgccctgagggcccgtcctaggaatggatgtggggatggtcgctttgtaatgtgctggttctctttttttttctttcccctctatggccgtgtttcatccgctgtgacctgctctcgtaccacgggaa

SEQ ID NO: 73195 - DNA, 363 bp, Homo sapiens
  misc_feature (324)..(324): n is a, c, g, or t
tcctgcaggctctgtctgaggcgccgcatctcttcctgtgtgggctcgcgctcttccatccatgtcttccaaggcctgatgcattcataagttgaagccctccccatcattttcttcttccggacaccccgggcctcgccatggctgaccagctgactgaggagcagattgcagagttcaaggaggccttctccctctttgacaaggatggagatggcactatcaccaccaaggagttggggacagtgatgagatccctgggacagaaccccactgaagcagagctgcaggatatgatcaatgaggtggatgcagatggaacgnggaccattgacttcccggaagaagaaaatatccgggtac

SEQ ID NO: 73196 - DNA, 2407 bp, Homo sapiens
agcgcgcgcgcgcccggcggcaaacccaattcctgtgcagggtggggacgagagattcgcgggcccgtaggtgtggagcggggcgcggagggatccgtgggagccgcagtgcggcggcgcgcgggccgggtggggcggggccgagcgaggcggggcgcgcgcggcggccgttgagggaccgttggggcgggaggcggcggcggcggcggcgcgcgctgcgggcagtgagtgtggaggcgcggacgcgcggcggagctggaactgctgcagctgctgccgccgccggaggaaccttgatccccgtgctccggacaccccgggcctcgccatggctgaccagctgactgaggagcagattgcagagttcaaggaggccttctccctctttgacaaggatggagatggcactatcaccaccaaggagttggggacagtgatgagatccctgggacagaaccccactgaagcagagctgcaggatatgatcaatgaggtggatgcagatgggaacgggaccattgacttcccggagttcctgaccatgatggccagaaagatgaaggacacagacagtgaggaggagatccgagaggcgttccgtgtctttgacaaggatgggaatggctacatcagcgccgcagagctgcgtcacgtaatgacgaacctgggggagaagctgaccgatgaggaggtggatgagatgatcagggaggctgacatcgatggagatggccaggtcaattatgaagagtttgtacagatgatgactgcaaagtgaaggccccccgggcagctggcgatgcccgttctcttgatctctctcttctcgcgcgcgcactctctcttcaacactcccctgcgtaccccggttctagcaaacaccaattgattgactgagaatctgataaagcaacaaaagatttgtcccaagctgcatgattgctctttctccttcttccctgagtctctctccatgcccctcatctcttccttttgccctcgcctcttccatccacgtcttccaaggcctgatgcattcataagttgaagccctccccagatccccttggggagcctctgccctcctccagcccggatggctctcctccattttggtttgtttcctcttgtttgtcatcttattttgggtgctggggtggctgccagccctgtcccgggacctgctgggagggacaagaggccctcccccaggcagaagagcatgccctttgccgttgcatgcaaccagccctgtgattccacgtgcagatcccagcagcctgttggggcaggggtgccaagagaggcattccagaaggactgagggggcgttgaggaattgtggcgttgactggatgtggcccaggagggggtcgagggggccaactcacagaaggggactgacagtgggcaacactcacatcccactggctgctgttctgaaaccatctgattggctttctgaggtttggctgggtggggactgctcatttggccactctgcagattggacttgcccgcgttcctgaagcgctctcgagctgttctgtaaatacctggtgctaacatcccatgccgctccctcctcacgatgcacccaccgccctgagggcccgtcctaggaatggatgtggggatggtcgctttgtaatgtgctggttctctttttttttctttcccctctatggcccttaagactttcattttgttcagaaccatgctgggctagctaaagggtggggagagggaagatgggccccaccacgctctcaagagaacgcacctgcaataaaacagtcttgtcggccagctgcccaggggacggcagctacagcagcctctgcgtcctggtccgccagcacctcccgcttctccgtggtgacttggcgccgcttcctcacatctgtgctccgtgccctcttccctgcctcttccctcgcccacctgcctgcccccatactcccccagcggagagcatgatccgtgcccttgcttctgactttcgcctctgggacaagtaagtcaatgtgggcagttcagtcgtctgggttttttccccttttctgttcatttcatctggctccccccaccacctccccaccccaccccccaccccctgcttcccctcactgcccaggtcgatcaagtggcttttcctgggacctgcccagctttgagaatctcttctcatccaccctctggcacccagcctctgagggaaggagggatggggcatagtgggagacccagccaagagctgagggtaagggcaggtaggcgtgaggctgtggacattttcggaatgttttggttttgttttttttaaaccgggcaatattgtgttcagttcaagctgtgaagaaaaatatatatcaatgttttccaataaaatacagtgactacctga

SEQ ID NO: 73197 - DNA, 3114 bp, Homo sapiens
  misc_feature (2439)..(2439): n is a, c, g, or t
  misc_feature (2445)..(2445): n is a, c, g, or t
agcgcgcgcgcgcccggcggcaaacccaattcctgtgcagggtggggacgagagattcgcgggcccgtaggtgtggagcggggcgcggagggatccgtgggagccgcagtgcggcggcgcgcgggccgggtggggcggggccgagcgaggcggggcgcgcgcggcggccgttgagggaccgttggggcgggaggcggcggcggcggcggcgcgcgctgcgggcagtgagtgtggaggcgcggacgcgcggcggagctggaactgctgcagctgctgccgccgccggaggaaccttgatccccgtgctccggacaccccgggcctcgccatggctgaccagctgactgaggagcagattgcagagttcaaggaggccttctccctctttgacaaggatggagatggcactatcaccaccaaggagttggggacagtgatgagatccctgggacagaaccccactgaagcagagctgcaggatatgatcaatgaggtggatgcagatgggaacgggaccattgacttcccggagttcctgaccatgatggccagaaagatgaaggacacagacagtgaggaggagatccgagaggcgttccgtgtctttgacaaggatgggaatggctacatcagcgccgcagagctgcgtcacgtaatgacgaacctgggggagaagctgaccgatgaggaggtggatgagatgatcagggaggctgacatcgatggagatggccaggtcaattatgaagagtttgtacagatgatgactgcaaagtgaaggccccccgggcagctggcgatgcccgttctcttgatctctctcttctcgcgcgcgcactctctcttcaacactcccctgcgtaccccggttctagcaaacaccaattgattgactgagaatctgataaagcaacaaaagatttgtcccaagctgcatgattgctctttctccttcttccctgagtctctctccatgcccctcatctcttccttttgccctcgcctcttccatccacgtcttccaaggcctgatgcattcataagttgaagccctccccagatccccttggggagcctctgccctcctccagcccggatggctctcctccattttggtttgtttcctcttgtttgtcatcttattttgggtgctggggtggctgccagccctgtcccgggacctgctgggagggacaagaggccctcccccaggcagaagagcatgccctttgccgttgcatgcaaccagccctgtgattccacgtgcagatcccagcagcctgttggggcaggggtgccaagagaggcattccagaaggactgagggggcgttgaggaattgtggcgttgactggatgtggcccaggagggggtcgagggggccaactcacagaaggggactgacagtgggcaacactcacatcccactggctgctgttctgaaaccatctgattggctttctgaggtttggctgggtggggactgctcatttggccactctgcagattggacttgcccgcgttcctgaagcgctctcgagctgttctgtaaatacctggtgctaacatcccatgccgctccctcctcacgatgcacccaccgccctgagggcccgtcctaggaatggatgtggggatggtcgctttgtaatgtgctggttctctttttttttctttcccctctatggcccttaagactttcattttgttcagaaccatgctgggctagctaaagggtggggagagggaagatgggccccaccacgctctcaagagaacgcacctgcaataaaacagtcttgtcggccagctgcccaggggacggcagctacagcagcctctgcgtcctggtccgccagcacctcccgcttctccgtggtgacttggcgccgcttcctcacatctgtgctccgtgccctcttccctgcctcttccctcgcccacctgcctgcccccatactcccccagcggagagcatgatccgtgcccttgcttctgactttcgcctctgggacaagtaagtcaatgtgggcagttcagtcgtctgggttttttccccttttctgttcatttcatctggctccccccaccacctccccaccccaccccccaccccctgcttcccctcactgcccaggtcgatcaagtggcttttcctgggacctgcccagctttgagaatctcttctcatccaccctctggcacccagcctctgagggaaggagggatggggcatagtgggagacccagccaagagctgagggtaagggcaggtaggcgtgaggctgtggacattttcggaatgttttggttttgttttttttaaaccgggcaatattgtgttcagttcaagctgtgaagaaaaatatatatcaatgttttccaataaaatacagtgactacctgaaaaaaaaacaaaaaaaaaaaaaaaaaaaaaanaaaaanaaaaaaaaaaaaaaaaaaaaaaaaaaaaaaaaaaaaaaggaatgattcccgccccagaaaaaaaaccccctcggtggggccgcaccaacaaccccgcatgaaaaaagaggaggaggtgaattctacaccccccaaagcgaccccaccgaagtaaacaagcgcccctgggcggcgcacaaagcgagcggtccaacaaagggaggaaggcggcggaccgggtcacagacgacggggaaaccccaccgccgaacgactcgcgggggacacaagccgacgcagggggtgccttccaaccaaaggacaacataggagcaggagacccaccggcccgcggggagagggagcgccaaacaaaaaacactccggtggctgtgtgtgtgtaggtaaccccaacaaatgaatggcgcagagtaacattttgtgggtcgaacataccacgcgtgccaagtctttcgccacaaagacgatgctctgtcgggtgccgtttgtgataagctccgccgccgatattacaaatggcgtgtttaggctggacccaattgctccggcggaataccaactgagcgtggcgacaaccttgtagtagcggggcacagcgggagataaattcgccttgtcgcaaagatgtgagtgtgccgcgcagcattggtgcttctgggaccgtataag

SEQ ID NO: 73198 - DNA, 2428 bp, Homo sapiens
agcgcgcgcgcgcccggcggcaaacccaattcctgtgcagggtggggacgagagattcgcgggcccgtaggtgtggagcggggcgcggagggatccgtgggagccgcagtgcggcggcgcgcgggccgggtggggcggggccgagcgaggcggggcgcgcgcggcggccgttgagggaccgttggggcgggaggcggcggcggcggcggcgcgcgctgcgggcagtgagtgtggaggcgcggacgcgcggcggagctggaactgctgcagctgctgccgccgccggaggaaccttgatccccgtgctccggacaccccgggcctcgccatggctgaccagctgactgaggagcagattgcagagttcaaggaggccttctccctctttgacaaggatggagatggcactatcaccaccaaggagttggggacagtgatgagatccctgggacagaaccccactgaagcagagctgcaggatatgatcaatgaggtggatgcagatgggaacgggaccattgacttcccggagttcctgaccatgatggccagaaagatgaaggacacagacagtgaggaggagatccgagaggcgttccgtgtctttgacaaggatgggaatggctacatcagcgccgcagagctgcgtcacgtaatgacgaacctgggggagaagctgaccgatgaggaggtggatgagatgatcagggaggctgacatcgatggagatggccaggtcaattatgaagagtttgtacagatgatgactgcaaagtgaaggccccccgggcagctggcgatgcccgttctcttgatctctctcttctcgcgcgcgcactctctcttcaacactcccctgcgtaccccggttctagcaaacaccaattgattgactgagaatctgataaagcaacaaaagatttgtcccaagctgcatgattgctctttctccttcttccctgagtctctctccatgcccctcatctcttccttttgccctcgcctcttccatccacgtcttccaaggcctgatgcattcataagttgaagccctccccagatccccttggggagcctctgccctcctccagcccggatggctctcctccattttggtttgtttcctcttgtttgtcatcttattttgggtgctggggtggctgccagccctgtcccgggacctgctgggagggacaagaggccctcccccaggcagaagagcatgccctttgccgttgcatgcaaccagccctgtgattccacgtgcagatcccagcagcctgttggggcaggggtgccaagagaggcattccagaaggactgagggggcgttgaggaattgtggcgttgactggatgtggcccaggagggggtcgagggggccaactcacagaaggggactgacagtgggcaacactcacatcccactggctgctgttctgaaaccatctgattggctttctgaggtttggctgggtggggactgctcatttggccactctgcagattggacttgcccgcgttcctgaagcgctctcgagctgttctgtaaatacctggtgctaacatcccatgccgctccctcctcacgatgcacccaccgccctgagggcccgtcctaggaatggatgtggggatggtcgctttgtaatgtgctggttctctttttttttctttcccctctatggcccttaagactttcattttgttcagaaccatgctgggctagctaaagggtggggagagggaagatgggccccaccacgctctcaagagaacgcacctgcaataaaacagtcttgtcggccagctgcccaggggacggcagctacagcagcctctgcgtcctggtccgccagcacctcccgcttctccgtggtgacttggcgccgcttcctcacatctgtgctccgtgccctcttccctgcctcttccctcgcccacctgcctgcccccatactcccccagcggagagcatgatccgtgcccttgcttctgactttcgcctctgggacaagtaagtcaatgtgggcagttcagtcgtctgggttttttccccttttctgttcatttcatctggctccccccaccaaaaaatctgacacgaaaggaagacccccacaacgcatgtggtttccacatcaactggcacgaggtaggtcacaaagtggcttttcctgggacctgcccagctttgagaatctcttctcatccaccctctggcacccagcctctgagggaaggagggatggggcatagtgggagacccagccaagagctgagggtaagggcaggtaggcgtgaggctgtggacattttcggaatgttttggttttgttttttttaaaccgggcaatattgtgttcagttcaagctgtgaagaaaaatatatatcaatgttttccaataaaatacagtgactacctga

SEQ ID NO: 73199 - DNA, 2186 bp, Homo sapiens
agcgcgcgcgcgcccggcggcaaacccaattcctgtgcagggtggggacgagagattcgcgggcccgtaggtgtggagcggggcgcggagggatccgtgggagccgcagtgcggcggcgcgcgggccgggtggggcggggccgagcgaggcggggcgcgcgcggcggccgttgagggaccgttggggcgggaggcggcggcggcggcggcgcgcgctgcgggcagtgagtgtggaggcgcggacgcgcggcggagctggaactgctgcagctgctgccgccgccggaggaaccttgatccccgtgctccggacaccccgggcctcgccatggctgaccagctgactgaggagcagattgcagagttcaaggaggccttctccctctttgacaaggatggagatggcactatcaccaccaaggagttggggacagtgatgagatccctgggacagaaccccactgaagcagagctgcaggatatgatcaatgaggtggatgcagatgggaacgggaccattgacttcccggagttcctgaccatgatggccagaaagatgaaggacacagacagtgaggaggagatccgagaggcgttccgtgtctttgacaaggatgggaatggctacatcagcgccgcagagctgcgtcacgtaatgacgaacctgggggagaagctgaccgatgaggaggtggatgagatgatcagggaggctgacatcgatggagatggccaggtcaattatgaagagtttgtacagatgatgactgcaaagtgaaggccccccgggcagctggcgatgcccgttctcttgatctctctcttctcgcgcgcgcactctctcttcaacactcccctgcgtaccccggttctagcaaacaccaattgattgactgagaatctgataaagcaacaaaagatttgtcccaagctgcatgattgctctttctccttcttccctgagtctctctccatgcccctcatctcttccttttgccctcgcctcttccatccacgtcttccaaggcctgatgcattcataagttgaagccctccccagatccccttggggagcctctgccctcctccagcccggatggctctcctccattttggtttgtttcctcttgtttgtcatcttattttgggtgctggggtggctgccagccctgtcccgggacctgctgggagggacaagaggccctcccccaggcagaagagcatgccctttgccgttgcatgcaaccagccctgtgattccacgtgcagatcccagcagcctgttggggcaggggtgccaagagaggcattccagaaggactgagggggcgttgaggaattgtggcgttgactggatgtggcccaggagggggtcgagggggccaactcacagaaggggactgacagtgggcaacactcacatcccactggctgctgttctgaaaccatctgattggctttctgaggtttggctgggtggggactgctcatttggccactctgcagattggacttgcccgcgttcctgaagcgctctcgagctgttctgtaaatacctggtgctaacatcccatgccgctccctcctcacgatgcacccaccgccctgagggcccgtcctaggaatggatgtggggatggtcgctttgtaatgtgctggttctctttttttttctttcccctctatggcccttaagactttcattttgttcagaaccatgctgggctagctaaagggtggggagagggaagatgggccccaccacgctctcaagagaacgcacctgcaataaaacagtcttgtcggccagctgcccaggggacggcagctacagcagcctctgcgtcctggtccgccagcacctcccgcttctccgtggtgacttggcgccgcttcctcacatctgtgctccgtgccctcttccctgcctcttccctcgcccacctgcctgcccccatactcccccagcggagagcatgatccgtgcccttgcttctgactttcgcctctgggacaagtaagtcaatgtgggcagttcagtcgtctgggttttttccccttttctgttcatttcatctggctccccccaccgctctgggcacctacctgtcgacttcaccttcctgccacatgatgagcagttgctatgtccaactgagtctgtggggtgccaggtgagtacctcc

SEQ ID NO: 73200 - DNA, 1987 bp, Homo sapiens
agcgcgcgcgcgcccggcggcaaacccaattcctgtgcagggtggggacgagagattcgcgggcccgtaggtgtggagcggggcgcggagggatccgtgggagccgcagtgcggcggcgcgcgggccgggtggggcggggccgagcgaggcggggcgcgcgcggcggccgttgagggaccgttggggcgggaggcggcggcggcggcggcgcgcgctgcgggcagtgagtgtggaggcgcggacgcgcggcggagctggaactgctgcagctgctgccgccgccggaggaaccttgatccccgtgctccggacaccccgggcctcgccatggctgaccagctgactgaggagcagattgcagagttcaaggaggccttctccctctttgacaaggatggagatggcactatcaccaccaaggagttggggacagtgatgagatccctgggacagaaccccactgaagcagagctgcaggatatgatcaatgaggtggatgcagatgggaacgggaccattgacttcccggagttcctgaccatgatggccagaaagatgaaggacacagacagtgaggaggagatccgagaggcgttccgtgtctttgacaaggatgggaatggctacatcagcgccgcagagctgcgtcacgtaatgacgaacctgggggagaagctgaccgatgaggaggtggatgagatgatcagggaggctgacatcgatggagatggccaggtcaattatgaagagtttgtacagatgatgactgcaaagtgaaggccccccgggcagctggcgatgcccgttctcttgatctctctcttctcgcgcgcgcactctctcttcaacactcccctgcgtaccccggttctagcaaacaccaattgattgactgagaatctgataaagcaacaaaagatttgtcccaagctgcatgattgctctttctccttcttccctgagtctctctccatgcccctcatctcttccttttgccctcgcctcttccatccacgtcttccaaggcctgatgcattcataagttgaagccctccccagatccccttggggagcctctgccctcctccagcccggatggctctcctccattttggtttgtttcctcttgtttgtcatcttattttgggtgctggggtggctgccagccctgtcccgggacctgctgggagggacaagaggccctcccccaggcagaagagcatgccctttgccgttgcatgcaaccagccctgtgattccacgtgcagatcccagcagcctgttggggcaggggtgccaagagaggcattccagaaggactgagggggcgttgaggaattgtggcgttgactggatgtggcccaggagggggtcgagggggccaactcacagaaggggactgacagtgggcaacactcacatcccactggctgctgttctgaaaccatctgattggctttctgaggtttggctgggtggggactgctcatttggccactctgcagattggacttgcccgcgttcctgaagcgctctcgagctgttctgtaaatacctggtgctaacatcccatgccgctccctcctcacgatgcacccaccgccctgagggcccgtcctaggaatggatgtggggatggtcgctttgtaatgtgctggttctctttttttttctttcccctctatggcccttaagactttcattttgttcagaaccatgctgggctagctaaagggtggggagagggaagatgggccccaccacgctctcaagagaacgcacctgcaataaaacagtcttgtcggccagctgcccaggggacggcagctacagcagcctctgcgtcctggtccgccagcacctcccgcttctccgtggtgacttggcgccgcttcctcacatctgtgctccgtgccctcttccctgcctcttccctcgcccaccaacctggtgccctacccccgcatccacatccgtactggcccg

SEQ ID NO: 73201 - DNA, 2192 bp, Homo sapiens
agcgcctgcctccagcctgaccagagttctttaggtgcttgagcaactcgggccgccggttaggagaatttttgccacttgggtggactctgcctgagccaaccgcctccaaataggctgaccagctgactgaggagcagattgcagagttcaaggaggccttctccctctttgacaaggatggagatggcactatcaccaccaaggagttggggacagtgatgagatccctgggacagaaccccactgaagcagagctgcaggatatgatcaatgaggtggatgcagatgggaacgggaccattgacttcccggagttcctgaccatgatggccagaaagatgaaggacacagacagtgaggaggagatccgagaggcgttccgtgtctttgacaaggatgggaatggctacatcagcgccgcagagctgcgtcacgtaatgacgaacctgggggagaagctgaccgatgaggaggtggatgagatgatcagggaggctgacatcgatggagatggccaggtcaattatgaagagtttgtacagatgatgactgcaaagtgaaggccccccgggcagctggcgatgcccgttctcttgatctctctcttctcgcgcgcgcactctctcttcaacactcccctgcgtaccccggttctagcaaacaccaattgattgactgagaatctgataaagcaacaaaagatttgtcccaagctgcatgattgctctttctccttcttccctgagtctctctccatgcccctcatctcttccttttgccctcgcctcttccatccacgtcttccaaggcctgatgcattcataagttgaagccctccccagatccccttggggagcctctgccctcctccagcccggatggctctcctccattttggtttgtttcctcttgtttgtcatcttattttgggtgctggggtggctgccagccctgtcccgggacctgctgggagggacaagaggccctcccccaggcagaagagcatgccctttgccgttgcatgcaaccagccctgtgattccacgtgcagatcccagcagcctgttggggcaggggtgccaagagaggcattccagaaggactgagggggcgttgaggaattgtggcgttgactggatgtggcccaggagggggtcgagggggccaactcacagaaggggactgacagtgggcaacactcacatcccactggctgctgttctgaaaccatctgattggctttctgaggtttggctgggtggggactgctcatttggccactctgcagattggacttgcccgcgttcctgaagcgctctcgagctgttctgtaaatacctggtgctaacatcccatgccgctccctcctcacgatgcacccaccgccctgagggcccgtcctaggaatggatgtggggatggtcgctttgtaatgtgctggttctctttttttttctttcccctctatggcccttaagactttcattttgttcagaaccatgctgggctagctaaagggtggggagagggaagatgggccccaccacgctctcaagagaacgcacctgcaataaaacagtcttgtcggccagctgcccaggggacggcagctacagcagcctctgcgtcctggtccgccagcacctcccgcttctccgtggtgacttggcgccgcttcctcacatctgtgctccgtgccctcttccctgcctcttccctcgcccacctgcctgcccccatactcccccagcggagagcatgatccgtgcccttgcttctgactttcgcctctgggacaagtaagtcaatgtgggcagttcagtcgtctgggttttttccccttttctgttcatttcatctggctccccccaccacctccccaccccaccccccaccccctgcttcccctcactgcccaggtcgatcaagtggcttttcctgggacctgcccagctttgagaatctcttctcatccaccctctggcacccagcctctgagggaaggagggatggggcatagtgggagacccagccaagagctgagggtaagggcaggtaggcgtgaggctgtggacattttcggaatgttttggttttgttttttttaaaccgggcaatattgtgttcagttcaagctgtgaagaaaaatatatatcaatgttttccaataaaatacagtgactacctga

SEQ ID NO: 73202 - DNA, 2739 bp, Homo sapiens
gctgtggccttcccactcagcactgctagctcctcatcctcctggcttggcagccgtcccctcgctttccatccccccatcaaccccacgcactgtccgtcagccatgttctgctgccgaccacccccacgctcaccacacgcagtggctcagctcctttggaagctggtagcacccacggcaaggaacagggctgccagtcagaagggagtggatgcctgcatttcctcttcaggccggccagaggcattctgcagcctcccctcctcgtcccagccagccaaccctggctaacacactcagacaaagaatcctttcggctctcattcactccatgactttggttcatttcatcatttcaagggagaagtcaaagccagggaccaaacagaaatgtagaatcatctaaggacagctgtcagaccattttccccactgtcttcactggctggccagaaaaatagcttcacctagcacagtgttgatgttcaataactgttgaatgaaggttggaagggctttgccctgagcactgaggagagagagctggttgcgtgggacttgaagtctgtctcagtttctttaggtgggactgatgcccttggccttcctccagggaaggcatccagcatccagaggtaaggattctcctgtggaccttgtgacctctgactcctcccccttcttcccccagagttcaaggaggccttctccctctttgacaaggatggagatggcactatcaccaccaaggagttggggacagtgatgagatccctgggacagaaccccactgaagcagagctgcaggatatgatcaatgaggtggatgcagatgggaacgggaccattgacttcccggagttcctgaccatgatggccagaaagatgaaggacacagacagtgaggaggagatccgagaggcgttccgtgtctttgacaaggatgggaatggctacatcagcgccgcagagctgcgtcacgtaatgacgaacctgggggagaagctgaccgatgaggaggtggatgagatgatcagggaggctgacatcgatggagatggccaggtcaattatgaagagtttgtacagatgatgactgcaaagtgaaggccccccgggcagctggcgatgcccgttctcttgatctctctcttctcgcgcgcgcactctctcttcaacactcccctgcgtaccccggttctagcaaacaccaattgattgactgagaatctgataaagcaacaaaagatttgtcccaagctgcatgattgctctttctccttcttccctgagtctctctccatgcccctcatctcttccttttgccctcgcctcttccatccacgtcttccaaggcctgatgcattcataagttgaagccctccccagatccccttggggagcctctgccctcctccagcccggatggctctcctccattttggtttgtttcctcttgtttgtcatcttattttgggtgctggggtggctgccagccctgtcccgggacctgctgggagggacaagaggccctcccccaggcagaagagcatgccctttgccgttgcatgcaaccagccctgtgattccacgtgcagatcccagcagcctgttggggcaggggtgccaagagaggcattccagaaggactgagggggcgttgaggaattgtggcgttgactggatgtggcccaggagggggtcgagggggccaactcacagaaggggactgacagtgggcaacactcacatcccactggctgctgttctgaaaccatctgattggctttctgaggtttggctgggtggggactgctcatttggccactctgcagattggacttgcccgcgttcctgaagcgctctcgagctgttctgtaaatacctggtgctaacatcccatgccgctccctcctcacgatgcacccaccgccctgagggcccgtcctaggaatggatgtggggatggtcgctttgtaatgtgctggttctctttttttttctttcccctctatggcccttaagactttcattttgttcagaaccatgctgggctagctaaagggtggggagagggaagatgggccccaccacgctctcaagagaacgcacctgcaataaaacagtcttgtcggccagctgcccaggggacggcagctacagcagcctctgcgtcctggtccgccagcacctcccgcttctccgtggtgacttggcgccgcttcctcacatctgtgctccgtgccctcttccctgcctcttccctcgcccacctgcctgcccccatactcccccagcggagagcatgatccgtgcccttgcttctgactttcgcctctgggacaagtaagtcaatgtgggcagttcagtcgtctgggttttttccccttttctgttcatttcatctggctccccccaccacctccccaccccaccccccaccccctgcttcccctcactgcccaggtcgatcaagtggcttttcctgggacctgcccagctttgagaatctcttctcatccaccctctggcacccagcctctgagggaaggagggatggggcatagtgggagacccagccaagagctgagggtaagggcaggtaggcgtgaggctgtggacattttcggaatgttttggttttgttttttttaaaccgggcaatattgtgttcagttcaagctgtgaagaaaaatatatatcaatgttttccaataaaatacagtgactacctga

SEQ ID NO: 73203 - DNA, 2107 bp, Homo sapiens
attcgaatcggagctcggtcacgctaactcaggggcgagctgctaactcaggggcgagctgctaactcaggggcgagctgctaactcaggggcgagctgctaactcaggggcgagctgctaactcaggggcgagctgctaactcaggggcgagctgctaactcaggggcgagctgcaggatacgatcaatgaggtggatgcagatgggaacgggaccattgacttcccggagttcctgaccatgatggccagaaagatgaaggacacagacagtgaggaggagatccgagaggcgttccgtgtctttgacaaggatgggaatggctacatcagcgccgcagagctgcgtcacgtaatgacgaacctgggggagaagctgaccgatgaggaggtggatgagatgatcagggaggctgacatcgatggagatggccaggtcaattatgaagagtttgtacagatgatgactgcaaagtgaaggccccccgggcagctggcgatgcccgttctcttgatctctctcttctcgcgcgcgcactctctcttcaacactcccctgcgtaccccggttctagcaaacaccaattgattgactgagaatctgataaagcaacaaaagatttgtcccaagctgcatgattgctctttctccttcttccctgagtctctctccatgcccctcatctcttccttttgccctcgcctcttccatccacgtcttccaaggcctgatgcattcataagttgaagccctccccagatccccttggggagcctctgccctcctccagcccggatggctctcctccattttggtttgtttcctcttgtttgtcatcttattttgggtgctggggtggctgccagccctgtcccgggacctgctgggagggacaagaggccctcccccaggcagaagagcatgccctttgccgttgcatgcaaccagccctgtgattccacgtgcagatcccagcagcctgttggggcaggggtgccaagagaggcattccagaaggactgagggggcgttgaggaattgtggcgttgactggatgtggcccaggagggggtcgagggggccaactcacagaaggggactgacagtgggcaacactcacatcccactggctgctgttctgaaaccatctgattggctttctgaggtttggctgggtggggactgctcatttggccactctgcagattggacttgcccgcgttcctgaagcgctctcgagctgttctgtaaatacctggtgctaacatcccatgccgctccctcctcacgatgcacccaccgccctgagggcccgtcctaggaatggatgtggggatggtcgctttgtaatgtgctggttctctttttttttctttcccctctatggcccttaagactttcattttgttcagaaccatgctgggctagctaaagggtggggagagggaagatgggccccaccacgctctcaagagaacgcacctgcaataaaacagtcttgtcggccagctgcccaggggacggcagctacagcagcctctgcgtcctggtccgccagcacctcccgcttctccgtggtgacttggcgccgcttcctcacatctgtgctccgtgccctcttccctgcctcttccctcgcccacctgcctgcccccatactcccccagcggagagcatgatccgtgcccttgcttctgactttcgcctctgggacaagtaagtcaatgtgggcagttcagtcgtctgggttttttccccttttctgttcatttcatctggctccccccaccacctccccaccccaccccccaccccctgcttcccctcactgcccaggtcgatcaagtggcttttcctgggacctgcccagctttgagaatctcttctcatccaccctctggcacccagcctctgagggaaggagggatggggcatagtgggagacccagccaagagctgagggtaagggcaggtaggcgtgaggctgtggacattttcggaatgttttggttttgttttttttaaaccgggcaatattgtgttcagttcaagctgtgaagaaaaatatatatcaatgttttccaataaaatacagtgactacctga

SEQ ID NO: 73204 - DNA, 1873 bp, Homo sapiens
cggtacccttttggtctttgctggggtctttgctgacagtgaggaggagatccgagaggcgttccgtgtctttgacaaggatgggaatggctacatcagcgccgcagagctgcgtcacgtaatgacgaacctgggggagaagctgaccgatgaggaggtggatgagatgatcagggaggctgacatcgatggagatggccaggtcaattatgaagagtttgtacagatgatgactgcaaagtgaaggccccccgggcagctggcgatgcccgttctcttgatctctctcttctcgcgcgcgcactctctcttcaacactcccctgcgtaccccggttctagcaaacaccaattgattgactgagaatctgataaagcaacaaaagatttgtcccaagctgcatgattgctctttctccttcttccctgagtctctctccatgcccctcatctcttccttttgccctcgcctcttccatccacgtcttccaaggcctgatgcattcataagttgaagccctccccagatccccttggggagcctctgccctcctccagcccggatggctctcctccattttggtttgtttcctcttgtttgtcatcttattttgggtgctggggtggctgccagccctgtcccgggacctgctgggagggacaagaggccctcccccaggcagaagagcatgccctttgccgttgcatgcaaccagccctgtgattccacgtgcagatcccagcagcctgttggggcaggggtgccaagagaggcattccagaaggactgagggggcgttgaggaattgtggcgttgactggatgtggcccaggagggggtcgagggggccaactcacagaaggggactgacagtgggcaacactcacatcccactggctgctgttctgaaaccatctgattggctttctgaggtttggctgggtggggactgctcatttggccactctgcagattggacttgcccgcgttcctgaagcgctctcgagctgttctgtaaatacctggtgctaacatcccatgccgctccctcctcacgatgcacccaccgccctgagggcccgtcctaggaatggatgtggggatggtcgctttgtaatgtgctggttctctttttttttctttcccctctatggcccttaagactttcattttgttcagaaccatgctgggctagctaaagggtggggagagggaagatgggccccaccacgctctcaagagaacgcacctgcaataaaacagtcttgtcggccagctgcccaggggacggcagctacagcagcctctgcgtcctggtccgccagcacctcccgcttctccgtggtgacttggcgccgcttcctcacatctgtgctccgtgccctcttccctgcctcttccctcgcccacctgcctgcccccatactcccccagcggagagcatgatccgtgcccttgcttctgactttcgcctctgggacaagtaagtcaatgtgggcagttcagtcgtctgggttttttccccttttctgttcatttcatctggctccccccaccacctccccaccccaccccccaccccctgcttcccctcactgcccaggtcgatcaagtggcttttcctgggacctgcccagctttgagaatctcttctcatccaccctctggcacccagcctctgagggaaggagggatggggcatagtgggagacccagccaagagctgagggtaagggcaggtaggcgtgaggctgtggacattttcggaatgttttggttttgttttttttaaaccgggcaatattgtgttcagttcaagctgtgaagaaaaatatatatcaatgttttccaataaaatacagtgactacctga

SEQ ID NO: 73205 - DNA, 1862 bp, Homo sapiens
  misc_feature (26)..(26): n is a, c, g, or t
  misc_feature (29)..(29): n is a, c, g, or t
  misc_feature (32)..(32): n is a, c, g, or t
  misc_feature (67)..(67): n is a, c, g, or t
gtgatgccagtctccagagtatcccngcnctngagaagagacgagatgcgttccgtgtctttgacanggatgggaatggctacatcagcgccgcagagctgcgtcacgtaatgacgaacctgggggagaagctgaccgatgaggaggtggatgagatgatcagggaggctgacatcgatggagatggccaggtcaattatgaagagtttgtacagatgatgactgcaaagtgaaggccccccgggcagctggcgatgcccgttctcttgatctctctcttctcgcgcgcgcactctctcttcaacactcccctgcgtaccccggttctagcaaacaccaattgattgactgagaatctgataaagcaacaaaagatttgtcccaagctgcatgattgctctttctccttcttccctgagtctctctccatgcccctcatctcttccttttgccctcgcctcttccatccacgtcttccaaggcctgatgcattcataagttgaagccctccccagatccccttggggagcctctgccctcctccagcccggatggctctcctccattttggtttgtttcctcttgtttgtcatcttattttgggtgctggggtggctgccagccctgtcccgggacctgctgggagggacaagaggccctcccccaggcagaagagcatgccctttgccgttgcatgcaaccagccctgtgattccacgtgcagatcccagcagcctgttggggcaggggtgccaagagaggcattccagaaggactgagggggcgttgaggaattgtggcgttgactggatgtggcccaggagggggtcgagggggccaactcacagaaggggactgacagtgggcaacactcacatcccactggctgctgttctgaaaccatctgattggctttctgaggtttggctgggtggggactgctcatttggccactctgcagattggacttgcccgcgttcctgaagcgctctcgagctgttctgtaaatacctggtgctaacatcccatgccgctccctcctcacgatgcacccaccgccctgagggcccgtcctaggaatggatgtggggatggtcgctttgtaatgtgctggttctctttttttttctttcccctctatggcccttaagactttcattttgttcagaaccatgctgggctagctaaagggtggggagagggaagatgggccccaccacgctctcaagagaacgcacctgcaataaaacagtcttgtcggccagctgcccaggggacggcagctacagcagcctctgcgtcctggtccgccagcacctcccgcttctccgtggtgacttggcgccgcttcctcacatctgtgctccgtgccctcttccctgcctcttccctcgcccacctgcctgcccccatactcccccagcggagagcatgatccgtgcccttgcttctgactttcgcctctgggacaagtaagtcaatgtgggcagttcagtcgtctgggttttttccccttttctgttcatttcatctggctccccccaccacctccccaccccaccccccaccccctgcttcccctcactgcccaggtcgatcaagtggcttttcctgggacctgcccagctttgagaatctcttctcatccaccctctggcacccagcctctgagggaaggagggatggggcatagtgggagacccagccaagagctgagggtaagggcaggtaggcgtgaggctgtggacattttcggaatgttttggttttgttttttttaaaccgggcaatattgtgttcagttcaagctgtgaagaaaaatatatatcaatgttttccaataaaatacagtgactacctga

SEQ ID NO: 73206 - DNA, 1789 bp, Homo sapiens
agcgcgcgcgcgcccggcggcaaacccaattcctgtgcagggtggggacgagagattcgcgggcccgtaggtgtggagcggggcgcggagggatccgtgggagccgcagtgcggcggcgcgcgggccgggtggggcggggccgagcgaggcggggcgcgcgcggcggccgttgagggaccgttggggcgggaggcggcggcggcggcggcgcgcgctgcgggcagtgagtgtggaggcgcggacgcgcggcggagctggaactgctgcagctgctgccgccgccggaggaaccttgatccccgtgctccggacaccccgggcctcgccatggctgaccagctgactgaggagcagattgcagagttcaaggaggccttctccctctttgacaaggatggagatggcactatcaccaccaaggagttggggacagtgatgagatccctgggacagaaccccactgaagcagagctgcaggatatgatcaatgaggtggatgcagatgggaacgggaccattgacttcccggagttcctgaccatgatggccagaaagatgaaggacacagacagtgaggaggagatccgagaggcgttccgtgtctttgacaaggatgggaatggctacatcagcgccgcagagctgcgtcacgtaatgacgaacctgggggagaagctgaccgatgaggaggtggatgagatgatcagggaggctgacatcgatggagatggccaggtcaattatgaagagtttgtacagatgatgactgcaaagtgaaggccccccgggcagctggcgatgcccgttctcttgatctctctcttctcgcgcgcgcactctctcttcaacactcccctgcgtaccccggttctagcaaacaccaattgattgactgagaatctgataaagcaacaaaagatttgtcccaagctgcatgattgctctttctccttcttccctgagtctctctccatgcccctcatctcttccttttgccctcgcctcttccatccacgtcttccaaggcctgatgcattcataagttgaagccctccccagatccccttggggagcctctgccctcctccagcccggatggctctcctccattttggtttgtttcctcttgtttgtcatcttattttgggtgctggggtggctgccagccctgtcccgggacctgctgggagggacaagaggccctcccccaggcagaagagcatgccctttgccgttgcatgcaaccagccctgtgattccacgtgcagatcccagcagcctgttggggcaggggtgccaagagaggcattccagaaggactgagggggcgttgaggaattgtggcgttgactggatgtggcccaggagggggtcgagggggccaactcacagaaggggactgacagtgggcaacactcacatcccactggctgctgttctgaaaccatctgattggctttctgaggtttggctgggtggggactgctcatttggccactctgcaacctccccaccccaccccccaccccctgcttcccctcactgcccaggtcgatcaagtggcttttcctgggacctgcccagctttgagaatctcttctcatccaccctctggcacccagcagacccagccaagagctgagggtaagggcaggtaggcgtgaggctgtggacattttcggaatgttttggttttgttttttttaaaccgggcaatattgtgttcagttcaagctgtgaagaaaaatatatatcaatgttttccaataaaatacagtgactacctga

SEQ ID NO: 73207 - DNA, 1410 bp, Homo sapiens
  misc_feature (15)..(15): n is a, c, g, or t
gcaggtgaccattgncacacgctagaagtttatggcagagctttacaaataaaaaaaaaactggcaaaaaaaaaaaaaaaaaactcgagactagatctctctctcttctctcattttggtttgtttcctcttgtttgtcatcttattttgggtgctggggtggctgccagccctgtcccgggacctgctgggagggacaagaggccctcccccaggcagaagagcatgccctttgccgttgcatgcaaccagccctgtgattccacgtgcagatcccagcagcctgttggggcaggggtgccaagagaggcattccagaaggactgagggggcgttgaggaattgtggcgttgactggatgtggcccaggagggggtcgagggggccaactcacagaaggggactgacagtgggcaacactcacatcccactggctgctgttctgaaaccatctgattggctttctgaggtttggctgggtggggactgctcatttggccactctgcagattggacttgcccgcgttcctgaagcgctctcgagctgttctgtaaatacctggtgctaacatcccatgccgctccctcctcacgatgcacccaccgccctgagggcccgtcctaggaatggatgtggggatggtcgctttgtaatgtgctggttctctttttttttctttcccctctatggcccttaagactttcattttgttcagaaccatgctgggctagctaaagggtggggagagggaagatgggccccaccacgctctcaagagaacgcacctgcaataaaacagtcttgtcggccagctgcccaggggacggcagctacagcagcctctgcgtcctggtccgccagcacctcccgcttctccgtggtgacttggcgccgcttcctcacatctgtgctccgtgccctcttccctgcctcttccctcgcccacctgcctgcccccatactcccccagcggagagcatgatccgtgcccttgcttctgactttcgcctctgggacaagtaagtcaatgtgggcagttcagtcgtctgggttttttccccttttctgttcatttcatctggctccccccaccacctccccaccccaccccccaccccctgcttcccctcactgcccaggtcgatcaagtggcttttcctgggacctgcccagctttgagaatctcttctcatccaccctctggcacccagcctctgagggaaggagggatggggcatagtgggagacccagccaagagctgagggtaagggcaggtaggcgtgaggctgtggacattttcggaatgttttggttttgttttttttaaaccgggcaatattgtgttcagttcaagctgtgaagaaaaatatatatcaatgttttccaataaaatacagtgactacctga

SEQ ID NO: 73208 - DNA, 1687 bp, Homo sapiens
agcgcgcgcgcgcccggcggcaaacccaattcctgtgcagggtggggacgagagattcgcgggcccgtaggtgtggagcggggcgcggagggatccgtgggagccgcagtgcggcggcgcgcgggccgggtggggcggggccgagcgaggcggggcgcgcgcggcggccgttgagggaccgttggggcgggaggcggcggcggcggcggcgcgcgctgcgggcagtgagtgtggaggcgcggacgcgcggcggagctggaactgctgcagctgctgccgccgccggaggaaccttgatccccgtgctccggacaccccgggcctcgccatggctgaccagctgactgaggagcagattgcagagttcaaggaggccttctccctctttgacaaggatggagatggcactatcaccaccaaggagttggggacagtgatgagatccctgggacagaaccccactgaagcagagctgcaggatatgatcaatgaggtggatgcagatgggaacgggaccattgacttcccggagttcctgaccatgatggccagaaagatgaaggacacagacagtgaggaggagatccgagaggcgttccgtgtctttgacaaggatgggaatggctacatcagcgccgcagagctgcgtcacgtaatgacgaacctgggggagaagctgaccgatgaggaggtggatgagatgatcagggaggctgacatcgatggagatggccaggtcaattatgaagtggctgggtggggactgctcatttggccactctgcagattggacttgcccgcgttcctgaagcgctctcgagctgttctgtaaatacctggtgctaacatcccatgccgctccctcctcacgatgcacccaccgccctgagggcccgtcctaggaatggatgtggggatggtcgctttgtaatgtgctggttctctttttttttctttcccctctatggcccttaagactttcattttgttcagaaccatgctgggctagctaaagggtggggagagggaagatgggccccaccacgctctcaagagaacgcacctgcaataaaacagtcttgtcggccagctgcccaggggacggcagctacagcagcctctgcgtcctggtccgccagcacctcccgcttctccgtggtgacttggcgccgcttcctcacatctgtgctccgtgccctcttccctgcctcttccctcgcccacctgcctgcccccatactcccccagcggagagcatgatccgtgcccttgcttctgactttcgcctctgggacaagtaagtcaatgtgggcagttcagtcgtctgggttttttccccttttctgttcatttcatctggctccccccaccacctccccaccccaccccccaccccctgcttcccctcactgcccaggtcgatcaagtggcttttcctgggacctgcccagctttgagaatctcttctcatccaccctctggcacccagcctctgagggaaggagggatggggcatagtgggagacccagccaagagctgagggtaagggcaggtaggcgtgaggctgtggacattttcggaatgttttggttttgttttttttaaaccgggcaatattgtgttcagttcaagctgtgaagaaaaatatatatcaatgttttccaataaaatacagtgactacctga

SEQ ID NO: 73209 - DNA, 1099 bp, Homo sapiens
agcgcgcgcgcgcccggcggcaaacccaattcctgtgcagggtggggacgagagattcgcgggcccgtaggtgtggagcggggcgcggagggatccgtgggagccgcagtgcggcggcgcgcgggccgggtggggcggggccgagcgaggcggggcgcgcgcggcggccgttgagggaccgttggggcgggaggcggcggcggcggcggcgcgcgctgcgggcagtgagtgtggaggcgcggacgcgcggcggagctggaactgctgcagctgctgccgccgccggaggaaccttgatccccgtgctccggacaccccgggcctcgccatggctgaccagctgactgaggagcagattgcagagttcaaggaggccttctccctctttgacaaggatggagatggcactatcaccaccaaggagttggggacagtgatgagatccctgggacagaaccccactgaagcagagctgcaggatatgatcaatgaggtggatgcagatgggaacgggaccattgacttcccggagttcctgaccatgatggccagaaagatgaaggacacagacagtgaggaggagatccgagaggcgttccgtgtctttgacaaggatgggaatggctacatcagcgccgcagagctgcgtcacgtaatgacgaacctgggggagaagctgaccgatgaggaggtggatgagatgatcagggaggctgacatcgatggagatggccaggtcaattatgaagagtttgtacagatgatgactgcaaagtgaaggccccccgggcagctggcgatgcccgttctcttgatctctctcttctcgcgcgcgcactctctcttcaacactcccctgcgtaccccggttctagcaaacaccaattgattgactgagaatctgataaagcaacaaaagatttgtcccaagctgcatgattgctctttctccttcttccctgagtctctctccatgcccctcatctcttccttttgcccgtctcttctcttgtaaagagacgatatgctgggacctggggaaccaaggataggggaaggagtcagcacagtgaaaggcgccatatcctgcccacatgtc

SEQ ID NO: 73210 - DNA, 1159 bp, Homo sapiens
agcgcgcgcgcgcccggcggcaaacccaattcctgtgcagggtggggacgagagattcgcgggcccgtaggtgtggagcggggcgcggagggatccgtgggagccgcagtgcggcggcgcgcgggccgggtggggcggggccgagcgaggcggggcgcgcgcggcggccgttgagggaccgttggggcgggaggcggcggcggcggcggcgcgcgctgcgggcagtgagtgtggaggcgcggacgcgcggcggagctggaactgctgcagctgctgccgccgccggaggaaccttgatccccgtgctccggacaccccgggcctcgccatggctgaccagctgactgaggagcagattgcagagttcaaggaggccttctccctctttgacaaggatggagatggcactatcaccaccaaggagttggggacagtgatgagatccctgggacagaaccccactgaagcagagctgcaggatatgatcaatgaggtggatgcagatgggaacgggaccattgacttcccggagttcctgaccatgatggccagaaagatgaaggacacagacagtgaggaggagatccgagaggcgttccgtgtctttgacaaggatgggaatggctacatcagcgccgcagagctgcgtcacgtaatgacgaacctgggggagaagctgaccgatgaggaggtggatgagatgatcagggaggctgacatcgatggagatggccaggtcaattatgaagagtttgtacagatgatgactgcaaagtgaaggccccccgggcagctggcgatgcccgttctcttgatctctctcttctcgcgcgcgcactctctcttcaacactcccctgcgtaccccggttctagcaaacaccaattgattgactgagaatctgataaagcaacaaaagatttgtcccaagctgcatgattgctctttctccttcttccctgctctgagggaaggagggatggggcatagtgggagacccagccaagagctgagggtaagggcaggtaggcgtgaggctgtggacattttcggaatgttttggttttgttttttttaaaccgggcaatattgtgttcagttcaagctgtgaagaaaaatatatatcaatgttttccaataaaatacagtgactacctga

SEQ ID NO: 73211 - DNA, 1160 bp, Homo sapiens
  misc_feature (931)..(931): n is a, c, g, or t
agcgcgcgcgcgcccggcggcaaacccaattcctgtgcagggtggggacgagagattcgcgggcccgtaggtgtggagcggggcgcggagggatccgtgggagccgcagtgcggcggcgcgcgggccgggtggggcggggccgagcgaggcggggcgcgcgcggcggccgttgagggaccgttggggcgggaggcggcggcggcggcggcgcgcgctgcgggcagtgagtgtggaggcgcggacgcgcggcggagctggaactgctgcagctgctgccgccgccggaggaaccttgatccccgtgctccggacaccccgggcctcgccatggctgaccagctgactgaggagcagattgcagagttcaaggaggccttctccctctttgacaaggatggagatggcactatcaccaccaaggagttggggacagtgatgagatccctgggacagaaccccactgaagcagagctgcaggatatgatcaatgaggtggatgcagatgggaacgggaccattgacttcccggagttcctgaccatgatggccagaaagatgaaggacacagacagtgaggaggagatccgagaggcgttccgtgtctttgacaaggatgggaatggctacatcagcgccgcagagctgcgtcacgtaatgacgaacctgggggagaagctgaccgatgaggaggtggatgagatgatcagggaggctgacatcgatggagatggccaggtcaattatgaagagtttgtacagatgatgactgcaaagtgaaggccccccgggcagctggcgatgcccgttctcttgatctctctcttctcgcgcgcgcactctctcttcaacactcccctgcgtaccccggttctagcaaacaccaattgattgactgagaatctgataaagcaacaaaagatttgtcccatncatgccaaaacataagctttcagtgcctatcacatatggcttttcactgtctctactgagggactgaggaatttatttctgaagtctgggggggggggcctgactcccatttccctctactaagggttctttttaaaacattgcgcggtctttgactaccctttgtgaggggcctttgcttttcccatttaagcgacttggctacccgtttcgggggggttatggcgtg

SEQ ID NO: 73212 - DNA, 1127 bp, Homo sapiens
agcgcgcgcgcgcccggcggcaaacccaattcctgtgcagggtggggacgagagattcgcgggcccgtaggtgtggagcggggcgcggagggatccgtgggagccgcagtgcggcggcgcgcgggccgggtggggcggggccgagcgaggcggggcgcgcgcggcggccgttgagggaccgttggggcgggaggcggcggcggcggcggcgcgcgctgcgggcagtgagtgtggaggcgcggacgcgcggcggagctggaactgctgcagctgctgccgccgccggaggaaccttgatccccgtgctccggacaccccgggcctcgccatggctgaccagctgactgaggagcagattgcagagttcaaggaggccttctccctctttgacaaggatggagatggcactatcaccaccaaggagttggggacagtgatgagatccctgggacagaaccccactgaagcagagctgcaggatatgatcaatgaggtggatgcagatgggaacgggaccattgacttcccggagttcctgaccatgatggccagaaagatgaaggacacagacagtgaggaggagatccgagaggcgttccgtgtctttgacaaggatgggaatggctacatcagcgccgcagagctgcgtcacgtaatgacgaacctgggggagaagctgaccgatgaggaggtggatgagatgatcagggaggctgacatcgatggagatggccaggtcaattatgaagagtttgtacagatgatgactgcaaagtgaaggccccccgggcagctggcgatgcccgttctcttgatctctctcttctcgcgcgcgcactctctcttcaacactcccctgcgtaccccggttctagcaaacaccaattgattgactgagaatctcttctcatccaccctctggcacccagcctctgagggaaggagggatggggcatagtgggagacccagccaagagctgagggtaagggcaggtaggcgtgaggctgtggacattttcggaatgttttggttttgttttttttaaaccgggcaatattgtgttcagttcaagctgtgaagaaaaatatatatcaatgttttccaataaaatacagtgactacctga

SEQ ID NO: 73213 - DNA, 1006 bp, Homo sapiens
agcgcgcgcgcgcccggcggcaaacccaattcctgtgcagggtggggacgagagattcgcgggcccgtaggtgtggagcggggcgcggagggatccgtgggagccgcagtgcggcggcgcgcgggccgggtggggcggggccgagcgaggcggggcgcgcgcggcggccgttgagggaccgttggggcgggaggcggcggcggcggcggcgcgcgctgcgggcagtgagtgtggaggcgcggacgcgcggcggagctggaactgctgcagctgctgccgccgccggaggaaccttgatccccgtgctccggacaccccgggcctcgccatggctgaccagctgactgaggagcagattgcagagttcaaggaggccttctccctctttgacaaggatggagatggcactatcaccaccaaggagttggggacagtgatgagatccctgggacagaaccccactgaagcagagctgcaggatatgatcaatgaggtggatgcagatgggaacgggaccattgacttcccggagttcctgaccatgatggccagaaagatgaaggacacagacagtgaggaggagatccgagaggcgttccgtgtctttgacaaggatgggaatggctacatcagcgccgcagagctgcgtcacgtaatgacgaacctgggggagaagctgaccgatgaggaggtggatgagatgatcagggaggctgacatcgatggagatggccaggtcaattatgaagagtttgtacagatgatgactgcaaagtgaaggccccccgggcagctggcgatgcccgttctcttgatctctctcttctcgcgcgcgcactctctcttcaacactcccctgcgtagggatacagctgtatccggggagccatcccagagaatgtccatagaaatgcctgtgagtccctacaccttaatgactcatttgcaaatacacttataatatatgtggacaccttttgatctcttatccctccccgggatacag

SEQ ID NO: 73214 - DNA, 848 bp, Homo sapiens
agcgcgcgcgcgcccggcggcaaacccaattcctgtgcagggtggggacgagagattcgcgggcccgtaggtgtggagcggggcgcggagggatccgtgggagccgcagtgcggcggcgcgcgggccgggtggggcggggccgagcgaggcggggcgcgcgcggcggccgttgagggaccgttggggcgggaggcggcggcggcggcggcgcgcgctgcgggcagtgagtgtggaggcgcggacgcgcggcggagctggaactgctgcagctgctgccgccgccggaggaaccttgatccccgtgctccggacaccccgggcctcgccatggctgaccagctgactgaggagcagattgcagagttcaaggaggccttctccctctttgacaaggatggagatggcactatcaccaccaaggagttggggacagtgatgagatccctgggacagaaccccactgaagcagagctgcaggatatgatcaatgaggtggatgcagatgggaacgggaccattgacttcccggagttcctgaccatgatggccagaaagatgaaggacacagacagtgaggaggagatccgagaggcgttccgtgtctttgacaaggatgggaatggctacatcagcgccgcagagctgcgtcacgtaatgacgaacctgggggagaagctgaccgatgaggaggtggatgagatgatcagggaggctgacatcgatggagatggccaggtcaattatgaagagtttgtacagatgatgactgcaaaatgaagacctactttcaactcctttttcccccctctagaagaatcaaattgaatcttttacttacctcttgcaa

SEQ ID NO: 73215 - DNA, 1440 bp, Homo sapiens
  misc_feature (765)..(765): n is a, c, g, or t
  misc_feature (771)..(771): n is a, c, g, or t
agcgcgcgcgcgcccggcggcaaacccaattcctgtgcagggtggggacgagagattcgcgggcccgtaggtgtggagcggggcgcggagggatccgtgggagccgcagtgcggcggcgcgcgggccgggtggggcggggccgagcgaggcggggcgcgcgcggcggccgttgagggaccgttggggcgggaggcggcggcggcggcggcgcgcgctgcgggcagtgagtgtggaggcgcggacgcgcggcggagctggaactgctgcagctgctgccgccgccggaggaaccttgatccccgtgctccggacaccccgggcctcgccatggctgaccagctgactgaggagcagattgcagagttcaaggaggccttctccctctttgacaaggatggagatggcactatcaccaccaaggagttggggacagtgatgagatccctgggacagaaccccactgaagcagagctgcaggatatgatcaatgaggtggatgcagatgggaacgggaccattgacttcccggagttcctgaccatgatggccagaaagatgaaggacacaagacccagccaagagctgagggtaagggcaggtaggcgtgaggctgtggacattttcggaatgttttggttttgttttttttaaaccgggcaatattgtgttcagttcaagctgtgaagaaaaatatatatcaatgttttccaataaaatacagtgactacctgaaaaaaaaacaaaaaaaaaaaaaaaaaaaaaanaaaaanaaaaaaaaaaaaaaaaaaaaaaaaaaaaaaaaaaaaaaggaatgattcccgccccagaaaaaaaaccccctcggtggggccgcaccaacaaccccgcatgaaaaaagaggaggaggtgaattctacaccccccaaagcgaccccaccgaagtaaacaagcgcccctgggcggcgcacaaagcgagcggtccaacaaagggaggaaggcggcggaccgggtcacagacgacggggaaaccccaccgccgaacgactcgcgggggacacaagccgacgcagggggtgccttccaaccaaaggacaacataggagcaggagacccaccggcccgcggggagagggagcgccaaacaaaaaacactccggtggctgtgtgtgtgtaggtaaccccaacaaatgaatggcgcagagtaacattttgtgggtcgaacataccacgcgtgccaagtctttcgccacaaagacgatgctctgtcgggtgccgtttgtgataagctccgccgccgatattacaaatggcgtgtttaggctggacccaattgctccggcggaataccaactgagcgtggcgacaaccttgtagtagcggggcacagcgggagataaattcgccttgtcgcaaagatgtgagtgtgccgcgcagcattggtgcttctgggaccgtataag

SEQ ID NO: 73216 - DNA, 853 bp, Homo sapiens
gtcagagtttgagatgcaaatcctttactgtatagccttgatcaaatgacttcacctcattgaattaatcttcttctgcataaaatggggtcaccatctgcttatctaaattgttacaaatgggacagtatatgtgccattccagatacctaatcacagctcaatcgatgctggtgtctttttcctttttccttctgcagaaaacatgctttacataggatctctgaacttaaagaatgggaagaagaaaaatcatgtttccagcttgggctgctgtttcatctgttggacttgctgtgagctaagccaaatttcattaaaaattatggtctcataaaaaaaaaaaaaaaaaaaaaaaaaaaaaaaaaaaaaaaaaaaaaaaaaaaaaaaaaaaaaaaaaagggggggggggcccaaagaaaatccccccggagggggcgccagaagtatcagcgcgcgcacccccgagttttgttggacaaaagggggcgccccatataagagggcgtcgataataataaagcagggagagcggcgggcgagcgggttgtaaaaaaaacgggcgggagcgggggagaacaaggcggcgatcgcggggagacaccttgggagaaggaggaacaccacacttaccgcgagggggggggagacaaccatgtggtgggaacaaaactctatcactaaaaagaataatattaagaggctcctaggggggaaaatattaaaagattttgaaggggggtatatatgtggggtgtgtaaaaaaagcgggtagtatattctgtgcgggtgtgagtaaaaattgtggggcaactacggagtaatatattattgtgaaaaaaaattttttgcc

SEQ ID NO: 73217 - DNA, 541 bp, Homo sapiens
gtcagagtttgagatgcaaatcctttactgtatagccttgatcaaatgacttcacctcattgaattaatcttcttctgcataaaatggggtcaccatctgcttatctaaattgttacaaatgggacagtatatgtgccattccagatacctaatcacagctcaatcgatgctggtgtctttttcctttttccttctgcagaaaacatgctttacataggatctctgaacttaaagaatgggaagaagaaaaatcatgtttccagcttgggctgctgtttcatctgttggacttgctgatccctgaatggaaaggaatgctatgcacactttttggatacaggaagtgagattcagaggggttaaacagctttcctaaagccacacagcgagagagtcgatctgaactgaagattgtttgacatcaaagctcatttctttccctaaatgtcagcattctttcctgacttattaatttgatttctgtcctcccctcatggaagttaattaaaggaatgcgagaaccttttagaaaatctccag

SEQ ID NO: 73218 - DNA, 408 bp, Homo sapiens
cgtggctcaaatcctccaactgcaggactgccggccctgggactcatgaataatggaagtgcagtaaccactccttacagcccagacgactttccaggagcaggctgtaccccgaaagtaaacaaggaacaaggggcaaggagacagagagagatggggaaatgatccctgaatggaaaggaatgctatgcacactttttggatacaggaagtgagattcagaggggttaaacagctttcctaaagccacacagcgagagagtcgatctgaactgaagattgtttgacatcaaagctcatttctttccctaaatgtcagcattctttcctgacttattaatttgatttctgtcctcccctcatggaagttaattaaaggaatgcgagaaccttttagaaaatctccag

SEQ ID NO: 73219 - DNA, 274 bp, Homo sapiens
ggatgatggcagtgggaattcaaaaagaaggtaactttgaggcatctcaaatgtagattaggcaagacaggcatgagtctgaaaaagagaggcaatgaaaagaggaatggtttgaaggtgagatgcagaagcttaattttaggtgtggtaagttttaatagctggtgacatgtcttggtagaagagtccagcaagaaatgtcattatgggtactaatgcttgagaaagattggttatagagatgcagatttagattatttcacccagaaaatgt

SEQ ID NO: 73220 - DNA, 445 bp, Homo sapiens
cctggggtgtttctttacatatacttgaaccagaatagcatatcacagcaagttgaacacagaagcatgtcggcagatccgcctgtcttctgttgagtattgaagatacatgcaaaaatgtacaacatggccattttctcgctggtttctttttgaaaataaggttattttcataaaatattacttaacatgaagtgaacctattgctaatttaatgaataagtaaatatttttaaaattttcaagtatggtcagtatcaatggatataacccccataatcaaagctctttagggttctccatactttctaagaatgtaaataggtcttgacaccaaaaaaatggaaaacacgtggacttggaagtttttctcgaatgggctggatgtgaccctgaccctgtttttaccaagcctccttggttttttccctcttttctctaaaaa

SEQ ID NO: 73221 - DNA, 2913 bp, Homo sapiens
acataatcttcactgaacataaatgtgttcatctaaagcaatctcttagtacatcaatttggtgcattttaattagagaaaatcattttctctattgaagagaatccatccactcatgtcctataaattatagtaaataaggaaaagcatatataacattctgaatttcctaggtgtctttggaaacaggtaagttactcaggtgaataaaggtgaaaaaagtcttgtcagaaaaggaatgattatattagccaaatttaattaccaggttttgatcttcattaagcaaagcaaagaacttctttactgattccttgtccttcagtaaggaaaaagacaaaactctccttagtttacacattatttatggtcagtttttaataaatcttgttttttttcttaaccagcaagagaattgatacaaagtataaatccagagtcatgtagaaaacttggaagtattaataaaacagattacagtttgtgcactgaatagtcatcttaattgattgtttaatggagaagcaaactggatgaccttagacaaaataacatttatctatgaagcttattttcctcatctttaaaacagaactacaaaaatgcagagagttcaagggcaggcacatagttgataactggtgctagttcttctatttaattatattccatctttgttgagagatttgaggtagctcctgttgcagtattaatttataatattttaaaagttagagaactttcctttgggatgttttaaaattatttccctggtcataattaatattagggtctgtttatttcaaatacaaaatattttaatcttttcttcctactgggttaagaccaaatgagatgtttgtttttaatgtataaaatcttatacagtgtatgttagctgcaacttctcaggaattctgaatcttagaacttttttattgaaagagatcttagaagccatctaaccaacccagattgcttaatgattgtctgggttcacatagctatgggtgatagaaaccgggattcgttgtgaccagtaattctccattctttctccctaatgtgcagcacatctccagtacttctgaatagattacacagcttttctttggctagtttgggggcttgacctgatgcaaaaaggaatttttttcctctgccaacaaaatttctcactgcactgcttgctacacagacaagattcaaaataaaagtaatggtgggtcaggtgccatggctcatgcctgtaatcccagcactttgggaggccgaggtgggcagatcacgaggtcagatcaagaccattctggccaacatggtaaaaccccgtctctactaaaaatagaaaaattaaatgttacatgaaaaacatatttgaaactgtactgccatttgtgtaaaacaaggtatgtggtgtgtgaacatcttatttgcatatgcatataattatctctaaggatgcacgagaaaccagtgataattatgcctccaagaagaggttcaactaggtgggctgcttagaatctagttttgtattatttggacttttgttcacattatcctttcaaaatacattttaaaaatactatatgcaccgaggtgggtggatcatctgaactcaggagttcgagaccagcctgggcaacatggcgaaaccttgtctctaccaaaaatacaaagaattagctggctgtggtggtgtgcgcctgtagtcccagctactcaggaggctaagataggaggatcacttgagcctgggaggtgcaggttgcagtgagctggaattgtgcaactgcactccagcctgggtgacagagtgagaccctgtctcaaaaaaaaaaaaaaaaaaaaaatattatatgcagagctggggagtggtggtccacacctgtagtcccagcatcttgggaggctgaggcaggaggagtgcttgaagccaggagttcaagttcagtctgggcaacatggggagacctgtctcaaaaaaaaaaactaaacagagtgtaattattagcatttcataacattatttgtcttggtatttgaatacattagaattctatttgtcctgtaattaatttctaactcactttgataaaataccaaaacaaaggaaacaaagtcaacaaaacttaatttgtatccttcatccttttgaacagcagctatgtgaacatttggaaagaaccttagtaaggcggcttttctatcacctataaaaagttgccaacagacatcaaaggagttgacaaaaaaaaaaaaaaatgcaggaagctggaaggcaggcctggatggaattggaactgtgctgctgtgactcctttccccagtgctaaaaaatagatgtagtcaggaggaactaacatagattggcagtcacccacacatctctggtgttaccttagtcttgtttcaagcatacaagccacaagtttttgggtgtcttaaatatacctaagttgtagtctctatttatttttttattatacttttaagttctagggtacatgtgcacaacgtgcaggtttgttacatatgtatacatgtgccatgttggtgtgctgcacccgttaactcgtcatttacattaggtatatctcctaatgctatccctccccctcccccaaccccacgatgtagtctctttctaagttccattaaacagaatactaaaatgaccttttttggtgactcttgcctgtctctaccactaactggcttaaaagctgctgggtctcttcctttgtaaagagcaacatgagtttacagatgaggtctgtctatatctcctcttatgtttttctcttaagaacttcaagtgaaataaaacaaaatagctcttttatgaatactaccttttgtattttacctcataagatttaatgtattaaacatttctataccaacatg

SEQ ID NO: 73222 - DNA, 2460 bp, Homo sapiens
gactctagcaggagtcttactagacagtttgtgcactgaatagtcatcttaattgattgtttaatggagaagcaaactggatgaccttagacaaaataacatttatctatgaagcttattttcctcatctttaaaacagaactacaaaaatgcagagagttcaagggcaggcacatagttgataactggtgctagttcttctatttaattatattccatctttgttgagagatttgaggtagctcctgttgcagtattaatttataatattttaaaagttagagaactttcctttgggatgttttaaaattatttccctggtcataattaatattagggtctgtttatttcaaatacaaaatattttaatcttttcttcctactgggttaagaccaaatgagatgtttgtttttaatgtataaaatcttatacagtgtatgttagctgcaacttctcaggaattctgaatcttagaacttttttattgaaagagatcttagaagccatctaaccaacccagattgcttaatgattgtctgggttcacatagctatgggtgatagaaaccgggattcgttgtgaccagtaattctccattctttctccctaatgtgcagcacatctccagtacttctgaatagattacacagcttttctttggctagtttgggggcttgacctgatgcaaaaaggaatttttttcctctgccaacaaaatttctcactgcactgcttgctacacagacaagattcaaaataaaagtaatggtgggtcaggtgccatggctcatgcctgtaatcccagcactttgggaggccgaggtgggcagatcacgaggtcagatcaagaccattctggccaacatggtaaaaccccgtctctactaaaaatagaaaaattaaatgttacatgaaaaacatatttgaaactgtactgccatttgtgtaaaacaaggtatgtggtgtgtgaacatcttatttgcatatgcatataattatctctaaggatgcacgagaaaccagtgataattatgcctccaagaagaggttcaactaggtgggctgcttagaatctagttttgtattatttggacttttgttcacattatcctttcaaaatacattttaaaaatactatatgcaccgaggtgggtggatcatctgaactcaggagttcgagaccagcctgggcaacatggcgaaaccttgtctctaccaaaaatacaaagaattagctggctgtggtggtgtgcgcctgtagtcccagctactcaggaggctaagataggaggatcacttgagcctgggaggtgcaggttgcagtgagctggaattgtgcaactgcactccagcctgggtgacagagtgagaccctgtctcaaaaaaaaaaaaaaaaaaaaaatattatatgcagagctggggagtggtggtccacacctgtagtcccagcatcttgggaggctgaggcaggaggagtgcttgaagccaggagttcaagttcagtctgggcaacatggggagacctgtctcaaaaaaaaaaactaaacagagtgtaattattagcatttcataacattatttgtcttggtatttgaatacattagaattctatttgtcctgtaattaatttctaactcactttgataaaataccaaaacaaaggaaacaaagtcaacaaaacttaatttgtatccttcatccttttgaacagcagctatgtgaacatttggaaagaaccttagtaaggcggcttttctatcacctataaaaagttgccaacagacatcaaaggagttgacaaaaaaaaaaaaaaatgcaggaagctggaaggcaggcctggatggaattggaactgtgctgctgtgactcctttccccagtgctaaaaaatagatgtagtcaggaggaactaacatagattggcagtcacccacacatctctggtgttaccttagtcttgtttcaagcatacaagccacaagtttttgggtgtcttaaatatacctaagttgtagtctctatttatttttttattatacttttaagttctagggtacatgtgcacaacgtgcaggtttgttacatatgtatacatgtgccatgttggtgtgctgcacccgttaactcgtcatttacattaggtatatctcctaatgctatccctccccctcccccaaccccacgatgtagtctctttctaagttccattaaacagaatactaaaatgaccttttttggtgactcttgcctgtctctaccactaactggcttaaaagctgctgggtctcttcctttgtaaagagcaacatgagtttacagatgaggtctgtctatatctcctcttatgtttttctcttaagaacttcaagtgaaataaaacaaaatagctcttttatgaatactaccttttgtattttacctcataagatttaatgtattaaacatttctataccaacatg

SEQ ID NO: 73223 - DNA, 608 bp, Homo sapiens
ccagaacctcactactagtccaagttctcattctcaatttctttcttcctttaagtcattctacaaactattgatagagtaatctttcaaaggctctgattgcatcagtcttttctattcaaatatcttaaatggttcctcactatctactgttcaaagttcaaacctcctgttatgtggctctaaggcttttgatttgccactatccctgaatatcctacattttgttcactatgtctgtaggccaaaaaatacattgattatgtccaccacgcctgctgaaaaggtatccacaattcaagactcagttcaaactccatctccatgttaccccatctccctagtacggaagtaatctcttccttcttcatgtatagaaagtacctgacagcttcttgctgaccttgatgtcattctattttgcctttaaaggacatggacctttcttaattccattaattgaatatgacttgcatcaggattcttattcgctttccatagtgccttcaatggaggaggcagtgttaaacacagactattcatctggaattaaagactacttgtccagcctctgagctaaagtctaagtctgcttctgccttatttct

SEQ ID NO: 73224 - DNA, 484 bp, Homo sapiens
ccaaaatcaaggatgatttttcagaaatttttttggctttggcaactagacgatggtggtgccacttgtgtagatatctaggcaaggtaggagaccaggtttgggataaagattgctttagacattgagatatctttgggacatcctggtgaagatggcaggtagtttggtctcaaactgggaggtgccatctggggtggagatgaactgaggactcagtaactatagtcactgtaattttctgggggttgccattgctcagggagctcctagagtaagggactgagataggtcccaaggaatagacttgggagggccagggaatggggaggccactgaggtggtgggacaggctgcagggaagaatacctcaaaatcatacgaggccactctttgacaagtgtgcctgtttcaccgttttgtttgcacaagactctaagacagtatactgccttaaataaagtgcaccctgtttggaaaagtt

SEQ ID NO: 73225 - DNA, 4250 bp, Homo sapiens
  misc_feature (887)..(887): n is a, c, g, or t
  misc_feature (1305)..(1305): n is a, c, g, or t
  misc_feature (1344)..(1344): n is a, c, g, or t
  misc_feature (1653)..(1653): n is a, c, g, or t
ggcacgaggcggcgctgagtgacccgagtcgggacgcgggctgcgcgcgcgggaccccggagcccaaacccggggcaggcgggcagctgtgcccgggcggcacggccagcttcctgatttctcccgattccttccttctccctggagcggccgacaatgtccaccacggtcaatgtagattcccttgcggaatatgagaagagccagatcaagagagccctggagctggggacggtgatgactgtgttcagcttccgcaagtccacccccgagcggagaaccgtccaggtgatcatggagacgcggcaggtggcctggagcaagaccgccgacaagatcgagggcttcttggatatcatggaaataaaagaaatccgcccagggaagaactccaaagatttcgagcgagcaaaagcagttcgccagaaagaagactgctgcttcaccatcctatatggcactcagttcgtcctcagcacgctcagcttggcagctgactctaaagaggatgcagttaactggctctctggcttgaaaatcttacaccaggaagcgatgaatgcgtccacgcccaccattatcgagagttggctgagaaagcagatatattctgtggatcaaaccagaagaaacagcatcagtctccgagagttgaagaccatcttgcccctgatcaactttaaagtgagcagtgccaagttccttaaagataagtttgtggaaataggagcacacaaagatgagctcagctttgaacagttccatctcttctataaaaaacttatgtttgaacagcaaaaatcgattctcgatgaattcaaaaaggattcgtccgtgttcatcctggggaacactgacaggccggatgcctctgctgtttacctgcntgacttccagaggtttctcatacatgaacagcaggagcattgggctcaggatctgaacaaagtccgtgagcggatgacaaagttcattgatgacaccatgcgtgaaactgctgagcctttcttgtttgtggatgagttcctcacgtacctgttttcacgagaaaacagcatctgggatgagaagtatgacgcggtggacatgcaggacatgaacaaccccctgtctcattactggatctcctcgtcacataacacgtaccttacaggtgaccagctgcggagcgagtcgtccccagaagcttacatccgctgcctgcgcatgggctgtcgctgcattgaactggactgctgggacgggcccgatgggaagccggtcatctaccatggctggacgcggactaccaagatcaagtttgangacgtcgtgcaggccatcaaagaccacgcctttgttacntcgagcttcccagtgatcctgtccatcgaggagcactgcagcgtggagcaacagcgtcacatggccaaggccttcaaggaagtatttggcgacctgctgttgacgaagcccacggaggccagtgctgaccagctgccctcgcccagccagctgcgggagaagatcatcatcaagcataagaagctgggcccccgaggcgatgtggatgtcaacatggaggacaagaaggacgaacacaagcaacagggggagctgtacatgtgggattccattgaccagaaatggactcggcactactgcgccattgcngatgccaagctgtccttcagtgatgacattgaacagactatggaggaggaagtgccccaggatataccccctacagaactacattttggggagaaatggttccacaagaaggtggagaagaggacgagtgccgagaagttgctgcaggaatactgcatggagacggggggcaaggatggcaccttcctggttcgggagagcgagaccttccccaatgactacaccctgtccttctggcggtcaggccgggtccagcactgccggatccgctccaccatggagggcgggaccctgaaatactacttgactgacaacctcaccttcagcagcatctatgccctcatccagcactaccgcgagacgcacctgcgctgcgccgagttcgagctgcggctcacggaccctgtgcccaaccccaacccccacgagtccaagccgtggtactatgacagcctgagccgcggagaggcagaggacatgctgatgaggattccccgggacggggccttcctgatccggaagcgagaggggagcgactcctatgccatcaccttcagggctaggggcaaggtaaagcattgtcgcatcaaccgggacggccggcactttgtgctggggacctccgcctattttgagagtctggtggagctcgtcagttactacgagaagcattcactctaccgaaagatgagactgcgctaccccgtgacccccgagctcctggagcgctacaatatggaaagagatataaactccctctacgacgtcagcagaatgtatgtggatcccagtgaaatcaatccgtccatgcctcagagaaccgtgaaagctctgtatgactacaaagccaagcgaagcgatgagctgagcttctgccgtggtgccctcatccacaatgtctccaaggagcccgggggctggtggaaaggagactatggaaccaggatccagcagtacttcccatccaactacgtcgaggacatctcaactgcagacttcgaggagctagaaaagcagattattgaagacaatcccttagggtctctttgcagaggaatattggacctcaatacctataacgtcgtgaaagcccctcagggaaaaaaccagaagtcctttgtcttcatcctggagcccaagcagcagggcgatcctccggtggagtttgccacagacagggtggaggagctctttgagtggtttcagagcatccgagagatcacctggaagattgacaccaaggagaacaacatgaagtactgggagaagaaccagtccatcgccatcgagctctctgacctggttgtctactgcaaaccaaccagcaaaaccaaggacaacttagaaaatcctgacttccgagaaatccgctcctttgtggagacgaaggctgacagcatcatcagacagaagcccgtcgacctcctgaagtacaatcaaaagggcctgacccgcgtctacccaaagggacaaagagttgactcttcaaactacgaccccttccgcctctggctgtgcggttctcagatggtggcactcaatttccagacggcagataagtacatgcagatgaatcacgcattgttttctctcaacgggcgcacgggctacgttctgcagcctgagagcatgaggacagagaaatatgacccgatgccacccgagtcccagaggaagatcctgatgacgctgacagtcaaggttctcggtgctcgccatctccccaaacttggacgaagtattgcctgtccctttgtagaagtggagatctgtggagccgagtatgacaacaacaagttcaagacgacggttgtgaatgataatggcctcagccctatctgggctccaacacaggagaaggtgacatttgaaatttatgacccaaacctggcatttctgcgctttgtggtttatgaagaagatatgttcagcgatcccaactttcttgctcatgccacttaccccattaaagcagtcaaatcaggattcaggtccgttcctctgaagaatgggtacagcgaggacatagagctggcttccctcctggttttctgtgagatgcggccagtcctggagagcgaagaggaactttactcctcctgtcgccagctgaggaggcggcaagaagaactgaacaaccagctctttctgtatgacacacaccagaacttgcgcaatgccaaccgggatgccctggttaaagagttcagtgttaatgagaaccagctccagctgtaccaggagaaatgcaacaagaggttaagagagaagagagtcagcaacagcaagttttactcatagaagctggggtatgtgtgtaagggtattgtgtgtgtgcgcatgtgtgtttgcatgtaggagaacgtgccctattcacactctgggaagacgctaatctgtgacatcttttcttcaagcctgccatcaaggacatttcttaagacccaactggcatgagttggggtaatttcctattattttcatcttggacaactttcttaacttatattctttatagaggattccccaaaatgtgctcctcatttttggcctctcatgttccaaacctcattgaataaaagcaatgaaaaccttga

SEQ ID NO: 73226 - DNA, 653 bp, Homo sapiens
ctgggaacgcagccgcctccctcccctcctgtccctggcctgaccttttccttcttgttttccctgaaagcctcagagaaccgtgaaagctctgtatgactacaaagccaagcgaagcgatgagctgagcttctgccgtggtgccctcatccacaatgtctccaaggagcccgggggctggtggaaaggagactatggaaccaggatccagcagtacttcccatccaactacgtcgaggacatctcaactgcagacttcgaggagctagaaaagcagattattgaagacaatcccttagggtctctttgcagaggaatattggacctcaatacctataacgtcggtacgtgcacacatcatcttagcctggatttccacccctatcccccatgggctgacctcagccccgccctacacagggaggtggctgacacagggtcctgtcttgaatgccagctccttccctggctgaagctgagtatttaggtcaggctggtcagtgagtatgatgctatgtctgctattaatctctactaaaactgtaagtgcagcgtcactcttattatttcaggatccatctgtgtttcccatgcgttgcgaaggaaagctgagctgtcagcctggctgaaatgccgcgtggagttgggagtct

SEQ ID NO: 73227 - DNA, 1865 bp, Homo sapiens
cttataaggatactcatacttgttggatgttggaattgccctaaatccaggataatctcatattgagatccttaacctaagtacatctgcaacgaccctataaggtcccattcacaggtactggtgacctgacacatcttttcggaggaccctactgaatctactgcatcccttgagtagtcatctgtgatgtgtacttaccccgatggaaagtagacgtccccatcagtgctaaccgtggtcatagcagtggtggttggtccatgagagaaacagctcaggcagggtgcagtctggtctttgtggccctctaataggctgattgggacatttcttattctcttaccccaagtgaaagcccctcagggaaaaaaccagaagtcctttgtcttcatcctggagcccaagcagcagggcgatcctccggtggagtttgccacagacagggtggaggagctctttgagtggtttcagagcatccgagagatcacctggaagattgacaccaaggagaacaacatgaagtactgggagaagaaccagtccatcgccatcgagctctctgacctggttgtctactgcaaaccaaccagcaaaaccaaggacaacttagaaaatcctgacttccgagaaatccgctcctttgtggagacgaaggctgacagcatcatcagacagaagcccgtcgacctcctgaagtacaatcaaaagggcctgacccgcgtctacccaaagggacaaagagttgactcttcaaactacgaccccttccgcctctggctgtgcggttctcagatggtggcactcaatttccagacggcagataagtacatgcagatgaatcacgcattgttttctctcaacgggcgcacgggctacgttctgcagcctgagagcatgaggacagagaaatatgacccgatgccacccgagtcccagaggaagatcctgatgacgctgacagtcaaggttctcggtgctcgccatctccccaaacttggacgaagtattgcctgtccctttgtagaagtggagatctgtggagccgagtatgacaacaacaagttcaagacgacggttgtgaatgataatggcctcagccctatctgggctccaacacaggagaaggtgacatttgaaatttatgacccaaacctggcatttctgcgctttgtggtttatgaagaagatatgttcagcgatcccaactttcttgctcatgccacttaccccattaaagcagtcaaatcaggattcaggtccgttcctctgaagaatgggtacagcgaggacatagagctggcttccctcctggttttctgtgagatgcggccagtcctggagagcgaagaggaactttactcctcctgtcgccagctgaggaggcggcaagaagaactgaacaaccagctctttctgtatgacacacaccagaacttgcgcaatgccaaccgggatgccctggttaaagagttcagtgttaatgagaaccagctccagctgtaccaggagaaatgcaacaagaggttaagagagaagagagtcagcaacagcaagttttactcatagaagctggggtatgtgtgtaagggtattgtgtgtgtgcgcatgtgtgtttgcatgtaggagaacgtgccctattcacactctgggaagacgctaatctgtgacatcttttcttcaagcctgccatcaaggacatttcttaagacccaactggcatgagttggggtaatttcctattattttcatcttggacaactttcttaacttatattctttatagaggattccccaaaatgtgctcctcatttttggcctctcatgttccaaacctcattgaataaaagcaatgaaaaccttga

SEQ ID NO: 73228 - DNA, 1525 bp, Homo sapiens
ggatggtgatagtttaaaaaaaaaagtaaattacagtaattctagcctaaaaggtggtgggaaaactaggcccctttttaatacttggaacccccagagggcaagagtccacagtgataccaattgggacaatatcatcagaaccccttgaatgtcaaagagggagattcctggtttccttttataatctgagcatccagccattgcagcaaacattaagaaaatgcacagatgagacacagaagtactgatgacctttttctctgtgtgcagaaaatcctgacttccgagaaatccgctcctttgtggagacgaaggctgacagcatcatcagacagaagcccgtcgacctcctgaagtacaatcaaaagggcctgacccgcgtctacccaaagggacaaagagttgactcttcaaactacgaccccttccgcctctggctgtgcggttctcagatggtggcactcaatttccagacggcagataagtacatgcagatgaatcacgcattgttttctctcaacgggcgcacgggctacgttctgcagcctgagagcatgaggacagagaaatatgacccgatgccacccgagtcccagaggaagatcctgatgacgctgacagtcaaggttctcggtgctcgccatctccccaaacttggacgaagtattgcctgtccctttgtagaagtggagatctgtggagccgagtatgacaacaacaagttcaagacgacggttgtgaatgataatggcctcagccctatctgggctccaacacaggagaaggtgacatttgaaatttatgacccaaacctggcatttctgcgctttgtggtttatgaagaagatatgttcagcgatcccaactttcttgctcatgccacttaccccattaaagcagtcaaatcaggattcaggtccgttcctctgaagaatgggtacagcgaggacatagagctggcttccctcctggttttctgtgagatgcggccagtcctggagagcgaagaggaactttactcctcctgtcgccagctgaggaggcggcaagaagaactgaacaaccagctctttctgtatgacacacaccagaacttgcgcaatgccaaccgggatgccctggttaaagagttcagtgttaatgagaaccagctccagctgtaccaggagaaatgcaacaagaggttaagagagaagagagtcagcaacagcaagttttactcatagaagctggggtatgtgtgtaagggtattgtgtgtgtgcgcatgtgtgtttgcatgtaggagaacgtgccctattcacactctgggaagacgctaatctgtgacatcttttcttcaagcctgccatcaaggacatttcttaagacccaactggcatgagttggggtaatttcctattattttcatcttggacaactttcttaacttatattctttatagaggattccccaaaatgtgctcctcatttttggcctctcatgttccaaacctcattgaataaaagcaatgaaaaccttga

SEQ ID NO: 73229 - DNA, 972 bp, Homo sapiens
tggaaatccagtgattaagctctgccttgatcagaggcacctgcttgggcatggatgtgtgcattcatgagctcaggttctcggtgctcgccatctccccaaacttggacgaagtattgcctgtccctttgtagaagtggagatctgtggagccgagtatgacaacaacaagttcaagacgacggttgtgaatgataatggcctcagccctatctgggctccaacacaggagaaggtgacatttgaaatttatgacccaaacctggcatttctgcgctttgtggtttatgaagaagatatgttcagcgatcccaactttcttgctcatgccacttaccccattaaagcagtcaaatcaggattcaggtccgttcctctgaagaatgggtacagcgaggacatagagctggcttccctcctggttttctgtgagatgcggccagtcctggagagcgaagaggaactttactcctcctgtcgccagctgaggaggcggcaagaagaactgaacaaccagctctttctgtatgacacacaccagaacttgcgcaatgccaaccgggatgccctggttaaagagttcagtgttaatgagaaccagctccagctgtaccaggagaaatgcaacaagaggttaagagagaagagagtcagcaacagcaagttttactcatagaagctggggtatgtgtgtaagggtattgtgtgtgtgcgcatgtgtgtttgcatgtaggagaacgtgccctattcacactctgggaagacgctaatctgtgacatcttttcttcaagcctgccatcaaggacatttcttaagacccaactggcatgagttggggtaatttcctattattttcatcttggacaactttcttaacttatattctttatagaggattccccaaaatgtgctcctcatttttggcctctcatgttccaaacctcattgaataaaagcaatgaaaaccttga

SEQ ID NO: 73230 - DNA, 3479 bp, Homo sapiens
  misc_feature (887)..(887): n is a, c, g, or t
  misc_feature (1305)..(1305): n is a, c, g, or t
  misc_feature (1344)..(1344): n is a, c, g, or t
  misc_feature (1653)..(1653): n is a, c, g, or t
ggcacgaggcggcgctgagtgacccgagtcgggacgcgggctgcgcgcgcgggaccccggagcccaaacccggggcaggcgggcagctgtgcccgggcggcacggccagcttcctgatttctcccgattccttccttctccctggagcggccgacaatgtccaccacggtcaatgtagattcccttgcggaatatgagaagagccagatcaagagagccctggagctggggacggtgatgactgtgttcagcttccgcaagtccacccccgagcggagaaccgtccaggtgatcatggagacgcggcaggtggcctggagcaagaccgccgacaagatcgagggcttcttggatatcatggaaataaaagaaatccgcccagggaagaactccaaagatttcgagcgagcaaaagcagttcgccagaaagaagactgctgcttcaccatcctatatggcactcagttcgtcctcagcacgctcagcttggcagctgactctaaagaggatgcagttaactggctctctggcttgaaaatcttacaccaggaagcgatgaatgcgtccacgcccaccattatcgagagttggctgagaaagcagatatattctgtggatcaaaccagaagaaacagcatcagtctccgagagttgaagaccatcttgcccctgatcaactttaaagtgagcagtgccaagttccttaaagataagtttgtggaaataggagcacacaaagatgagctcagctttgaacagttccatctcttctataaaaaacttatgtttgaacagcaaaaatcgattctcgatgaattcaaaaaggattcgtccgtgttcatcctggggaacactgacaggccggatgcctctgctgtttacctgcntgacttccagaggtttctcatacatgaacagcaggagcattgggctcaggatctgaacaaagtccgtgagcggatgacaaagttcattgatgacaccatgcgtgaaactgctgagcctttcttgtttgtggatgagttcctcacgtacctgttttcacgagaaaacagcatctgggatgagaagtatgacgcggtggacatgcaggacatgaacaaccccctgtctcattactggatctcctcgtcacataacacgtaccttacaggtgaccagctgcggagcgagtcgtccccagaagcttacatccgctgcctgcgcatgggctgtcgctgcattgaactggactgctgggacgggcccgatgggaagccggtcatctaccatggctggacgcggactaccaagatcaagtttgangacgtcgtgcaggccatcaaagaccacgcctttgttacntcgagcttcccagtgatcctgtccatcgaggagcactgcagcgtggagcaacagcgtcacatggccaaggccttcaaggaagtatttggcgacctgctgttgacgaagcccacggaggccagtgctgaccagctgccctcgcccagccagctgcgggagaagatcatcatcaagcataagaagctgggcccccgaggcgatgtggatgtcaacatggaggacaagaaggacgaacacaagcaacagggggagctgtacatgtgggattccattgaccagaaatggactcggcactactgcgccattgcngatgccaagctgtccttcagtgatgacattgaacagactatggaggaggaagtgccccaggatataccccctacagaactacattttggggagaaatggttccacaagaaggtggagaagaggacgagtgccgagaagttgctgcaggaatactgcatggagacggggggcaaggatggcaccttcctggttcgggagagcgagaccttccccaatgactacaccctgtccttctggcggtcaggccgggtccagcactgccggatccgctccaccatggagggcgggaccctgaaatactacttgactgacaacctcaccttcagcagcatctatgccctcatccagcactaccgcgagacgcacctgcgctgcgccgagttcgagctgcggctcacggaccctgtgcccaaccccaacccccacgagtccaagccgtggtactatgacagcctgagccgcggagaggcagaggacatgctgatgaggattccccgggacggggccttcctgatccggaagcgagaggggagcgactcctatgccatcaccttcagggctaggggcaaggtaaagcattgtcgcatcaaccgggacggccggcactttgtgctggggacctccgcctattttgagagtctggtggagctcgtcagttactacgagaagcattcactctaccgaaagatgagactgcgctaccccgtgacccccgagctcctggagcgctacaatatggaaagagatataaactccctctacgacgtcagcagaatgtatgtggatcccagtgaaatcaatccgtccatgcctcagagaaccgtgaaagctctgtatgactacaaagccaagcgaagcgatgagctgagcttctgccgtggtgccctcatccacaatgtctccaaggagcccgggggctggtggaaaggagactatggaaccaggatccagcagtacttcccatccaactacgtcgaggacatctcaactgcagacttcgaggagctagaaaagcagattattgaagacaatcccttagggtctctttgcagaggaatattggacctcaatacctataacgtcgtgaaagcccctcagggaaaaaaccagaagtcctttgtcttcatcctggagcccaagcagcagggcgatcctccggtggagtttgccacagacagggtggaggagctctttgagtggtttcagagcatccgagagatcacctggaagattgacaccaaggagaacaacatgaagtactgggagaagaaccagtccatcgccatcgagctctctgacctggttgtctactgcaaaccaaccagcaaaaccaaggacaacttagaaaatcctgacttccgagaaatccgctcctttgtggagacgaaggctgacagcatcatcagacagaagcccgtcgacctcctgaagtacaatcaaaaggggacaaagagttgactcttcaaactacgaccccttccgcctctggctgtgcggttctcagatggtggcactcaatttccagacggcagataagtacatgcagatgaatcacgcattgttttctctcaacgggcgcacgggctacgttctgcagcctgagagcatgaggacagagaaatatgacccgatgccacccgagtcccagaggaagatcctgatgacgctgacagtcaagtctcgggtgctcgccatcttccccaacttgggccgacctcattgcctgtccctttgctcaacgtggcgcctctgcggcgcccggctatgacaaccaccgctccagcagcacgccgccggcctcgcatgcgcccgagcctatctgggca

SEQ ID NO: 73231 - DNA, 3622 bp, Homo sapiens
  misc_feature (887)..(887): n is a, c, g, or t
  misc_feature (1305)..(1305): n is a, c, g, or t
  misc_feature (1344)..(1344): n is a, c, g, or t
  misc_feature (1653)..(1653): n is a, c, g, or t
  misc_feature (2900)..(2900): n is a, c, g, or t
  misc_feature (3239)..(3239): n is a, c, g, or t
  misc_feature (3442)..(3442): n is a, c, g, or t
ggcacgaggcggcgctgagtgacccgagtcgggacgcgggctgcgcgcgcgggaccccggagcccaaacccggggcaggcgggcagctgtgcccgggcggcacggccagcttcctgatttctcccgattccttccttctccctggagcggccgacaatgtccaccacggtcaatgtagattcccttgcggaatatgagaagagccagatcaagagagccctggagctggggacggtgatgactgtgttcagcttccgcaagtccacccccgagcggagaaccgtccaggtgatcatggagacgcggcaggtggcctggagcaagaccgccgacaagatcgagggcttcttggatatcatggaaataaaagaaatccgcccagggaagaactccaaagatttcgagcgagcaaaagcagttcgccagaaagaagactgctgcttcaccatcctatatggcactcagttcgtcctcagcacgctcagcttggcagctgactctaaagaggatgcagttaactggctctctggcttgaaaatcttacaccaggaagcgatgaatgcgtccacgcccaccattatcgagagttggctgagaaagcagatatattctgtggatcaaaccagaagaaacagcatcagtctccgagagttgaagaccatcttgcccctgatcaactttaaagtgagcagtgccaagttccttaaagataagtttgtggaaataggagcacacaaagatgagctcagctttgaacagttccatctcttctataaaaaacttatgtttgaacagcaaaaatcgattctcgatgaattcaaaaaggattcgtccgtgttcatcctggggaacactgacaggccggatgcctctgctgtttacctgcntgacttccagaggtttctcatacatgaacagcaggagcattgggctcaggatctgaacaaagtccgtgagcggatgacaaagttcattgatgacaccatgcgtgaaactgctgagcctttcttgtttgtggatgagttcctcacgtacctgttttcacgagaaaacagcatctgggatgagaagtatgacgcggtggacatgcaggacatgaacaaccccctgtctcattactggatctcctcgtcacataacacgtaccttacaggtgaccagctgcggagcgagtcgtccccagaagcttacatccgctgcctgcgcatgggctgtcgctgcattgaactggactgctgggacgggcccgatgggaagccggtcatctaccatggctggacgcggactaccaagatcaagtttgangacgtcgtgcaggccatcaaagaccacgcctttgttacntcgagcttcccagtgatcctgtccatcgaggagcactgcagcgtggagcaacagcgtcacatggccaaggccttcaaggaagtatttggcgacctgctgttgacgaagcccacggaggccagtgctgaccagctgccctcgcccagccagctgcgggagaagatcatcatcaagcataagaagctgggcccccgaggcgatgtggatgtcaacatggaggacaagaaggacgaacacaagcaacagggggagctgtacatgtgggattccattgaccagaaatggactcggcactactgcgccattgcngatgccaagctgtccttcagtgatgacattgaacagactatggaggaggaagtgccccaggatataccccctacagaactacattttggggagaaatggttccacaagaaggtggagaagaggacgagtgccgagaagttgctgcaggaatactgcatggagacggggggcaaggatggcaccttcctggttcgggagagcgagaccttccccaatgactacaccctgtccttctggcggtcaggccgggtccagcactgccggatccgctccaccatggagggcgggaccctgaaatactacttgactgacaacctcaccttcagcagcatctatgccctcatccagcactaccgcgagacgcacctgcgctgcgccgagttcgagctgcggctcacggaccctgtgcccaaccccaacccccacgagtccaagccgtggtactatgacagcctgagccgcggagaggcagaggacatgctgatgaggattccccgggacggggccttcctgatccggaagcgagaggggagcgactcctatgccatcaccttcagggctaggggcaaggtaaagcattgtcgcatcaaccgggacggccggcactttgtgctggggacctccgcctattttgagagtctggtggagctcgtcagttactacgagaagcattcactctaccgaaagatgagactgcgctaccccgtgacccccgagctcctggagcgctacaatatggaaagagatataaactccctctacgacgtcagcagaatgtatgtggatcccagtgaaatcaatccgtccatgcctcagagaaccgtgaaagctctgtatgactacaaagccaagcgaagcgatgagctgagcttctgccgtggtgccctcatccacaatgtctccaaggagcccgggggctggtggaaaggagactatggaaccaggatccagcagtacttcccatccaactacgtcgaggacatctcaactgcagacttcgaggagctagaaaagcagattattgaagacaatcccttagggtctctttgcagaggaatattggacctcaatacctataacgtcgtgaaagcccctcagggaaaaaaccagaagtcctttgtcttcatcctggagcccaagcagcagggcgatcctccggtggagtttgccacagacagggtggaggagctctttagaaagtggttatccaagagcaatcccgagaagggaatttcgacgcctggganagggaaactttgggaacgaaccgaaagggaaggaaaaccaaaaccgaaatttgggaacaacggggttaaacctgggggggggaaaggcaaaaaagggaaaacccaaggggttaccgccaattccggggcccccccaaaattccgggaaggggccccatttatccccgagtttgtccccttttaggggaaaaagccgccccagtttggggggggggtattatatatggggttccgattaaaaaaccccgtttgggcccaaataaatagataaaaaagccccgccccgaaaaaaaagcccccaaatggtccgaaaaagacccagatgtggagcaaaacctntaaaaaaggggggggaaaaccagaagctagagtcccgttggaaaccccctttttttatccccccggggaaagggtaaacaaaaaaatgtttcccccccgtggggcctgttttccccctttatttattgcttaggggcgggaaaccgggacaaccccggaaaaaagcgggcctttgaaccagcgattccattccagagccaganagccccccgggggttttccccgggaaacacaccgcccatttttcccccccgtttgggaaaaatggtttaaacccaaaaattccgcacaaaaacacgggggaccaaaacggaagttatgactctgtcaaaactaaacaggaacccccccttttttacccggggcgcccattaccttagggc

SEQ ID NO: 73232 - DNA, 564 bp, Homo sapiens
gcatgagcaagaaagttgggatcgctgaacatatcttcttcataaaccacaaggcgcagaaatgcaacaagaggttaagagagaagagagtcagcaacagcaagttttactcatagaagctggggtatgtgtgtaagggtattgtgtgtgtgcgcatgtgtgtttgcatgtaggagaacgtgccctattcacactctgggaagacgctaatctgtgacatcttttcttcaagcctgccatcaaggacatttcttaagacccaactggcatgagttggggtaatttcctattattttcatcttggacaactttcttaacttatattctttatagaggattccccaaaatgtgctcctcatttttggcctctcatgttccaaacctcattgaataaaagcaatgaaaaccttgatcaattaagccttctgttgcacgacctgtgcagtgaacaggatttcttttctggccaagaagattctacctctaatgatccaggtaactgatgtccatggaggatgagctggaaatgtaagaaactattcatgagactctgaaaaaaaaaaa

SEQ ID NO: 73233 - DNA, 529 bp, Homo sapiens
gaccgagctcgatacctgaacattcgtgtcccacaagagttaagagagaagagagtcagcaacagcaagttttactcatagaagctggggtatgtgtgtaagggtattgtgtgtgtgcgcatgtgtgtttgcatgtaggagaacgtgccctattcacactctgggaagacgctaatctgtgacatcttttcttcaagcctgccatcaaggacatttcttaagacccaactggcatgagttggggtaatttcctattattttcatcttggacaactttcttaacttatattctttatagaggattccccaaaatgtgctcctcatttttggcctctcatgttccaaacctcattgaataaaagcaatgaaaaccttgatcaattaagccttctgttgcacgacctgtgcagtgaacaggatttcttttctggccaagaagattctacctctaatgatccaggtaactgatgtccatggaggatgagctggaaatgtaagaaactattcatgagactctgaaaaaaaaaaa

SEQ ID NO: 73234 - DNA, 530 bp, Homo sapiens
ggtgtttgagatcagaaagaaggagaaatgcaacaagaggttaagagagaagagagtcagcaacagcaagttttactcatagaagctggggtatgtgtgtaagggtattgtgtgtgtgcgcatgtgtgtttgcatgtaggagaacgtgccctattcacactctgggaagacgctaatctgtgacatcttttcttcaagcctgccatcaaggacatttcttaagacccaactggcatgagttggggtaatttcctattattttcatcttggacaactttcttaacttatattctttatagaggattccccaaaatgtgctcctcatttttggcctctcatgttccaaacctcattgaataaaagcaatgaaaaccttgatcaattaagccttctgttgcacgacctgtgcagtgaacaggatttcttttctggccaagaagattctacctctaatgatccaggtaactgatgtccatggaggatgagctggaaatgtaagaaactattcatgagactctgaaaaaaaaaaa

SEQ ID NO: 73235 - DNA, 1007 bp, Homo sapiens
ttgagtatccccgtgatcctgcaatgctagagccctgatgggcagtcagagctggggagcaggtgtgcaggttttgagggtgcaggggatagagagttatgacgaggatgctggggtccacagagcccccgaggatttgaagaactagaatttgagacactctaacagtgtggctttaggggaggggacaggaggcagagttaaagacagaggggtggtgacagagaagagcccccttccatcctgacctcacctatatttgagggctgtggccaggactgagctgcacaccaaaacctcgtggaaacagctttgtcgagaattttcacagtgagaggaagaaacgagaggggcagggttgtcttcaggaaaggaaaacattcaaccatattaaagatccgagtgtgcaagaaagcaaagtggggatggaggaggaaaaatgcagggcgagctgggaagatgggatttctcgggggcgggcactaaagacagtgaactccaaacaggagaacaacatgaagtactgggagaagaaccagtccatcgccatcgagctctctgacctggttgtctactgcaaaccaaccagcaaaaccaaggacaacttaggtaacatctttcccaagaacatgccctataactccaatgaaaacttaacttcctttagagtctgatattttcagagggggcagagagtgcattctctcattcttaactactcccagtagatggccccaccttgggtttgtcctccgagtgagggagctggtggcagaagcttttttggtgtattagtccattttcatgctgctgataaagacatacccaagactgagtaatttataaggaaaaagaggtttaatggactcacagttccacgtggaggaggcctcacaattatggcagcagaggagagagaatgagaagcaagtgaaaggggaaacccttataaaaccatcagatctcgcgagacttattcagtaccacaacaacggtacaggggaaac

SEQ ID NO: 73236 - DNA, 1333 bp, Homo sapiens
atttgaattaaaattgcctatgcaatttattgctacatagacacttttagcaagtttgaatcttttcttttatgattcgggatttggtgacatacttggaaaggtgttccccagtctgggagtttgctgtctagaaaccctatattttctttgagtgagatacctatttgaacagctgcctcacattaatttggggaaaaggtgaaattcattccccacctagaaactcctggcctagggggccagcgtgctcatgcctgacttacagcaggcgttcactttccttcccagataagtacatgcagatgaatcacgcattgttttctctcaacgggcgcacgggctacgttctgcagcctgagagcatgaggacagagaaatatgacccgatgccacccgagtcccagaggaagatcctgatgacgctgacagtcaaggttctcggtgctcgccatctccccaaacttggacgaagtattgcctgtccctttgtagaagtggagatctgtggagccgagtatgacaacaacaagttcaagacgacggttgtgaatgataatggcctcagccctatctgggctccaacacaggagaaggtgacatttgaaatttatgacccaaacctggcatttctgcgctttgtggtttatgaagaagatatgttcagcgatcccaactttcttgctcatgccacttaccccattaaagcagtcaaatcaggattcaggtccgttcctctgaagaatgggtacagcgaggacatagagctggcttccctcctggttttctgtgagatgcggccagtcctggagagcgaagaggaactttactcctcctgtcgccagctgaggaggcggcaagaagaactgaacaaccagctctttctgtatgacacacaccagaacttgcgcaatgccaaccgggatgccctggttaaagagttcagtgttaatgagaaccagctccagctgtaccaggagaaatgcaacaagaggttaagagagaagagagtcagcaacagcaagttttactcatagaagctggggtatgtgtgtaagggtattgtgtgtgtgcgcatgtgtgtttgcatgtaggagaacgtgccctattcacactctgggaagacgctaatctgtgacatcttttcttcaagcctgccatcaaggacatttcttaagacccaactggcatgagttggggtaatttcctattattttcatcttggacaactttcttaacttatattctttatagaggattccccaaaatgtgctcctcatttttggcctctcatgttccaaacctcattgaataaaagcaatgaaaaccttga

SEQ ID NO: 73237 - DNA, 4402 bp, Homo sapiens
  misc_feature (887)..(887): n is a, c, g, or t
  misc_feature (1305)..(1305): n is a, c, g, or t
  misc_feature (1344)..(1344): n is a, c, g, or t
  misc_feature (1653)..(1653): n is a, c, g, or t
ggcacgaggcggcgctgagtgacccgagtcgggacgcgggctgcgcgcgcgggaccccggagcccaaacccggggcaggcgggcagctgtgcccgggcggcacggccagcttcctgatttctcccgattccttccttctccctggagcggccgacaatgtccaccacggtcaatgtagattcccttgcggaatatgagaagagccagatcaagagagccctggagctggggacggtgatgactgtgttcagcttccgcaagtccacccccgagcggagaaccgtccaggtgatcatggagacgcggcaggtggcctggagcaagaccgccgacaagatcgagggcttcttggatatcatggaaataaaagaaatccgcccagggaagaactccaaagatttcgagcgagcaaaagcagttcgccagaaagaagactgctgcttcaccatcctatatggcactcagttcgtcctcagcacgctcagcttggcagctgactctaaagaggatgcagttaactggctctctggcttgaaaatcttacaccaggaagcgatgaatgcgtccacgcccaccattatcgagagttggctgagaaagcagatatattctgtggatcaaaccagaagaaacagcatcagtctccgagagttgaagaccatcttgcccctgatcaactttaaagtgagcagtgccaagttccttaaagataagtttgtggaaataggagcacacaaagatgagctcagctttgaacagttccatctcttctataaaaaacttatgtttgaacagcaaaaatcgattctcgatgaattcaaaaaggattcgtccgtgttcatcctggggaacactgacaggccggatgcctctgctgtttacctgcntgacttccagaggtttctcatacatgaacagcaggagcattgggctcaggatctgaacaaagtccgtgagcggatgacaaagttcattgatgacaccatgcgtgaaactgctgagcctttcttgtttgtggatgagttcctcacgtacctgttttcacgagaaaacagcatctgggatgagaagtatgacgcggtggacatgcaggacatgaacaaccccctgtctcattactggatctcctcgtcacataacacgtaccttacaggtgaccagctgcggagcgagtcgtccccagaagcttacatccgctgcctgcgcatgggctgtcgctgcattgaactggactgctgggacgggcccgatgggaagccggtcatctaccatggctggacgcggactaccaagatcaagtttgangacgtcgtgcaggccatcaaagaccacgcctttgttacntcgagcttcccagtgatcctgtccatcgaggagcactgcagcgtggagcaacagcgtcacatggccaaggccttcaaggaagtatttggcgacctgctgttgacgaagcccacggaggccagtgctgaccagctgccctcgcccagccagctgcgggagaagatcatcatcaagcataagaagctgggcccccgaggcgatgtggatgtcaacatggaggacaagaaggacgaacacaagcaacagggggagctgtacatgtgggattccattgaccagaaatggactcggcactactgcgccattgcngatgccaagctgtccttcagtgatgacattgaacagactatggaggaggaagtgccccaggatataccccctacagaactacattttggggagaaatggttccacaagaaggtggagaagaggacgagtgccgagaagttgctgcaggaatactgcatggagacggggggcaaggatggcaccttcctggttcgggagagcgagaccttccccaatgactacaccctgtccttctggcggtcaggccgggtccagcactgccggatccgctccaccatggagggcgggaccctgaaatactacttgactgacaacctcaccttcagcagcatctatgccctcatccagcactaccgcgagacgcacctgcgctgcgccgagttcgagctgcggctcacggaccctgtgcccaaccccaacccccacgagtccaagccgtggtactatgacagcctgagccgcggagaggcagaggacatgctgatgaggattccccgggacggggccttcctgatccggaagcgagaggggagcgactcctatgccatcaccttcagggctaggggcaaggtaaagcattgtcgcatcaaccgggacggccggcactttgtgctggggacctccgcctattttgagagtctggtggagctcgtcagttactacgagaagcattcactctaccgaaagatgagactgcgctaccccgtgacccccgagctcctggagcgctacaatatggaaagagatataaactccctctacgacgtcagcagaatgtatgtggatcccagtgaaatcaatccgtccatgcctcagagaaccgtgaaagctctgtatgactacaaagccaagcgaagcgatgagctgagcttctgccgtggtgccctcatccacaatgtctccaaggagcccgggggctggtggaaaggagactatggaaccaggatccagcagtacttcccatccaactacgtcgaggacatctcaactgcagacttcgaggagctagaaaagcagattattgaagacaatcccttagggtctctttgcagaggaatattggacctcaatacctataacgtcgtgaaagcccctcagggaaaaaaccagaagtcctttgtcttcatcctggagcccaagcagcagggcgatcctccggtggagtttgccacagacagggtggaggagctctttgagtggtttcagagcatccgagagatcacctggaagattgacaccaaggagaacaacatgaagtactgggagaagaaccagtccatcgccatcgagctctctgacctggttgtctactgcaaaccaaccagcaaaaccaaggacaacttagaaaatcctgacttccgagaaatccgctcctttgtggagacgaaggctgacagcatcatcagacagaagcccgtcgacctcctgaagtacaatcaaaagggcctgacccgcgtctacccaaagggacaaagagttgactcttcaaactacgaccccttccgcctctggctgtgcggttctcagatggtggcactcaatttccagacggcagataagtacatgcagatgaatcacgcattgttttctctcaacgggcgcacgggctacgttctgcagcctgagagcatgaggacagagaaatatgacccgatgccacccgagtcccagaggaagatcctgatgacgctgacagtcaaggttctcggtgctcgccatctccccaaacttggacgaagtattgcctgtccctttgtagaagtggagatctgtggagccgagtatgacaacaacaagttcaagacgacggttgtgaatgataatggcctcagccctatctgggctccaacacaggagaaggtgacatttgaaatttatgacccaaacctggcatttctgcgctttgtggtttatgaagaagatatgttcagcgatcccaactttcttgctcatgccacttaccccattaaagcagtcaaatcaggattcaggtccgttcctctgaagaatgggtacagcgaggacatagagctggcttccctcctggttttctgtgagatgcggccagtcctggagagcgaagaggaactttactcctcctgtcgccagctgaggaggcggcaagaagaactgaacaaccagctctttctgtatgacacacaccagaacttgcgcaatgccaaccgggatgccctggttaaagagttcagtgttaatgagaaccagctccagctgtaccaggagaaatgcaacaagaggttaagagagaagagagtcagcaacagcaagttttactcatagaagctggggtatgtgtgtaagggtattgtgtgtgtgcgcatgtgtgtttgcatgtaggagaacgtgccctattcacactctgggaagacgctaatctgtgacatcttttcttcaagcctgccatcaaggacatttcttaagacccaactggcatgagttggggtaatttcctattattttcatcttggacaactttcttaacttatattctttatagaggattccccaaaatgtgctcctcatttttggcctctcatgttccaaacctcattgaataaaagcaatgaaaaccttgatcaattaagccttctgttgcacgacctgtgcagtgaacaggatttcttttctggccaagaagattctacctctaatgatccaggtaactgatgtccatggaggatgagctggaaatgtaagaaactattcatgagactctgaaaaaaaaaaa

SEQ ID NO: 73238 - DNA, 3730 bp, Homo sapiens
  misc_feature (887)..(887): n is a, c, g, or t
  misc_feature (1305)..(1305): n is a, c, g, or t
  misc_feature (1344)..(1344): n is a, c, g, or t
  misc_feature (1653)..(1653): n is a, c, g, or t
ggcacgaggcggcgctgagtgacccgagtcgggacgcgggctgcgcgcgcgggaccccggagcccaaacccggggcaggcgggcagctgtgcccgggcggcacggccagcttcctgatttctcccgattccttccttctccctggagcggccgacaatgtccaccacggtcaatgtagattcccttgcggaatatgagaagagccagatcaagagagccctggagctggggacggtgatgactgtgttcagcttccgcaagtccacccccgagcggagaaccgtccaggtgatcatggagacgcggcaggtggcctggagcaagaccgccgacaagatcgagggcttcttggatatcatggaaataaaagaaatccgcccagggaagaactccaaagatttcgagcgagcaaaagcagttcgccagaaagaagactgctgcttcaccatcctatatggcactcagttcgtcctcagcacgctcagcttggcagctgactctaaagaggatgcagttaactggctctctggcttgaaaatcttacaccaggaagcgatgaatgcgtccacgcccaccattatcgagagttggctgagaaagcagatatattctgtggatcaaaccagaagaaacagcatcagtctccgagagttgaagaccatcttgcccctgatcaactttaaagtgagcagtgccaagttccttaaagataagtttgtggaaataggagcacacaaagatgagctcagctttgaacagttccatctcttctataaaaaacttatgtttgaacagcaaaaatcgattctcgatgaattcaaaaaggattcgtccgtgttcatcctggggaacactgacaggccggatgcctctgctgtttacctgcntgacttccagaggtttctcatacatgaacagcaggagcattgggctcaggatctgaacaaagtccgtgagcggatgacaaagttcattgatgacaccatgcgtgaaactgctgagcctttcttgtttgtggatgagttcctcacgtacctgttttcacgagaaaacagcatctgggatgagaagtatgacgcggtggacatgcaggacatgaacaaccccctgtctcattactggatctcctcgtcacataacacgtaccttacaggtgaccagctgcggagcgagtcgtccccagaagcttacatccgctgcctgcgcatgggctgtcgctgcattgaactggactgctgggacgggcccgatgggaagccggtcatctaccatggctggacgcggactaccaagatcaagtttgangacgtcgtgcaggccatcaaagaccacgcctttgttacntcgagcttcccagtgatcctgtccatcgaggagcactgcagcgtggagcaacagcgtcacatggccaaggccttcaaggaagtatttggcgacctgctgttgacgaagcccacggaggccagtgctgaccagctgccctcgcccagccagctgcgggagaagatcatcatcaagcataagaagctgggcccccgaggcgatgtggatgtcaacatggaggacaagaaggacgaacacaagcaacagggggagctgtacatgtgggattccattgaccagaaatggactcggcactactgcgccattgcngatgccaagctgtccttcagtgatgacattgaacagactatggaggaggaagtgccccaggatataccccctacagaactacattttggggagaaatggttccacaagaaggtggagaagaggacgagtgccgagaagttgctgcaggaatactgcatggagacggggggcaaggatggcaccttcctggttcgggagagcgagaccttccccaatgactacaccctgtccttctggcggtcaggccgggtccagcactgccggatccgctccaccatggagggcgggaccctgaaatactacttgactgacaacctcaccttcagcagcatctatgccctcatccagcactaccgcgagacgcacctgcgctgcgccgagttcgagctgcggctcacggaccctgtgcccaaccccaacccccacgagtccaagccgtggtactatgacagcctgagccgcggagaggcagaggacatgctgatgaggattccccgggacggggccttcctgatccggaagcgagaggggagcgactcctatgccatcaccttcagggctaggggcaaggtaaagcattgtcgcatcaaccgggacggccggcactttgtgctggggacctccgcctattttgagagtctggtggagctcgtcagttactacgagaagcattcactctaccgaaagatgagactgcgctaccccgtgacccccgagctcctggagcgctacaatatggaaagagatataaactccctctacgacgtcagcagaatgtatgtggatcccagtgaaatcaatccgtccatgcctcagagaaccgtgaaagctctgtatgactacaaagccaagcgaagcgatgagctgagcttctgccgtggtgccctcatccacaatgtctccaaggagcccgggggctggtggaaaggagactatggaaccaggatccagcagtacttcccatccaactacgtcgaggacatctcaactgcagacttcgaggagctagaaaagcagattattgaagacaatcccttagggtctctttgcagaggaatattggacctcaatacctataacgtcgtgaaagcccctcagggaaaaaaccagaagtcctttgtcttcatcctggagcccaagcagcagggcgatcctccggtggagtttgccacagacagggtggaggagctctttgagtggtttcagagcatccgagagatcacctggaagattgacaccaaggagaacaacatgaagtactgggagaagaaccagtccatcgccatcgagctctctgacctggttgtctactgcaaaccaaccagcaaaaccaaggacaacttagaaaatcctgacttccgagaaatccgctcctttgtggagacgaaggctgacagcatcatcagacagaagcccgtcgacctcctgaagtacaatcaaaagggcctgacccgcgtctacccaaagggacaaagagttgactcttcaaactacgaccccttccgcctctggctgtgcggttctcagatggtggcactcaatttccagacggcaggtaaaggccgactgaaggtagtcccgtccctgcaaggtggcggttgcagtcactccaggccgagtcaccttgggtcagcgataccatgtggtgtccaagaatgagtgatttgtccgagggactgcacggttcagcagagtaatggttagtatgaggtccagcagctgaatggagggatgagaggaccgaaggctgcttggcttaggcaggcttcgtgattgtaagtaagtgacagaggctgagttagtctggcttagaaaaagaaaatgcattagttcatgtaattaaagcatctttggagttctcttctccaggcctgttgctgtgtgagggctttctgctcagactttcttccagagacatttacatgctggcataactaacatacacaaacttctggacacaaagtgatcgcataaatcatggggctttgtgcttttgttgttgttatttaagacctctttcgagggatctattcatcagtagcgtcctttacattctttttatagccacatcggattc

SEQ ID NO: 73239 - DNA, 712 bp, Homo sapiens
ctgcctcggcctcccaagtgctgggattacaggcgtgagccactgtgcctagcctagatgttttttactagttaaaatgggatttttctttttaattcttcctcaaaatgtaaaatcaagataagtttgctataaaaattaaaggagataaaatttaaaagaattaaaaatagtttgttaggttgtctttccttcaagttatgtttttttgttttttttgtttttttgagatagagccagaccctgtctcaacaacaacaacaacaacaacaacaacaacaacaaagtatgaccactcaaggctaagcaggacggaatataactttacactcctgaagtttaatagattctgggttactccttctaagtagcagaaaccaatgagtaaagatatcaagtcaagaggttaaataagcaaaacaacaataacagaattaaaaagaaaatggttttattacacaattaaacttgaatgtgacatgcatcagtcaatctgcttaagagactgcaaagatagaaagatggtcaccataattagttcacaagtagaagaatttccagcaccatgtcatacatagttcattctaaattcacctggagattgaagaggacatctgtgtatgctaattacttatattcaatgacaaataaacttttcacctctttataacaggtggtagtttagcaggataatcgcttgaacctgggaagt

SEQ ID NO: 73240 - DNA, 361 bp, Homo sapiens
ataattcttacatatccatttctgtaattgagctaaaataatacagaatctattgctgtcagataatagaaattctcagtttctaaaatggactctagcatgataactattttaaatttctataaatattaaaagacttataagaaggaaactttgtagtttgctgaaactcttatgtaacttttcattaataaaagtaaagtagccatgcaggtcttgtagatggtttcctgcttctgctgccaaatttaatgattttagttaaatttcataaagggaaatataaatatattatacttaaaggatatagacacttaaaacaacagacccatgcctgaataactcttgcagaataattgtc

SEQ ID NO: 73241 - DNA, 442 bp, Homo sapiens
cgtgggaagggtttgctaacacccagatcacataccacagacatgttcagtagagtacatgaaaacttttgtaaattttaaaaaatgatgaaagtttacatatgttcacgtttgtgtgtacagatataaatgtataatttcagcatttcattgtctacattttctattttgggaacatgatttgaatcacattccaaatatgatggttgctcacatccacaagttcccagaacaagataatgtccattttgaaggttctaggctgtaggagtgtgaggccctggaagttcccacatacacagaggtgaaggctgccacactgggttctagttattagtggctcagggaaggttctttgctgggttttcaccctgcttaatgtgctctgccaaccaggacagaggaatatgttttacaatgatctgaatcaaatgcaactaga

SEQ ID NO: 73242 - DNA, 2561 bp, Homo sapiens
  misc_feature (799)..(799): n is a, c, g, or t
  misc_feature (813)..(813): n is a, c, g, or t
  misc_feature (1118)..(1118): n is a, c, g, or t
  misc_feature (1647)..(1647): n is a, c, g, or t
  misc_feature (1649)..(1649): n is a, c, g, or t
tgcgcagaacagctctggtcctcacagccagtgcaccggaggggcgcgctcccgagctggcgcagtttcccagcgcggtgcccgcccctcatcctcctccagtctccctcccctcgccgactgccgccccaggctccgccatggggaatgtgccatccgcggtgaagcactgcctcagctaccagcagcttctccgggagcatctctggatcggggattcagtggcaggggcgctcgaccccgcgcaggaaacatcccagttatctggactccctgagtttgttaaaatagtagaagttgggcctagggatggattgcagaatgaaaaggttatagttcctacagatataaaaattgaatttatcaatcgactttcccaaactggcttgtctgtaatagaagtgactagctttgtgtcttccagatgggtaccacaggttgctgctggagctactgagatatcagtttttggagctgcatctgaatcctttagcaagaagaatattaactgttccattgaagaaagtatgggaaaatttgaggaggttgttaagtctgcaagacacatgaatattccagcacgagggtacttatgaaatcccacaaattctgttttgttaatgtttattgttaaagcttactcaaaaattatctagagattcttatatcatttataaaaatatacatagaatatcatatttctattttgtttaatcagggtaatcactatatagttacatctcattaacatcactgctgattattagtgagtatctagcttgtggaatgtgtcatgcanttgaaatcagaggnactagcatgcaaatctggcattattaactattttattaacactctagcacccaaatgcagccctcttatctcagcctacatgtgctgataagttggtataaactcacaacagcttttggaaaagaatcacctaatgtggttttcaaattttttttaaaacatgactttttcttcaaagagtattttatgtagaacttcaatagaatacagcagatataaaattgagctgctctgggaaatcattttatccattctttctccccctcaatggctgacttttctacttcctctgggtgatcccaaancacctccatagtatcttgcagaacactgtttaaaaatacttgataaattgcttatagaagataaatataaactttcagttctctactattttctattatatgtgatttctataaatttaggagtatcagagatatcaatccctttctcctcgccttgcctttttcttgtggaaacttatcagctgttcattctaagagatgttgattacaggacatggaaaataaaaactgacccaagatccacaaacctaattttctctctcaggagtttagaaatggtataccaaacatggttacttgtattgaaagattatgtgattttgtcactgagttcactattttggggttcctaggatggagccacatgcaaaccagtgacaggacagagtagtagaaagcagaaatggaaaaaggaggctcctagcggtgatgagaggtatgggggagggaggagagggaaaaatctgccttggtgcttgtctgcttccaggaccaatagttgcctcaagtattataaccaggcctatgngntgtgaaacctataatgcatttttgtgtgtgtttgtttcttaaggaagaatttgtttctaagacattagctactttttctattaattttataaatatggagatatgatgaacacacatcttaacaagttaaagtgcatagcgattggtaatagaaggttgaaagctggggatggatttgggtgcaggctgtacttcccttagttgaggtgagcaaagttcatggtagcgggaaagattcaacagttaatgagaaagataagtgagtcaattgtgactgaaaatattagtgaaatgattggaatttcaatcaaggtgttttgggggaacaattagagttagactatacctagtaaaatattttgttagtttgttttctatttatatttttcctgtcctccatagtaagtctacatgagtttctaaaatttgaaattacttttgtaattaagatagatgcatatcatgtaaggactatatgagaaaaatttaaaatccaaggcaatgtacttccaaagacataaaataaaggatatttatttttcaggcaaaagttacaaaaccacaatcaaaaaggagagatatactattggtttctcaattcgaatataaataagttgtctcaattttctttaaaataaagagaaagatgaagaccctattctacttcaatatgtgtttaaagtgtggagtataagctttaaagtaattctcattgggaagttaaaaagtatgtgactataagaagtaaattgcttatgtagcttgctcttcaaataggaagggtttttttagtgttgaaagatggatgcaaatataagttgtaggaagtaaccttttattatcttagctttctgttgtaaaatggaatagttaatgtaactgggctaataaaaatcttaaaccctcttaata

SEQ ID NO: 73243 - DNA, 2368 bp, Homo sapiens
tgcgcagaacagctctggtcctcacagccagtgcaccggaggggcgcgctcccgagctggcgcagtttcccagcgcggtgcccgcccctcatcctcctccagtctccctcccctcgccgactgccgccccaggctccgccatggggaatgtgccatccgcggtgaagcactgcctcagctaccagcagcttctccgggagcatctctggatcggggattcagtggcaggggcgctcgaccccgcgcaggaaacatcccagttatctggactccctgagtttgttaaaatagtagaagttgggcctagggatggattgcagaatgaaaaggttatagttcctacagatataaaaattgaatttatcaatcgactttcccaaactggcttgtctgtaatagaagtgactagctttgtgtcttccagatgggtaccacaggttgctgctggagctactgagatatcagtttttggagctgcatctgaatcctttagcaagaagaatattaactgttccattgaagaaagtatgggaaaatttgaggaggttgttaagtctgcaagacacatgaatattccagcacgagggtatgtgtcttgtgctctgggctgtccatatgaaggaagtattacaccgcaaaaagtgacagaagtgtctaagagattgtacggcatgggttgttatgagatctctctaggagacacaattggagtgggaactccaggaagtatgaaaagaatgttggaaagtgtgatgaaagaaatcccaccaggtgctcttgctgttcactgtcatgacacatacggacaagccttagcaaatatccttacggcccttcagatgggaattaatgtggtggactccgcagtatccggattaggtggctgcccttatgcaaaaggtgcttctgggaatgtagccactgaggatttgatatatatgcttaatggcctggggctcaatacaggtgtgaatctatacaaagtgatggaagctggtgactttatttgcaaagctgtgaataaaaccacaaactctaaagtagcacaagcctccttcaatgcttgacttgaatggatttatgacgtaccgttgagaagatcaatttcagctacaatactcatctgaaaatcattaatgccaacttgctctgatatgtgaagtaatggacaagagtgggaaaaaagagatccttttcaaaaagattataactggatagattaagtcaacaaaatgcaatatcagtcatcaggtaaattgcaagctgaggataaataataaaacttgtcataattttgaacttggaaaaaagtttcttttgctctcatagaaataactttttaatttagtagatgggaaaattgacttcgtatttccccaagtatcaaatactgtgttaatacttaatcaagcaggcttaacactgtgtacatattgtcagtagtttatgagctcctgcatagtatgcagagtgtgtggcctcaatattatacattatgcctctggatctcaactactcatttgccaagtcagttatgttatggaccaaaagccaaatctccatctgaccctacataattttagcaatagaacttttatatttcaagtatggctaacatctgttaactatttcagtgactttatctggttccaagaggctgtggccaatggcaagatgccatatcctggaaacatattacgacctcccatgtttgttacatgcatccagtttaccacactttacctgtcatcagttatagtaaaaaccagcatggtgttactcaactattgagaaattgtaagctattttttttgtcctgatgtctaaattgcagtgataagaataggttgatacatgtatcataatctacctttataattttcagatcactttcaaattgcccaaggaaatattgtgatcctaagaatattaagataattttaggttaatgaaatacccattttccttttattcatggtgctttgcttacccacattattttttggtgtattttttagtggttattttagaagttgaagtggctgaaattttgtctattgtcttagaattgattgccagaaattgcaagatgtaatatatcaaagtcagggatgaggagcaggaggactattcaagataaacttctgtaacctatgcatattttatgggggcagtattattacaaatggatctgaaatgtcagttctagtatttagagagacttctctaataataccgggtgatattatctttgagtaaatttgaatataaattgaaacataaaaatgagtattgtgaactttctcggaaatattcattaaaaccattgaaataaaaataaattcaagaaagtaagaagtactgatta

SEQ ID NO: 73244 - DNA, 2219 bp, Homo sapiens
tgcgcagaacagctctggtcctcacagccagtgcaccggaggggcgcgctcccgagctggcgcagtttcccagcgcggtgcccgcccctcatcctcctccagtctccctcccctcgccgactgccgccccaggctccgccatggggaatgtgccatccgcggtgaagcactgcctcagctaccagcagcttctccgggagcatctctggatcggggattcagtggcaggggcgctcgaccccgcgcaggaaacatcccagttatctggactccctgagtttgttaaaatagtagaagttgggcctagggatggattgcagaatgaaaaggttatagttcctacagatataaaaattgaatttatcaatcgactttcccaaactggcttgtctgtaatagaagtgactagctttgtgtcttccagatgggtaccacaggtatgtgtcttgtgctctgggctgtccatatgaaggaagtattacaccgcaaaaagtgacagaagtgtctaagagattgtacggcatgggttgttatgagatctctctaggagacacaattggagtgggaactccaggaagtatgaaaagaatgttggaaagtgtgatgaaagaaatcccaccaggtgctcttgctgttcactgtcatgacacatacggacaagccttagcaaatatccttacggcccttcagatgggaattaatgtggtggactccgcagtatccggattaggtggctgcccttatgcaaaaggtgcttctgggaatgtagccactgaggatttgatatatatgcttaatggcctggggctcaatacaggtgtgaatctatacaaagtgatggaagctggtgactttatttgcaaagctgtgaataaaaccacaaactctaaagtagcacaagcctccttcaatgcttgacttgaatggatttatgacgtaccgttgagaagatcaatttcagctacaatactcatctgaaaatcattaatgccaacttgctctgatatgtgaagtaatggacaagagtgggaaaaaagagatccttttcaaaaagattataactggatagattaagtcaacaaaatgcaatatcagtcatcaggtaaattgcaagctgaggataaataataaaacttgtcataattttgaacttggaaaaaagtttcttttgctctcatagaaataactttttaatttagtagatgggaaaattgacttcgtatttccccaagtatcaaatactgtgttaatacttaatcaagcaggcttaacactgtgtacatattgtcagtagtttatgagctcctgcatagtatgcagagtgtgtggcctcaatattatacattatgcctctggatctcaactactcatttgccaagtcagttatgttatggaccaaaagccaaatctccatctgaccctacataattttagcaatagaacttttatatttcaagtatggctaacatctgttaactatttcagtgactttatctggttccaagaggctgtggccaatggcaagatgccatatcctggaaacatattacgacctcccatgtttgttacatgcatccagtttaccacactttacctgtcatcagttatagtaaaaaccagcatggtgttactcaactattgagaaattgtaagctattttttttgtcctgatgtctaaattgcagtgataagaataggttgatacatgtatcataatctacctttataattttcagatcactttcaaattgcccaaggaaatattgtgatcctaagaatattaagataattttaggttaatgaaatacccattttccttttattcatggtgctttgcttacccacattattttttggtgtattttttagtggttattttagaagttgaagtggctgaaattttgtctattgtcttagaattgattgccagaaattgcaagatgtaatatatcaaagtcagggatgaggagcaggaggactattcaagataaacttctgtaacctatgcatattttatgggggcagtattattacaaatggatctgaaatgtcagttctagtatttagagagacttctctaataataccgggtgatattatctttgagtaaatttgaatataaattgaaacataaaaatgagtattgtgaactttctcggaaatattcattaaaaccattgaaataaaaataaattcaagaaagtaagaagtactgatta

SEQ ID NO: 73245 - DNA, 2464 bp, Homo sapiens
tgcgcagaacagctctggtcctcacagccagtgcaccggaggggcgcgctcccgagctggcgcagtttcccagcgcggtgcccgcccctcatcctcctccagtctccctcccctcgccgactgccgccccaggctccgccatggggaatgtgccatccgcggtgaagcactgcctcagctaccagcagcttctccgggagcatctctggatcggggattcagtggcaggggcgctcgaccccgcgcaggaaacatcccagttatctggactccctgagtttgttaaaatagtagaagttgggcctagggatggattgcagaatgaaaaggttatagttcctacagatataaaaattgaatttatcaatcgactttcccaaactggcttgtctgtaatagaagtgactagctttgtgtcttccagatgggtaccacagatggctgatcacactgaagtaatgaaaggcattcatcaatatccaggagttcgctatcctgtccttactcctaatcttcagggttttcaccatgctgttgctgctggagctactgagatatcagtttttggagctgcatctgaatcctttagcaagaagaatattaactgttccattgaagaaagtatgggaaaatttgaggaggttgttaagtctgcaagacacatgaatattccagcacgagggtatgtgtcttgtgctctgggctgtccatatgaaggaagtattacaccgcaaaaagtgacagaagtgtctaagagattgtacggcatgggttgttatgagatctctctaggagacacaattggagtgggaactccaggaagtatgaaaagaatgttggaaagtgtgatgaaagaaatcccaccaggtgctcttgctgttcactgtcatgacacatacggacaagccttagcaaatatccttacggcccttcagatgggaattaatgtggtggactccgcagtatccggattaggtggctgcccttatgcaaaaggtgcttctgggaatgtagccactgaggatttgatatatatgcttaatggcctggggctcaatacaggtgtgaatctatacaaagtgatggaagctggtgactttatttgcaaagctgtgaataaaaccacaaactctaaagtagcacaagcctccttcaatgcttgacttgaatggatttatgacgtaccgttgagaagatcaatttcagctacaatactcatctgaaaatcattaatgccaacttgctctgatatgtgaagtaatggacaagagtgggaaaaaagagatccttttcaaaaagattataactggatagattaagtcaacaaaatgcaatatcagtcatcaggtaaattgcaagctgaggataaataataaaacttgtcataattttgaacttggaaaaaagtttcttttgctctcatagaaataactttttaatttagtagatgggaaaattgacttcgtatttccccaagtatcaaatactgtgttaatacttaatcaagcaggcttaacactgtgtacatattgtcagtagtttatgagctcctgcatagtatgcagagtgtgtggcctcaatattatacattatgcctctggatctcaactactcatttgccaagtcagttatgttatggaccaaaagccaaatctccatctgaccctacataattttagcaatagaacttttatatttcaagtatggctaacatctgttaactatttcagtgactttatctggttccaagaggctgtggccaatggcaagatgccatatcctggaaacatattacgacctcccatgtttgttacatgcatccagtttaccacactttacctgtcatcagttatagtaaaaaccagcatggtgttactcaactattgagaaattgtaagctattttttttgtcctgatgtctaaattgcagtgataagaataggttgatacatgtatcataatctacctttataattttcagatcactttcaaattgcccaaggaaatattgtgatcctaagaatattaagataattttaggttaatgaaatacccattttccttttattcatggtgctttgcttacccacattattttttggtgtattttttagtggttattttagaagttgaagtggctgaaattttgtctattgtcttagaattgattgccagaaattgcaagatgtaatatatcaaagtcagggatgaggagcaggaggactattcaagataaacttctgtaacctatgcatattttatgggggcagtattattacaaatggatctgaaatgtcagttctagtatttagagagacttctctaataataccgggtgatattatctttgagtaaatttgaatataaattgaaacataaaaatgagtattgtgaactttctcggaaatattcattaaaaccattgaaataaaaataaattcaagaaagtaagaagtactgatta

SEQ ID NO: 73246 - DNA, 2093 bp, Homo sapiens
tgcgcagaacagctctggtcctcacagccagtgcaccggaggggcgcgctcccgagctggcgcagtttcccagcgcggtgcccgcccctcatcctcctccagtctccctcccctcgccgactgccgccccaggctccgccatggggaatgtgccatccgcggtgaagcactgcctcagctaccagcagcttctccgggagcatctctgaatcctttagcaagaagaatattaactgttccattgaagaaagtatgggaaaatttgaggaggttgttaagtctgcaagacacatgaatattccagcacgagggtatgtgtcttgtgctctgggctgtccatatgaaggaagtattacaccgcaaaaagtgacagaagtgtctaagagattgtacggcatgggttgttatgagatctctctaggagacacaattggagtgggaactccaggaagtatgaaaagaatgttggaaagtgtgatgaaagaaatcccaccaggtgctcttgctgttcactgtcatgacacatacggacaagccttagcaaatatccttacggcccttcagatgggaattaatgtggtggactccgcagtatccggattaggtggctgcccttatgcaaaaggtgcttctgggaatgtagccactgaggatttgatatatatgcttaatggcctggggctcaatacaggtgtgaatctatacaaagtgatggaagctggtgactttatttgcaaagctgtgaataaaaccacaaactctaaagtagcacaagcctccttcaatgcttgacttgaatggatttatgacgtaccgttgagaagatcaatttcagctacaatactcatctgaaaatcattaatgccaacttgctctgatatgtgaagtaatggacaagagtgggaaaaaagagatccttttcaaaaagattataactggatagattaagtcaacaaaatgcaatatcagtcatcaggtaaattgcaagctgaggataaataataaaacttgtcataattttgaacttggaaaaaagtttcttttgctctcatagaaataactttttaatttagtagatgggaaaattgacttcgtatttccccaagtatcaaatactgtgttaatacttaatcaagcaggcttaacactgtgtacatattgtcagtagtttatgagctcctgcatagtatgcagagtgtgtggcctcaatattatacattatgcctctggatctcaactactcatttgccaagtcagttatgttatggaccaaaagccaaatctccatctgaccctacataattttagcaatagaacttttatatttcaagtatggctaacatctgttaactatttcagtgactttatctggttccaagaggctgtggccaatggcaagatgccatatcctggaaacatattacgacctcccatgtttgttacatgcatccagtttaccacactttacctgtcatcagttatagtaaaaaccagcatggtgttactcaactattgagaaattgtaagctattttttttgtcctgatgtctaaattgcagtgataagaataggttgatacatgtatcataatctacctttataattttcagatcactttcaaattgcccaaggaaatattgtgatcctaagaatattaagataattttaggttaatgaaatacccattttccttttattcatggtgctttgcttacccacattattttttggtgtattttttagtggttattttagaagttgaagtggctgaaattttgtctattgtcttagaattgattgccagaaattgcaagatgtaatatatcaaagtcagggatgaggagcaggaggactattcaagataaacttctgtaacctatgcatattttatgggggcagtattattacaaatggatctgaaatgtcagttctagtatttagagagacttctctaataataccgggtgatattatctttgagtaaatttgaatataaattgaaacataaaaatgagtattgtgaactttctcggaaatattcattaaaaccattgaaataaaaataaattcaagaaagtaagaagtactgatta

SEQ ID NO: 73247 - DNA, 337 bp, Homo sapiens
aaaaagccaaagcctttcaatggctaacagggccctatacaatgccccctacccactacctctctgagtttgtcttttaggactctccctctggcttactcttctgcagccacactgctctcatcatttcttaaaagtcccagggacaagctgtctgaggtttctgctgttgctgtgccctctgtgtagaaggctcttctgctagatattcacatggcctgctctcctattaccttcaggtctttgcacaatgtacaccttctcaatgaggtcttccttgaccattttatttaaaaacagaccaagcccaacactacctaaactcctagaatgcaaa

SEQ ID NO: 73248 - DNA, 264 bp, Homo sapiens
tagtagaaatggggtttcaccatgttggccaggatggtctcgatctcctgacctcgtgatccacccaccttcggcctcccaaagtgctgggattacaggagtgagccactgcgccctgtcggaacacttttcttaatactgaaatatacattttagtagtttcagtcatggttacatgtattagaataaaataattttaatattttgatatactgaagcactttcatgataatatttaggaaactaatcagggtacctctttag

SEQ ID NO: 73249 - DNA, 642 bp, Homo sapiens
cggggagtctgaggcaggagaatcacttgaacctgtgaggtggaggttgcagtgagccgagatcatgccattgcactccagcctggtgacagagtgagaccccatctctaaataaataaataaggcttcattcttttccaccagttccattcatgttttccctatgcccagcacaatgtgctacgaagcataaaagtagaacaaatgacctgtagtagcagagagataggtatacaggtactgaaaccttgatgtacttgtttgaattagatatgtagaaaggataatggaggtagaggagatagaacatctgatggcattgatagcagttaggttaagcatcacaaggattactacaggaactgatacgtgtgtgtgtgtgtgtgtgtgtgtgtgtgtgttttaagtcggatacatgtgcaggtttgttacataggtaaacttgtgtcatgggggtttgttgaacagattatttcatcacccaggtgttaagcctagtactcattagttatttttcctgattctctccctcctctccaccctctgccctacgataggccccattgtgtgttgttcccctctcttcgttcatgttttttcatcatttagctcccgcttataagtgaaaacatactgtatttg

SEQ ID NO: 73250 - DNA, 298 bp, Homo sapiens
attattcgaaaattcaaaatgctcccaattaaaaaattccaaaagaagtcaaaatagcatgaattttaaaatcacagttatgaagactgcataaaaacatgggaaaaagcttgaaatgctggatacaaactgtattcataggatacagaggcatttgcaaaaggatttttaggaaacaggccaaaataagactgactatgatatagagtgggattatgtgtttttttcttttcttctagtatccaaatttcctgcaatatgatttgaagaatattaaaataattatacttaattttaa

SEQ ID NO: 73251 - DNA, 99 bp, Homo sapiens
tgaaaacgaatccccaggatgagagtatttgtagctggggcctttgggaggtgagatcaaatctccagtgaatgggattactgcccttacaatagaagc

SEQ ID NO: 73252 - DNA, 586 bp, Homo sapiens
gcggccgccaggggtccccgctcggcgtccccgcgagacagtcgagccccggccggctgcgcggcgcgctgggtgcatgagggggctgctccggagcgacggcggctgcagctggagccaggcgctcgcccgtccgccggttggctcgccgggacctcgcgcaccggcggcagagtcccttgcgtggattggcaagcgacgccccacctgccccgagctcaccattttctttcgcgctggctgcagctgacccggcgaagggagccgaccgggccctgggctggaggtaaaaccccacggtgagtaagaacccgctccaagctaggggaggcggcgcagcccggtggctgctcgctcccgatctcgcccgggcgggcggcgaggtttggggcgcacctgggcgcgggtgcaagaaggtgcgggaggcggcggaccggtcttctgcccgccggccacgggcttccggggctggagtcctcttcagacccctgccggcgcctgggtttctggccggctcctcgtgtgcacttcccggcaggaacaagggtcgcccactttccaccccgggatcttgatttgtccttga

SEQ ID NO: 73253 - DNA, 462 bp, Homo sapiens
gcggccgccaggggtccccgctcggcgtccccgcgagacagtcgagccccggccggctgcgcggcgcgctgggtgcatgagggggctgctccggagcgacggcggctgcagctggagccaggcgctcgcccgtccgccggttggctcgccgggacctcgcgcaccggcggcagagtcccttgcgtggattggcaagcgacgccccacctgccccgagctcaccattttctttcgcgctggctgcagctgacccggcgaagtttggggcgcacctgggcgcgggtgcaagaaggtgcgggaggcggcggaccggtcttctgcccgccggccacgggcttccggggctggagtcctcttcagacccctgccggcgcctgggtttctggccggctcctcgtgtgcacttcccggcaggaacaagggtcgcccactttccaccccgggatcttgatttgtccttga

SEQ ID NO: 73254 - DNA, 2720 bp, Homo sapiens
gcggccgccaggggtccccgctcggcgtccccgcgagacagtcgagccccggccggctgcgcggcgcgctgggtgcatgagggggctgctccggagcgacggcggctgcagctggagccaggcgctcgcccgtccgccggttggctcgccgggacctcgcgcaccggcggcagagtcccttgcgtggattggcaagcgacgccccacctgccccgagctcaccattttctttcgcgctggctgcagctgacccggcgaagggagccgaccgggccctgggctggaggtaaaaccccacggaaagaacatgaggttcccttggaaatcattcaagaggaagatggaaggggctgtttagaagagcttaaaagctacaggctgtaagactggggcctgagtgctggcagtggaaaacactgttgggctgtgatctctccctgaaaagttccaggtgcctttttgcttcctgcaaaagaaaggaagcgaaagagaagaccatgtccatagccctgaagcaggtattcaacaaggacaagaccttccgacccaagaggaaatttgaacctggcacacagaggtttgagctgcacaaacgggctcaggcatccctcaactcgggtgtggacctgaaggcggctgtgcagttgcccagtggggaggaccagaatgactgggtggcagtacatgtggtggacttcttcaatcggatcaacctcatctatggcaccatctgtgagttctgcaccgagcggacctgtcctgtgatgtcagggggccccaaatatgagtatcggtggcaggatgatctcaagtataagaagccaacagcgctgccagctccccagtacatgaaccttcttatggattggattgaggttcagatcaacaacgaggaaatatttccaacatgcgtgggtgttcccttcccaaagaacttccttcagatctgcaagaagatcctgtgccgccttttccgggtctttgtccacgtctatatccaccacttcgaccgggtcattgtgatgggtgcagaggcccatgtcaacacctgctacaaacacttctattactttgtcacagagatgaacctcatagaccgcaaggagctagagcctttgaaagaaatgacgagcaggatgtgtcactaatgctccacctcaccctttggaagaaaggaaagctgtttcctcctggtgccctgagcgggcaggaggtggaccaccctggctgaaatgacacacctactcccaggaacagcagaggtggaggcaagcagtgactcctgagagacattccccactcactttgtgtgctcttaaccttctgagtgctgctagcccagacctgtggacgaggcagaccacaacgtgaaagaaggaccagccccttgaccgttctggctggggaattgtccacgaggaagcctctgcacttccacacatggcacagttctgcctgtgacctgccgcctaagctttactggaattcaggttttgagactgagatgcgtgttcgtatttttccacttatctgtcttgtcagctggccgacttctctgtgattggttttttaagtgccgggtgaattttggacctctggatgtgcagcaagtttttatgcaataagccttcctttcaggtctctaaaagctcctgctctgatctgtggtttaacactgtgcagggctgtggagctctgagagacctgaacccctacccatcccctgcacctccctactctccctgccgaggcgtccatagcatttccctaataaatagttttatcagggacactccatggggtggcttgtctctgccccaaacagggtcttcacgttctaactgcagggaagagactggttactagcgtaaagctgacaagttaccagttcacctgatcagaatgtattttttataaccaccatcattccttgtctcttcagtggaagatattctttcctgtttcccagaagagagaaataaaagtcctaaataactaagaatgatcagcgggagcgttgggcatgattactgcagtgtttgttctttattaaagacagggagtcgtggctgtctctacataatactaacatttcagtgaaaaaagtacagttggttatttggtacgtgtagatttaacacccagacggctgacttgtaaccctccccactagccttctgagcatttaaacccagccgtcattctctccccactccacgctccccactcctctgccacgttatgttacggcacaaaattaatttctgcccctgtgattgggccacggttgccaaggtaacagtggagctggagctaacttccttctttcatcctttccaatttttctattccagaagacagtcagaataatgcattctgtactacatcctgccttttgaaacctaaatgagttttcgttgatgaaatgttgccttctctgattcattcacaaaactgtggtggttctgaccacctgtgacgaggggggtcataatacttccagtgatccttttaatttagcaaaatatttgtcggtggagggaagtagataagaatgtattagtgtattttaaagtaataatgattaaagaataactaaatgactctgattttgttttatcaatcataatgtgttaaagccctctgtggctgccacaaaagactagaatcatgaaatctttgtccaagctaagaaagggctgtctctgtgggtacagtgg

SEQ ID NO: 73255 - DNA, 2609 bp, Homo sapiens
gcggccgccaggggtccccgctcggcgtccccgcgagacagtcgagccccggccggctgcgcggcgcgctgggtgcatgagggggctgctccggagcgacggcggctgcagctggagccaggcgctcgcccgtccgccggttggctcgccgggacctcgcgcaccggcggcagagtcccttgcgtggattggcaagcgacgccccacctgccccgagctcaccattttctttcgcgctggctgcagctgacccggcgaagggagccgaccgggccctgggctggaggtaaaaccccacggaaagaacatgaggttcccttggaaatcattcaagaggaagatggaaggggctgtttagaagagcttaaaagctacaggctgtaagactggggcctgagtgctggcagtggaaaacactgttgggctgtgatctctccctgaaaagttccaggtgcctttttgcttcctgcaaaagaaaggaagcgaaagagaagaccatgtccatagccctgaagcaggtattcaacaaggacaagaccttccgacccaagaggaaatttgaacctggcacacagaggtttgagctgcacaaacgggctcaggcatccctcaactcgggtgtggacctgaaggcggctgtgcagttgcccagtggggaggaccagaatgactgggtggcagtacatgtggtggacttcttcaatcggatcaacctcatctatggcaccatctgtgagttctgcaccgagcggacctgtcctgtgatgtcagggggccccaaatatgagtatcggtggcaggatgatctcaagtataagaagccaacagcgctgccagctccccagtacatgaaccttcttatggattggattgaggttcagatcaacaacgaggaaatatttccaacatgcgtgggtgttcccttcccaaagaacttccttcagatctgcaagaagatcctgtgccgccttttccgggtctttgtccacgtctatatccaccacttcgaccgggtcattgtgatgggtgcagaggcccatgtcaacacctgctacaaacacttctattactttgtcacagagatgaacctcatagaccgcaaggagctagagcctttgaaagaaatgacgagcaggatgtgtcactaatgctccacctcaccctttggaagaaaggaaagctgtttcctcctggtgccctgagcgggcaggaggtggaccaccctggctgaaatgacacacctactcccaggaacagcagaggtggaggcaagcagtgactcctgagagacattccccactcactttgtgtgctcttaaccttctgagtgctgctagcccagacctgtggacgaggcagaccacaacgtgaaagaaggaccagccccttgaccgttctggctggggaattgtccacgaggaagcctctgcacttccacacatggcacagttctgcctgtgacctgccgcctaagctttactggaattcaggttttgagactgagatgcgtgttcgtatttttccacttatctgtcttgtcagctggccgacttctctgtgattggttttttaagtgccgggtgaattttggacctctggatgtgcagcaagtttttatgcaataagccttcctttcaggtctctaaaagctcctgctctgatctgtggtttaacactgtgcagggctgtggagctctgagagacctgaacccctacccatcccctgcacctccctactctccctgccgaggcgtccatagcatttccctaataaatagttttatcagggacactccatggggtggcttgtctctgccccaaacagggtcttcacgttctaactgcagggaagagactggttactagcgtaaagctgacaagttaccagttcacctgatcagaatgtattttttataaccaccatcattccttgtctcttcagtggaagatattctttcctgtttcccagaagagagaaataaaagtcctaaataactaagaatgatcagcgggagcgttgggcatgattactgcagtgtttgttctttattaaagacagggagtcgtggctgtctctacataatactaacatttcagtgaaaaaagtacagttggttatttggtacgtgtagatttaacacccagacggctgacttgtaaccctccccactagccttctgagcatttaaacccagccgtcattctctccccactccacgctccccactcctctgccacgttatgttacggcacaaaattaatttctgcccctgtgattgggccacggttgccaaggtaacagtggagctggagctaacttccttctttcatcctttccaatttttctattccagaagacagtcagaataatgcattctgtactacatcctgccttttgaaacctaaatgagttttcgttgatgaaatgttgccttctctgattcattcacaaaactgtggtggttctgaccacctgtgacgaggggggtcataatacttccagtgatccttttaatttagcaaaatatttgtcggtggagggaagtagataagaatgtattagtgtattttaaagtaataatgattaaagaataactaaatgactctga

SEQ ID NO: 73256 - DNA, 2686 bp, Homo sapiens
cccccctgggcgtcccaaccctggtgggaacggtgtggtggaggtgtacagtgctgctgcgcccctggctgggagtggaacggtggagatccaggcactggggatgcagccctacccacccccctcctaggtgccaaaccagtgtgtggagcctccagtatatcccacccccacagtgtacagccctggcaaacagggattcaaacccaaaggaccaaaccccgccgcccccatgaccagcgccaccgggggcacggtggccacctttgactctccagcaacgctgaagacccgacgagctaaagctgcagggaagccaaaggctcagaaactcaagtgctcatactgtgacaagtcattcaccaaaaactttgacctgcagcagcacatccgaagccacaccggtgagaagcccttccagtgcattgcatgtggccgtgcctttgcccagaagtctaatgttaagaaacacatgcagacccacaaggtgtggcctccaggacacagtggtggcaccgtgtctcgaaactctgtgaccgtacaggtcatggccctgaaccccagcaggcaggaggacgaggaaagcacagggttgggccagcccctgccgggtgcgccacagccccaggccttgtccacagctggtgaggaagagggggacaagccggagtccaagcaggtggtcctcatcgacagctcctacctgtgccaattctgccccagcaaattcagcacctacttccagctcaagtctcacatgacccagcataagaatgagcaggtgtacaagtgtgtggtcaaaagctgtgcccagacgttcccaaagctcgacacatttctggagcacatcaagagccaccaggaggagctgagctaccgctgccacctctgcggcaaggacttcccctcgctgtacgacctgggcgtgcaccagtactcccacagcctcctgccacagcacagccccaagaaggacaatgccgtctacaagtgtgtcaaatgtgtcaacaaatactccacccctgaggccctggagcaccacctgcagaccgccactcacaacttcccctgcccacactgccagaaggtgtttccttgtgaacgctacctgcggcgtcatctgcccacccacggcagcgggggcaggttcaagtgccaagtgtgcaagaagttcttccggcgggagcattatctcaaactgcatgctcacatccactcgggtgagaagccctacaaatgctcagtgtgcgagtctgcgttcaaccgcaaggacaaactgaagagacacatgttgatccacgagcccttcaagaaatacaaatgccctttctcgacgcacacagactgcagtaaggagttcaaccggccggacaagctgaaggcccacatcctctcccactctggcatgaagctccacaaatgcgccctgtgcagcaagtccttcagccgccgtgcccacctcgccgagcatcagcgcgcccacatgggcaactacaagttccgctgtgctggctgcgccaagggcttttcccgccacaaatacctcaaagatcaccgctgtcgtctcggcccccaaaaggacaaggacctgcaaacccggcggcccccccagaggagggcagccccccgcagttgcggcagtggtgggcgcaaggtgctgacccccttgcctgacccgctggggctggaggagctgaaggacacaggggctgggctggtgcccgaggctgtccccggcaagccgcccttcgcagagccggacgcggtgctgtccatcgttgtgggtggtgcggtgggcgcggaaactgagctggtggtacctggacacgctgaggggctgggctccaacctggctctggcggagctgcaggccggggccgagggcccatgtgccatgctcgctgtgcccgtctacatccaggcctccgagtgacggacctgaggtgtctgtttcctgggcaggcctgatgctcctgtttgggtccagggcccctgggggcagaccggtgatccttaccagtggaagcgagccatcgagccattggcagaaatcctgctgaatgtcattcagaaacctcagcccatggtcgccctcctgtgcccctctcctgccggaaagccctgcaacattctagggttgggggcagggccatccacggtttctgggcagagccatggtggcaggagagagatggctgaagcctgagcagcccagagtcccgctggtctaggctggtggtcggggcccctgggagaggagacagggcattcctccccactctgtctccaggctgcctctgggtagcctctagtctgctgttcttcaggaggcctgccataaactcttcggagtttacgtgttgcaccttttcacagacggttccccacagcatcctcagacagctctgtgatgtagcttttaggaggcactcaggtgtcacggctagactgcagctatgagacagatctggcttcaaatccaagagttgccatgcacttgctgtgtgaccttgggcaagtcacttcacttctctgagccccgtgttcctcatctgtacaatggggcttacgatactactacctcatagggttgtcctggggatccagtatgatgaagtgcgccaggggcttggcatggtgcccggcacgcagaaagtgctcaataaatgtttttgtcataacgtga

SEQ ID NO: 73257 - DNA, 1125 bp, Homo sapiens
cccccctgggcgtcccaaccctggtgggaacggtgtggtggaggtgtacagtgctgctgcgcccctggctgggagtggaacggtggagatccaggcactggggatgcagccctacccacccccctcctaggtgccaaaccagtgtgtggagcctccagtatatcccacccccacagtgtacagccctggcaaacagggattcaaacccaaaggaccaaaccccgccgcccccatgaccagcgccaccgggggcacggtggccacctttgactctccagcaacgctgaagacccgacgagctaaagctgcagggaagccaaaggctcagaaactcaagtgctcatactgtgacaagtcattcaccaaaaactttgacctgcagcagcacatccgaagccacaccggtgagaagcccttccagtgcattgcatgtggccgtgcctttgcccagaagtctaatgttaagaaacacatgcagacccacaaggtgtggcctccaggacacagtggtggcaccgtgtctcgaaactctgtgaccgtacaggtcatggccctgaaccccagcaggcaggaggacgaggaaagcacagggttgggccagcccctgccgggtgcgccacagccccaggccttgtccacagctggtgaggaagagggggacaagccggagtccaagcaggtggtcctcatcgacagctcctacctgtgccaattctgccccagcaaattcagcacctacttccagctcaagtctcacatgacccagcataagaatgagcaggtaggtggatggtggcagcaggggcccacaccacaccagtcgaaacctttcactggtgctagggtcttgaatgctgcctagaaaggggtaggaaccagtgagtcagaccttccacggctctattccccccgggttagattccgagcaggggattgatgaagtaaggttacccttggggcaaatcacagaaaactttgactctcctccagacctgagacagctgactccacccagcgtaaggactctgtgtctttccagctctggtctctgtcatctcagggtgtggccttgacctctcctgatggctcaccttgtactcctgtcctgggatggtgatcacttct

SEQ ID NO: 73258 - DNA, 1283 bp, Homo sapiens
cccccctgggcgtcccaaccctggtgggaacggtgtggtggaggtgtacagtgctgctgcgcccctggctgggagtggaacggtggagatccaggcactggggatgcagccctacccacccccctcctaggtgccaaaccagtgtgtggagcctccagtatatcccacccccacagtgtacagccctggcaaacagggattcaaacccaaaggaccaaaccccgccgcccccatgaccagcgccaccgggggcacggtggccacctttgactctccagcaacgctgaagacccgacgagctaaagctgcagggaagccaaaggctcagaaactcaagtgctcatactgtgacaagtcattcaccaaaaactttgacctgcagcagcacatccgaagccacaccggtgagaagcccttccagtgcattgcatgtggccgtgcctttgcccagaagtctaatgttaagaaacacatgcagacccacaaggtgtggcctccaggacacagtggtggcaccgtgtctcgaaactctgtgaccgtacaggtcatggccctgaaccccagcaggcaggaggacgaggaaagcacagggttgggccagcccctgccgggtgcgccacagccccaggccttgtccacagctggtgaggaagagggggacaagccggagtccaagcaggtggtcctcatcgacagctcctacctgtgccaattctgccccagcaaattcagcacctacttccagctcaagtctcacatgacccagcataagaatgagcaggtgtacaagtgtgtggtcaaaagctgtgcccagacgttcccaaagctcgacacatttctggagcacatcaagagccaccaggaggagctgagctaccgctgccacctctgcggcaaggacttcccctcgctgtacgacctgggcgtgcaccagtactcccacagcctcctgccacagcacagccccaagaaggacaatgccgtctacaagtgtttccttgtgaacgctacctgcggcgtcatctgcccacccacggcagcgggggcaggttcaagtgccaagtgtgcaagaagttcttccggcgggagcattatctcaaactgcatgctcacatccactcgggtgagaagccctacaaatgctcagtgtgcgagtctgcgttcaaccgcaaggacaaactgaagagacacatgttgatccacgtatgatgaagtgcgccaggggcttggcatggtgcccggcacgcagaaagtgctcaataaatgtttttgtcataacgtga

SEQ ID NO: 73259 - DNA, 435 bp, Homo sapiens
cccccctgggcgtcccaaccctggtgggaacggtgtggtggaggtgtacagtgctgctgcgcccctggctgggagtggaacggtggagatccaggcactggggatgcagccctacccacccctagaggtgagcagagggggcagggtggaagaggacactggtcatggacatcatggccaacccggacccatcctgagcaccagctgtgtgccagacactgtgctggggataccatgaaaaccagacccggtcctggccttcatggggtgtaccacatcacaggggagaaggactttaatcaaagcatcacacccacagatgtaagatgcaagccatgagaaggtggaatggagtacaggttgtagcagaaatataagctgcctgcaggtaatgctcagaacagtcagagaatgcctaccttttcaggcaaaaaa

SEQ ID NO: 73260 - DNA, 1380 bp, Homo sapiens
cccccctgggcgtcccaaccctggtgggaacggtgtggtggaggtgtacagtgctgctgcgcccctggctgggagtggaacggtggagatccaggcactggggatgcagccctacccacccccctcctaggtgccaaaccagtgtgtggagcctccagtatatcccacccccacagtgtacagccctggcaaacagggattcaaacccaaaggaccaaaccccgccgcccccatgaccagcgccaccgggggcacggtggccacctttgactctccagcaacgctgaagacccgacgagctaaagctgcagggaagccaaaggctcagaaactcaagtgctcatactgtgacaagtcattcaccaaaaactttgacctgcagcagcacatccgaagccacaccggtgagaagcccttccagtgcattgcatgtggccgtgcctttgcccagaagtctaatgttaagaaacacatgcagacccacaaggtgtggcctccaggacacagtggtggcaccgtgtctcgaaactctgtgaccgtacaggtcatggccctgaaccccagcaggcaggaggacgaggaaagcacagggttgggccagcccctgccgggtgcgccacagccccaggccttgtccacagctggtgaggaagagggggacaagccggagtccaagcaggtggtcctcatcgacagctcctacctgtgccaattctgccccagcaaattcagcacctacttccagctcaagtctcacatgacccagcataagaatgagcaggtgtacaagtgtgtggtcaaaagctgtgcccagacgttcccaaagctcgacacatttctggagcacatcaagagccaccaggaggagctgagctaccgctgccacctctgcggcaaggacttcccctcgctgtacgacctgggcgtgcaccagtactcccacagcctcctgccacagcacagccccaagaaggacaatgccgtctacaagtgtgtcaaatgtgtcaacaaatactccacccctgaggccctggagcaccacctgcagaccgccactcacaacttcccctgcccacactgccagaaggtgtttccttgtgaacgctacctgcggcgtcatctgcccacccacggcagcgggggcaggttcaagtgccaagtgtgcaagaagttcttccggcgggagcattatctcaaactgcatgctcacatccactcgggtgagaagccctacaaatgctcagtgtgcgagtctgcgttcaaccgcaaggacaaactgaagagacacatgttgatccacgtatgatgaagtgcgccaggggcttggcatggtgcccggcacgcagaaagtgctcaataaatgtttttgtcataacgtga

SEQ ID NO: 73261 - DNA, 289 bp, Homo sapiens
ggcaaacagggattcaaacccaaaggaccaaaccccgccgcccccatgaccagcgccaccgggggcacggtggccacctttgactctccagcaacgctgaagacccgacgagctaaaggtgccaggggactcccggaaggtgggcccccagcctgccatgggcatctttcctcaacattggccaatccacaagctacttggttctggtcttcccttttatggttgttcaagtttggttgcatgtaatagaaaattcaaaatatcaatgacttcaaaatgatagaatttt

SEQ ID NO: 73262 - DNA, 623 bp, Homo sapiens
actttaaacaggtgaattgtttaaatctcagctgtttgggggaaagaaaaaaacaggttgggcttgataacctaaaatcctggacctgaataaaatataaatataagtcaggctggaaaactggacagcagggaaatcagagttgtaatcaattcctcatgtattccctcaggtcaccggaactgtcctcctcttctcaaaatagttggggagcaaggaatcatggatgtccttccacaattaatgactgaagactgtgcttgggaaatgtgtccatgaactccctgctctgaaggggtagttatgcacatcactagttttttgttagttttacatgttattgtgggaaaagttaaaaatataaaaaagacaaatgtttaactacccagcttcaacccatggccaggcttgtttcatctatatccccccccattccccccacccccatcctgtattaatttgaagcaaattccagacgtggcatcatttctttttttctttttcttttttttttttttgagacggagttttgctcttgtcatccaggctggagggcaatggcaggatctcagctcactgcaacctccgcctcctgagttcaagtgattctcctgcctcggcct

SEQ ID NO: 73263 - DNA, 363 bp, Homo sapiens
ctgagttaatctctagtttctctttcttgagatctgttcatgcctgcctggtcttcctttggttaggatcttttcttaccctttatatttctcaagtggtgaggttgaaatgttccgtgaactgtagcacaggtgtttatttaatcatccacatggtttcctcagagtctttcaatcttgacttgggatgaataggttacacctcaaatttctttaaagtcagtggaggcggcacagctctctccaaggaaatcgtcttcaaatatcatccaatttcttattttctaaaagtgggtgagggatttaaaggttatctaattttttaaaaagtttctcagatttctctaaaatttgcatcgtatt

SEQ ID NO: 73264 - DNA, 1643 bp, Homo sapiens
ctcccgtagtcgtagttcccgtagtatggcggcccctgccgccgccaccgccatgggcaacgcccccgccaagaaggacaccgagcaggaggagagcgtgaacgagttcctagccaaagccagaggagatttcctctacagatggggaaaccccgctcaaaacaccgccagctcggatcagttcgaacggctcaggacgctgggcatgggctccttcgggcgggtgatgctggtgaggcaccaggagaccggcggccactacgccatgaagatcctcaacaagcagaaggtggtgaagatgaagcaggtcgagcacatactgaacgagaagcgcatcctgcaggcgatcgactttccgttcctcgtcaagctccagttctcctttaaggacaactcctacctgtacctggtgatggagtacgtgccgggtggggagatgttctcccgcctacagcgcgtcggaaggtttagcgagccccatgcctgtttctatgccgcccaggtcgtcctggccgtccagtacctacactcgctcgacctcatccaccgcgacctgaagcccgagaatctcctcatcgaccagcagggctacctgcaggtgacggacttcggtttcgccaagcgcgtgaagggccgcacttggaccttgtgcgggaccccagagtacctggcccccgagatcatcctgagcaaaggctacaacaaggccgtggactggtgggccctaggggtgctcatctatgagatggccgtgggcttcccacccttctacgccgaccagcccatccagatctacgagaagatcgtctctgggagggtgcggtttccctccaaactcagctctgacctcaaggatctgctgcggagcctgctgcaggtggacctcaccaagcgcttcggaaacctcaggaacggggttggcgacatcaagaaccacaagtggttcgccacaaccagctggatcgccatctatgagaagaaggtggaagctcccttcatcccgaagtacacaggccctggggatgccagtaactttgacgactacgaggaggaagagctccggatctccatcaatgagaagtgtgccaaggagttttctgagttttaggggtgtgcttgtgcccctgtgggttttctttcctttttgtttttggtggtttgggggatgggagggttggattgaacagccagagggccccagagttccttgtatctaatttcatcctcaccccaccctccagggttgggggagcaggaagcccagatatttggaggaacagaaacaccagctgctccctcacccccccccatgccttcctggtccctctgtgcttctctctttctcctcccacaggtcccccttgccccagcccccttctgcctgttttaaacgagtttctcagctctattcaggccaggtcttgctgttgtatcaagggacacggtgtggaaagaggggctcaaacttaactccagccctgaacaggcaccacttactaagagaggatgaatgaaaagcacacctaccctttggcgtaatcctgcctgggaaggagagaggtttagtgccatgttcagtgggctgtttgctagaataaaaaattaaaacaaaaaacaattaaaatcttatttaagttccacca

SEQ ID NO: 73265 - DNA, 978 bp, Homo sapiens
  misc_feature (753)..(753): n is a, c, g, or t
  misc_feature (757)..(757): n is a, c, g, or t
  misc_feature (761)..(761): n is a, c, g, or t
gcctatctacatgagaactggcaactctaatttaccccgaagcctttctgcaggagattcaaatatttgctaatgcttactgataccttcactggttagatcgaggcattccccaccccatctgaaaaatgtttaccagaagaaataactcctcagtttgggtaatccaaaagcctgtaaagtgacaatggcccatctttcacagcaggtgtaacccaacacctatcctcagctttaagaatccaatattaccttcactctgctggagaccgcagtcctctggaaaggtgaaagggctaatcctaaagaagactctagctaaatcagaggcctgactatctctaatacccatagcttactgcgggtttgaactgctccaaagtaaaacgtataattaagtcctgttgagttaacatgtggaaggcctttcctaacgacagatctcctaatagatgaaaagactcatcaattacaaaaatatgtcatcaatctgggacaggtgcaaaggcactctgaatatggaaacaagcgtcttcccctcccacatgggaggaaaattcagtttcagctcagctagggatttagtcttactaaagacgtgggaggaagttctccagctgagcagctttccccaacgtggaaaggaccacgcaaggacacctgagttctccaacagatgttcaacaccaggggattcacagttctgggaggtgatctctgatgaacattgcatcgactccgtgactacacggngacngcanctgccggtgaccagttaaggcacaacggcagcagggtgacccgcctgacgacgtaccgtcacagcacactagtgcacaacgctgctccctcgatcaacactataccaacatgtgtcaacttacaaccacacatgccaaacacatatcctaaagatattgcaacataacaccgatagcaaaacataaagctaaggacacaacactcacacacattgca

SEQ ID NO: 73266 - DNA, 476 bp, Homo sapiens
gtttaaggcattctcaccaccacaaatggctgtggcagtacattcacatttatagttgtcagggcatttatagttggttagggacttgtcctttataaaactacttcaaccaatcttgctctcatctttcttttgattttgggttacttttttacattagagactaaatgtaggctaatggatgagacttcagggagaaacagaaaatgggaagttttaatcagggttgtaagctgaaaggaatattttaacttgaattgcccagtataaatatacatagataaaccaaaagcaaaaaagatttggaacctctctatttgctgcatttatgcataagaaagcctagctaaaatcagattctcttatcaacagtaatctatatgcttttcccaattaaaagaactttaacactccagtgggtgttgtgatgaatgactactgatatcattcaaccacattaattcacccaatatgtc

SEQ ID NO: 73267 - DNA, 267 bp, Homo sapiens
gcggccgcctactactactactactgctcgaattcaagcttctaacgatgtacggggtcatgtgaatactactatgtagaaataaaacctagaccttgagcgaacatctgtatattggttgaaaacgatagtggtaaccattgatcccccttcatttgatgtttggaaaattccagtaattatcatttttgcaacgaatatggataccacatagtactttggtgttacctgcttttgaaaaataaagtctttggttcacccggtgaa

SEQ ID NO: 73268 - DNA, 1017 bp, Homo sapiens
gcccttttctcggggcgcccgagaggccagctcagacctcccggctcgacaggcggcgcgggcggcggtaaaatgtcggttccaggaccttaccaggcggccactgggccttcctcagcaccatccgcacctccatcctatgaagagacagtggctgttaacagttattaccccacacctccagctcccatgcctgggccaactacggggcttgtgacggggcctgatgggaagggcatgaatcctccttcgtattatacccagccagcgcccatccccaataacaatccaattaccgtgcagacggtctacgtgcagcaccccatcacctttttggaccgccctatccaaatgtgttgtccttcctgcaacaagatgatcgtgagtcagctgtcctataacgccggtgctctgacctggctgtcctgcgggagcctgtgcctgctggggtgcatagcgggctgctgcttcatccccttctgcgtggatgccctgcaggacgtggaccattactgtcccaactgcagagctctcctgggcacctacaagcgtttgtaggactcagccagacgtggagggagccgggtgccgcaggaagtcctttccacctctcatccagcttcacgcctggtggaggttctgccctggtggtctcacctctccagggggcccaccttcatgtcttcttttggggggaatacgtcgcaaaactaacaaatctccaaaccccagaaattgctgcttggagtcgtgcataggacttgcaaagacattccccttgagtgtcagttccacggtttcctgcctccctgagaccctgagtcctgccatctaactgtgatcattgccctatccgaatatcttcctgtgatctgccaccggtcccggcctcggggggggctcactgaaccacgtcgcttttcgcaggtgccgcgtcggtaacgattagcccgacataagagctccgcgtgaaactttcactacggcgggatgccggacaacagctctatatcacgg

SEQ ID NO: 73269 - DNA, 530 bp, Homo sapiens
  misc_feature (11)..(11): n is a, c, g, or t
  misc_feature (13)..(14): n is a, c, g, or t
  misc_feature (17)..(17): n is a, c, g, or t
gcacagaaatnanntcntaggtgcgaggcctgggtgttgagaggccagctcagacctcccggctcgacaggcggcgcgggcggcggtaaaatgtcggttccaggaccttaccaggcggccactgggccttcctcagcaccatccgcacctccatcctatgaagagacagtggctgttaacagttattaccccacacctccagctcccatgcctgggccaactacggggcttgtgacggggcctgatgggaagggcatgaatcctccttcgtattatacccagccagcgcccatccccaataacaatccaattaccgtgcagacggtctacgtgcagcaccccatcacctttttggaccgccctatccaaatgtgttgtccttcctgcaacaagatgatcgtgagtcagctgtcctataacgccggtgctctgacctggctgtcctgcgggagcctgtgcctgctggggtgagtctgcctcccacttggccccaagccatcctgcccttctctctgggtgctggcgggggt

SEQ ID NO: 73270 - DNA, 2289 bp, Homo sapiens
  misc_feature (2208)..(2208): n is a, c, g, or t
gcccttttctcggggcgcccgagaggccagctcagacctcccggctcgacaggcggcgcgggcggcggtaaaatgtcggttccaggaccttaccaggcggccactgggccttcctcagcaccatccgcacctccatcctatgaagagacagtggctgttaacagttattaccccacacctccagctcccatgcctgggccaactacggggcttgtgacggggcctgatgggaagggcatgaatcctccttcgtattatacccagccagcgcccatccccaataacaatccaattaccgtgcagacggtctacgtgcagcaccccatcacctttttggaccgccctatccaaatgtgttgtccttcctgcaacaagatgatcgtgagtcagctgtcctataacgccggtgctctgacctggctgtcctgcgggagcctgtgcctgctggggtgcatagcgggctgctgcttcatccccttctgcgtggatgccctgcaggacgtggaccattactgtcccaactgcagagctctcctgggcacctacaagcgtttgtaggactcagccagacgtggagggagccgggtgccgcaggaagtcctttccacctctcatccagcttcacgcctggtggaggttctgccctggtggtctcacctctccagggggcccaccttcatgtcttcttttggggggaatacgtcgcaaaactaacaaatctccaaaccccagaaattgctgcttggagtcgtgcataggacttgcaaagacattccccttgagtgtcagttccacggtttcctgcctccctgagaccctgagtcctgccatctaactgtgatcattgccctatccgaatatcttcctgtgatctgccatcagtggctcttttttcctgcttccatgggcctttctggtggcagtctcaaactgagaagccacagttgccttatttttgaggctgttctgcccagagctcggctgaaccagcctttagtgcctaccattatcttatccgtctcttcccgtccctgatgacaaagatcttgccttacagactttacaggcttggctttgagattctgtaactgcagacttcattagcacacagattcactttaatttcttaatttttttttttaaatacaaggagggggctattaacacccagtacagacatatccacaaggtcgtaaatgcatgctagaaaaatagggctggatcttatcactgccctgtctccccttgtttctctgtgccagatcttcagtgcccctttccatacagggatttttttctcatagagtaattatatgaacagtttttatgacctccttttggtctgaaatacttttgaacagaatttcttttttttaaaaaaaaacagagatggggtcttactatgttgcccaggctggtgtcgaactcctgggctcaagcgatccttctgccttggcctcccgaagtgctgggattgcaggcataagctaccatgctgggcctgaacataatttcaagaggaggatttataaaaccattttctgtaatcaaatgattggtgtcattttcccatttgccaatgtagtctcacttaaaaaaaaaaaaaagaaaaagaaatggataatttcatctactgcctttacttggggttaatgtgattcttaaacaccttcatcatggaactctcagagtggggtccgttttggtttcctggtggtgggttttgaaagataagggaaagcacattttgagcatgtctgggtaccatggtgcggatgcttgggaaccagaactgtttcagaggaatctaaagtctgattttagttttcagagacacagcttgttgtaaaacatgagaagacatgatttctaggactcaagcagcaagccaggattctaggttggctgctgtgtcatctttgaagtcaagacaaagctgggctcgaccttcaagggtcctcgttttgataatacttcagaatagggaactcatgtgaatactactatgtagaaataaaacctagaccttgagcgaacatctgtatattggttgaaaacgatagtggtaaccattgatcccccttcatttgatgtttggaaaattccagtaattatcatttttgcaacgaatatggataccacatagtactttggtgttacctgcttttgaaaaataaagtctttggttcacccggtgaaaaaaaaaanaaaaaaaaaaaaaaaaaaaatttggggggggtggggccggggaaaagtttttaaaaaatttggtgggggggggggcccagt

SEQ ID NO: 73271 - DNA, 2634 bp, Homo sapiens
  misc_feature (2208)..(2208): n is a, c, g, or t
  misc_feature (2272)..(2272): n is a, c, g, or t
  misc_feature (2288)..(2288): n is a, c, g, or t
  misc_feature (2299)..(2299): n is a, c, g, or t
  misc_feature (2303)..(2303): n is a, c, g, or t
  misc_feature (2307)..(2307): n is a, c, g, or t
  misc_feature (2492)..(2492): n is a, c, g, or t
gcccttttctcggggcgcccgagaggccagctcagacctcccggctcgacaggcggcgcgggcggcggtaaaatgtcggttccaggaccttaccaggcggccactgggccttcctcagcaccatccgcacctccatcctatgaagagacagtggctgttaacagttattaccccacacctccagctcccatgcctgggccaactacggggcttgtgacggggcctgatgggaagggcatgaatcctccttcgtattatacccagccagcgcccatccccaataacaatccaattaccgtgcagacggtctacgtgcagcaccccatcacctttttggaccgccctatccaaatgtgttgtccttcctgcaacaagatgatcgtgagtcagctgtcctataacgccggtgctctgacctggctgtcctgcgggagcctgtgcctgctggggtgcatagcgggctgctgcttcatccccttctgcgtggatgccctgcaggacgtggaccattactgtcccaactgcagagctctcctgggcacctacaagcgtttgtaggactcagccagacgtggagggagccgggtgccgcaggaagtcctttccacctctcatccagcttcacgcctggtggaggttctgccctggtggtctcacctctccagggggcccaccttcatgtcttcttttggggggaatacgtcgcaaaactaacaaatctccaaaccccagaaattgctgcttggagtcgtgcataggacttgcaaagacattccccttgagtgtcagttccacggtttcctgcctccctgagaccctgagtcctgccatctaactgtgatcattgccctatccgaatatcttcctgtgatctgccatcagtggctcttttttcctgcttccatgggcctttctggtggcagtctcaaactgagaagccacagttgccttatttttgaggctgttctgcccagagctcggctgaaccagcctttagtgcctaccattatcttatccgtctcttcccgtccctgatgacaaagatcttgccttacagactttacaggcttggctttgagattctgtaactgcagacttcattagcacacagattcactttaatttcttaatttttttttttaaatacaaggagggggctattaacacccagtacagacatatccacaaggtcgtaaatgcatgctagaaaaatagggctggatcttatcactgccctgtctccccttgtttctctgtgccagatcttcagtgcccctttccatacagggatttttttctcatagagtaattatatgaacagtttttatgacctccttttggtctgaaatacttttgaacagaatttcttttttttaaaaaaaaacagagatggggtcttactatgttgcccaggctggtgtcgaactcctgggctcaagcgatccttctgccttggcctcccgaagtgctgggattgcaggcataagctaccatgctgggcctgaacataatttcaagaggaggatttataaaaccattttctgtaatcaaatgattggtgtcattttcccatttgccaatgtagtctcacttaaaaaaaaaaaaaagaaaaagaaatggataatttcatctactgcctttacttggggttaatgtgattcttaaacaccttcatcatggaactctcagagtggggtccgttttggtttcctggtggtgggttttgaaagataagggaaagcacattttgagcatgtctgggtaccatggtgcggatgcttgggaaccagaactgtttcagaggaatctaaagtctgattttagttttcagagacacagcttgttgtaaaacatgagaagacatgatttctaggactcaagcagcaagccaggattctaggttggctgctgtgtcatctttgaagtcaagacaaagctgggctcgaccttcaagggtcctcgttttgataatacttcagaatagggaactcatgtgaatactactatgtagaaataaaacctagaccttgagcgaacatctgtatattggttgaaaacgatagtggtaaccattgatcccccttcatttgatgtttggaaaattccagtaattatcatttttgcaacgaatatggataccacatagtactttggtgttacctgcttttgaaaaataaagtctttggttcacccggtgaaaaaaaaaanaaaaaaaaaaaaaaaaaaaaaaaaaaaaaaaaaaaaaaaaaaaaaaaaaaaaaaaaaaaaaaanaaaaaaaaaaaaaaanaaataaaaaanaaanaaanaaaaatataattaaatttttatatatttaaaatttatattttatttttaatttaatttatataaatattaaaatttaattaattattttttttattatttttttatctatttttttttttttaaaaaatttttttttttattttatttattttattaattttttaattaatataatcttttttanttatttattaacattattaaaattttttttttttaaatattttttttaataaaaatttttatattattcattattttttttttaaattcttttcttccccatttctctctctctttctcatctatctttcctttctcctctc

SEQ ID NO: 73272 - DNA, 2475 bp, Homo sapiens
gcccttttctcggggcgcccgagaggccagctcagacctcccggctcgacaggcggcgcgggcggcggtaaaatgtcggttccaggaccttaccaggcggccactgggccttcctcagcaccatccgcacctccatcctatgaagagacagtggctgttaacagttattaccccacacctccagctcccatgcctgggccaactacggggcttgtgacggggcctgatgggaagggcatgaatcctccttcgtattatacccagccagcgcccatccccaataacaatccaattaccgtgcagacggtctacgtgcagcaccccatcacctttttggaccgccctatccaaatgtgttgtccttcctgcaacaagatgatcgtgagtcagctgtcctataacgccggtgctctgacctggctgtcctgcgggagcctgtgcctgctggggtgcatagcgggctgctgcttcatccccttctgcgtggatgccctgcaggacgtggaccattactgtcccaactgcagagctctcctgggcacctacaagcgtttgtaggactcagccagacgtggagggagccgggtgccgcaggaagtcctttccacctctcatccagcttcacgcctggtggaggttctgccctggtggtctcacctctccagggggcccaccttcatgtcttcttttggggggaatacgtcgcaaaactaacaaatctccaaaccccagaaattgctgcttggagtcgtgcataggacttgcaaagacattccccttgagtgtcagttccacggtttcctgcctccctgagaccctgagtcctgccatctaactgtgatcattgccctatccgaatatcttcctgtgatctgccatcagtggctcttttttcctgcttccatgggcctttctggtggcagtctcaaactgagaagccacagttgccttatttttgaggctgttctgcccagagctcggctgaaccagcctttagtgcctaccattatcttatccgtctcttcccgtccctgatgacaaagatcttgccttacagactttacaggcttggctttgagattctgtaactgcagacttcattagcacacagattcactttaatttcttaatttttttttttaaatacaaggagggggctattaacacccagtacagacatatccacaaggtcgtaaatgcatgctagaaaaatagggctggatcttatcactgccctgtctccccttgtttctctgtgccagatcttcagtgcccctttccatacagggatttttttctcatagagtaattatatgaacagtttttatgacctccttttggtctgaaatacttttgaacagaatttcttttttttaaaaaaaaacagagatggggtcttactatgttgcccaggctggtgtcgaactcctgggctcaagcgatccttctgccttggcctcccgaagtgctgggattgcaggcataagctaccatgctgggcctgaacataatttcaagaggaggatttataaaaccattttctgtaatcaaatgattggtgtcattttcccatttgccaatgtagtctcacttaaaaaaaaaaaaaagaaaaagaaatggataatttcatctactgcctttacttggggttaatgtgattcttaaacaccttcatcatggaactctcagagtggggtccgttttggtttcctggtggtgggttttgaaagataagggaaagcacattttgagcatgtctgggtaccatggtgcggatgcttgggaaccagaactgtttcagaggaatctaaagtctgattttagttttcagagacacagcttgttgtaaaacatgagaagacatgatttctaggactcaagcagcaagccaggattctaggttggctgctgtgtcatctttgaagtcaagacaaagctgggctcgaccttcaagggtcctcgttttgataatacttcagaatagggaactcatgtgaatactactatgtagaaataaaacctagaccttgagcgaacatctgtatattggttgaaaacgatagtggtaaccattgatcccccttcatttgatgtttggaaaattccagtaattatcatttttgcaacgaatatggataccacatagtactttggtgttacctgcttttgaaaaataaagtctttggttcacccggtgaaactatttatgagttcttttggtgtgaagaaagggctcatgttgcatttccagccattgctacaaagaacctttatttgttcagtaacggtagaaaatccttcccgattaaaaacttcagacttgctgaatatcctgcaatgtcaagatgaccgatgttgagttgggtggatttgctaacgagtcagatttgaacatgaggctattggaacccaataggcgtcattgatggcggcaagccatagctttcaagttttaataaaatgcacaaaagagaa

SEQ ID NO: 73273 - DNA, 2699 bp, Homo sapiens
gcccttttctcggggcgcccgagaggccagctcagacctcccggctcgacaggcggcgcgggcggcggtaaaatgtcggttccaggaccttaccaggcggccactgggccttcctcagcaccatccgcacctccatcctatgaagagacagtggctgttaacagttattaccccacacctccagctcccatgcctgggccaactacggggcttgtgacggggcctgatgggaagggcatgaatcctccttcgtattatacccagccagcgcccatccccaataacaatccaattaccgtgcagacggtctacgtgcagcaccccatcacctttttggaccgccctatccaaatgtgttgtccttcctgcaacaagatgatcgtgagtcagctgtcctataacgccggtgctctgacctggctgtcctgcgggagcctgtgcctgctggggtgcatagcgggctgctgcttcatccccttctgcgtggatgccctgcaggacgtggaccattactgtcccaactgcagagctctcctgggcacctacaagcgtttgtaggactcagccagacgtggagggagccgggtgccgcaggaagtcctttccacctctcatccagcttcacgcctggtggaggttctgccctggtggtctcacctctccagggggcccaccttcatgtcttcttttggggggaatacgtcgcaaaactaacaaatctccaaaccccagaaattgctgcttggagtcgtgcataggacttgcaaagacattccccttgagtgtcagttccacggtttcctgcctccctgagaccctgagtcctgccatctaactgtgatcattgccctatccgaatatcttcctgtgatctgccatcagtggctcttttttcctgcttccatgggcctttctggtggcagtctcaaactgagaagccacagttgccttatttttgaggctgttctgcccagagctcggctgaaccagcctttagtgcctaccattatcttatccgtctcttcccgtccctgatgacaaagatcttgccttacagactttacaggcttggctttgagattctgtaactgcagacttcattagcacacagattcactttaatttcttaatttttttttttaaatacaaggagggggctattaacacccagtacagacatatccacaaggtcgtaaatgcatgctagaaaaatagggctggatcttatcactgccctgtctccccttgtttctctgtgccagatcttcagtgcccctttccatacagggatttttttctcatagagtaattatatgaacagtttttatgacctccttttggtctgaaatacttttgaacagaatttcttttttttaaaaaaaaacagagatggggtcttactatgttgcccaggctggtgtcgaactcctgggctcaagcgatccttctgccttggcctcccgaagtgctgggattgcaggcataagctaccatgctgggcctgaacataatttcaagaggaggatttataaaaccattttctgtaatcaaatgattggtgtcattttcccatttgccaatgtagtctcacttaaaaaaaaaaaaaagaaaaagaaatggataatttcatctactgcctttacttggggttaatgtgattcttaaacaccttcatcatggaactctcagagtggggtccgttttggtttcctggtggtgggttttgaaagataagggaaagcacattttgagcatgtctgggtaccatggtgcggatgcttgggaaccagaactgtttcagaggaatctaaagtctgattttagttttcagagacacagcttgttgtaaaacatgagaagacatgatttctaggactcaagcagcaagccaggattctaggttggctgctgtgtcatctttgaagtcaagacaaagctgggctcgaccttcaagggtcctcgttttgataatacttcagaatagggaactcatgtgaatactactatgtagaaataaaacctagaccttgagcgaacatctgtatattggttgaaaacgatagtggtaaccattgatcccccttcatttgatgtttggaaaattccagtaattatcatttttgcaacgaatatggataccacatagtactttggtgttacctgcttttgaaaaataaagtctttggttcacccggtgaaactatttatgagttcttttggtgtgaagaaagggctcatgttgcatttccagccattgctacaaagaacctttatttgttcagtaacggtagaaaatccttcccgattaaaaacttcagacttgctgaatatcctgcaatgtcaagatgaccgatgttgagttgggtggatttgctaacgagtcagatttgaacatgaggctattggaacccaataggcgtcattgatggcggcaagccatagctttcaagttttaataaaatgcacaaaagagaaacaacaacagccaaaaaccattttgttgggcccgcatggcgcccttaaagagagtgtttgaacacattccgttgggcgccggcccattaggttgtggaacgtgtgccaggccggtcccagagaaaacccgggcctgacactgggtctgggttttcccccataaaaaagcccggggaaccggggtttgtgacacccgatgggtccggggccctccgggtcttacg

SEQ ID NO: 73274 - DNA, 2645 bp, Homo sapiens
gcccttttctcggggcgcccgagaggccagctcagacctcccggctcgacaggcggcgcgggcggcggtaaaatgtcggttccaggaccttaccaggcggccactgggccttcctcagcaccatccgcacctccatcctatgaagagacagtggctgttaacagttattaccccacacctccagctcccatgcctgggccaactacggggcttgtgacggggcctgatgggaagggcatgaatcctccttcgtattatacccagccagcgcccatccccaataacaatccaattaccgtgcagacggtctacgtgcagcaccccatcacctttttggaccgccctatccaaatgtgttgtccttcctgcaacaagatgatcgtgagtcagctgtcctataacgccggtgctctgacctggctgtcctgcgggagcctgtgcctgctggggtgcatagcgggctgctgcttcatccccttctgcgtggatgccctgcaggacgtggaccattactgtcccaactgcagagctctcctgggcacctacaagcgtttgtaggactcagccagacgtggagggagccgggtgccgcaggaagtcctttccacctctcatccagcttcacgcctggtggaggttctgccctggtggtctcacctctccagggggcccaccttcatgtcttcttttggggggaatacgtcgcaaaactaacaaatctccaaaccccagaaattgctgcttggagtcgtgcataggacttgcaaagacattccccttgagtgtcagttccacggtttcctgcctccctgagaccctgagtcctgccatctaactgtgatcattgccctatccgaatatcttcctgtgatctgccatcagtggctcttttttcctgcttccatgggcctttctggtggcagtctcaaactgagaagccacagttgccttatttttgaggctgttctgcccagagctcggctgaaccagcctttagtgcctaccattatcttatccgtctcttcccgtccctgatgacaaagatcttgccttacagactttacaggcttggctttgagattctgtaactgcagacttcattagcacacagattcactttaatttcttaatttttttttttaaatacaaggagggggctattaacacccagtacagacatatccacaaggtcgtaaatgcatgctagaaaaatagggctggatcttatcactgccctgtctccccttgtttctctgtgccagatcttcagtgcccctttccatacagggatttttttctcatagagtaattatatgaacagtttttatgacctccttttggtctgaaatacttttgaacagaatttcttttttttaaaaaaaaacagagatggggtcttactatgttgcccaggctggtgtcgaactcctgggctcaagcgatccttctgccttggcctcccgaagtgctgggattgcaggcataagctaccatgctgggcctgaacataatttcaagaggaggatttataaaaccattttctgtaatcaaatgattggtgtcattttcccatttgccaatgtagtctcacttaaaaaaaaaaaaaagaaaaagaaatggataatttcatctactgcctttacttggggttaatgtgattcttaaacaccttcatcatggaactctcagagtggggtccgttttggtttcctggtggtgggttttgaaagataagggaaagcacattttgagcatgtctgggtaccatggtgcggatgcttgggaaccagaactgtttcagaggaatctaaagtctgattttagttttcagagacacagcttgttgtaaaacatgagaagacatgatttctaggactcaagcagcaagccaggattctaggttggctgctgtgtcatctttgaagtcaagacaaagctgggctcgaccttcaagggtcctcgttttgataatacttcagaatagggaactcatgtgaatactactatgtagaaataaaacctagaccttgagcgaacatctgtatattggttgaaaacgatagtggtaaccattgatcccccttcatttgatgtttggaaaattccagtaattatcatttttgcaacgaatatggataccacatagtactttggtgttacctgcttttgaaaaataaagtctttggttcacccggtgaaactatttatgagttcttttggtgtgaagaaagggctcatgttgcatttccagccattgctacaaagaacctttatttgttcagtaacggtagaaaatccttcccgatttgggtggatttgctaacgagtcagatttgaacatgaggctattggaacccaataggcgtcattgatggcggcaagccatagctttcaagttttaataaaatgcacaaaagagaaacaacaacagccaaaaaccattttgttgggcccgcatggcgcccttaaagagagtgtttgaacacattccgttgggcgccggcccattaggttgtggaacgtgtgccaggccggtcccagagaaaacccgggcctgacactgggtctgggttttcccccataaaaaagcccggggaaccggggtttgtgacacccgatgggtccggggccctccgggtcttacg

SEQ ID NO: 73275 - DNA, 2589 bp, Homo sapiens
  misc_feature (2227)..(2227): n is a, c, g, or t
  misc_feature (2243)..(2243): n is a, c, g, or t
  misc_feature (2254)..(2254): n is a, c, g, or t
  misc_feature (2258)..(2258): n is a, c, g, or t
  misc_feature (2262)..(2262): n is a, c, g, or t
  misc_feature (2447)..(2447): n is a, c, g, or t
gcccttttctcggggcgcccgagaggccagctcagacctcccggctcgacaggcggcgcgggcggcggtaaaatgtcggttccaggaccttaccaggcggccactgggccttcctcagcaccatccgcacctccatcctatgaagagacagtggctgttaacagttattaccccacacctccagctcccatgcctgggccaactacggggcttgtgacggggcctgatgggaagggcatgaatcctccttcgtattatacccagccagcgcccatccccaataacaatccaattaccgtgcagacggtctacgtgcagcaccccatcacctttttggaccgccctatccaaatgtgttgtccttcctgcaacaagatgatcgtgagtcagctgtcctataacgccggtgctctgacctggctgtcctgcgggagcctgtgcctgctggggtgcatagcgggctgctgcttcatccccttctgcgtggatgccctgcaggacgtggaccattactgtcccaactgcagagctctcctgggcacctacaagcgtttgtaggactcagccagacgtggagggagccgggtgccgcaggaagtcctttccacctctcatccagcttcacgcctggtggaggttctgccctggtggtctcacctctccagggggcccaccttcatgtcttcttttggggggaatacgtcgcaaaactaacaaatctccaaaccccagaaattgctgcttggagtcgtgcataggacttgcaaagacattccccttgagtgtcagttccacggtttcctgcctccctgagaccctgagtcctgccatctaactgtgatcattgccctatccgaatatcttcctgtgatctgccatcagtggctcttttttcctgcttccatgggcctttctggtggcagtctcaaactgagaagccacagttgccttatttttgaggctgttctgcccagagctcggctgaaccagcctttagtgcctaccattatcttatccgtctcttcccgtccctgatgacaaagatcttgccttacagactttacaggcttggctttgagattctgtaactgcagacttcattagcacacagattcactttaatttcttaatttttttttttaaatacaaggagggggctattaacacccagtacagacatatccacaaggtcgtaaatgcatgctagaaaaatagggctggatcttatcactgccctgtctccccttgtttctctgtgccagatcttcagtgcccctttccatacagggatttttttctcatagagtaattatatgaacagtttttatgacctccttttggtctgaaatacttttgaacagaatttcttttttttaaaaaaaaacagagatggggtcttactatgttgcccaggctggtgtcgaactcctgggctcaagcgatccttctgccttggcctcccgaagtgctgggattgcaggcataagctaccatgctgggcctgaacataatttcaagaggaggatttataaaaccattttctgtaatcaaatgattggtgtcattttcccatttgccaatgtagtctcacttaaaaaaaaaaaaaagaaaaagaaatggataatttcatctactgcctttacttggggttaatgtgattcttaaacaccttcatcatggaactctcagagtggggtccgttttggtttcctggtggtgggttttgaaagataagggaaagcacattttgagcatgtctgggtaccatggtgcggatgcttgggaaccagaactgtttcagaggaatctaaagtctgattttagttttcagagacacagcttgttgtaaaacatgagaagacatgatttctaggactcaagcagcaagccaggattctaggttggctgctgtgtcatctttgaagtcaagacaaagctgggctcgaccttcaagggtcctcgttttgataatacttcagaatagggaactcatgtgaatactactatgtagaaataaaacctagaccttgagcgaacatctgtatattggttgaaaacgatagtggtaaccattgatcccccttcatttgatgtttggaaaattccagtaattatcatttttgcaacgaatatggataccacatagtactttggtgttacctgcttttgaaaaataaagtctttggttcacccggtgaaaaaaaaaaaaaaaaaaaaaaaaaaaaanaaaaaaaaaaaaaaanaaataaaaaanaaanaaanaaaaatataattaaatttttatatatttaaaatttatattttatttttaatttaatttatataaatattaaaatttaattaattattttttttattatttttttatctatttttttttttttaaaaaatttttttttttattttatttattttattaattttttaattaatataatcttttttanttatttattaacattattaaaattttttttttttaaatattttttttaataaaaatttttatattattcattattttttttttaaattcttttcttccccatttctctctctctttctcatctatctttcctttctcctctc

SEQ ID NO: 73276 - DNA, 2217 bp, Homo sapiens
  misc_feature (11)..(11): n is a, c, g, or t
  misc_feature (13)..(14): n is a, c, g, or t
  misc_feature (17)..(17): n is a, c, g, or t
gcacagaaatnanntcntaggtgcgaggcctgggtgttgagaggccagctcagacctcccggctcgacaggcggcgcgggcggcggtaaaatgtcggttccaggaccttaccaggcggccactgggccttcctcagcaccatccgcacctccatcctatgaagagacagtggctgttaacagttattaccccacacctccagctcccatgcctgggccaactacggggcttgtgacggggcctgatgggaagggcatgaatcctccttcgtattatacccagccagcgcccatccccaataacaatccaattaccgtgcagacggtctacgtgcagcaccccatcacctttttggaccgccctatccaaatgtgttgtccttcctgcaacaagatgatcgtgagtcagctgtcctataacgccggtgctctgacctggctgtcctgcgggagcctgtgcctgctggggtgcatagcgggctgctgcttcatccccttctgcgtggatgccctgcaggacgtggaccattactgtcccaactgcagagctctcctgggcacctacaagcgtttgtaggactcagccagacgtggagggagccgggtgccgcaggaagtcctttccacctctcatccagcttcacgcctggtggaggttctgccctggtggtctcacctctccagggggcccaccttcatgtcttcttttggggggaatacgtcgcaaaactaacaaatctccaaaccccagaaattgctgcttggagtcgtgcataggacttgcaaagacattccccttgagtgtcagttccacggtttcctgcctccctgagaccctgagtcctgccatctaactgtgatcattgccctatccgaatatcttcctgtgatctgccatcagtggctcttttttcctgcttccatgggcctttctggtggcagtctcaaactgagaagccacagttgccttatttttgaggctgttctgcccagagctcggctgaaccagcctttagtgcctaccattatcttatccgtctcttcccgtccctgatgacaaagatcttgccttacagactttacaggcttggctttgagattctgtaactgcagacttcattagcacacagattcactttaatttcttaatttttttttttaaatacaaggagggggctattaacacccagtacagacatatccacaaggtcgtaaatgcatgctagaaaaatagggctggatcttatcactgccctgtctccccttgtttctctgtgccagatcttcagtgcccctttccatacagggatttttttctcatagagtaattatatgaacagtttttatgacctccttttggtctgaaatacttttgaacagaatttcttttttttaaaaaaaaacagagatggggtcttactatgttgcccaggctggtgtcgaactcctgggctcaagcgatccttctgccttggcctcccgaagtgctgggattgcaggcataagctaccatgctgggcctgaacataatttcaagaggaggatttataaaaccattttctgtaatcaaatgattggtgtcattttcccatttgccaatgtagtctcacttaaaaaaaaaaaaaagaaaaagaaatggataatttcatctactgcctttacttggggttaatgtgattcttaaacaccttcatcatggaactctcagagtggggtccgttttggtttcctggtggtgggttttgaaagataagggaaagcacattttgagcatgtctgggtaccatggtgcggatgcttgggaaccagaactgtttcagaggaatctaaagtctgattttagttttcagagacacagcttgttgtaaaacatgagaagacatgatttctaggactcaagcagcaagccaggattctaggttggctgctgtgtcatctttgaagtcaagacaaagctgggctcgaccttcaagggtcctcgttttgataatacttcagaatagggaactcatgtgaatactactatgtagaaataaaacctagaccttgagcgaacatctgtatattggttgaaaacgatagtggtaaccattgatcccccttcatttgatgtttggaaaattccagtaattatcatttttgcaacgaatatggataccacatagtactttggtgttacctgcttttgaaaaataaagtctttggttcacccggtgaa

SEQ ID NO: 73277 - DNA, 2158 bp, Homo sapiens
gcccttttctcggggcgcccgagaggccagctcagacctcccggctcgacaggcggcgcgggcggcggtaaaatgtcggttccaggaccttaccaggcggccactgggccttcctcagcaccatccgcacctccatcctatgaagagacagtggctgttaacagttattaccccacacctccagctcccatgcctgggccaactacggggcttgtgacggggcctgatgggaagggcatgaatcctccttcgtattatacccagccagcgcccatccccaataacaatccaattaccgtgcagacggtctacgtgcagcaccccatcacctttttggaccgccctatccaaatgtgttgtccttcctgcaacaagatgatcgtgagtcagctgtcctataacgccggtgctctgacctggctgtcctgcgggagcctgtgcctgctggggtgcatagcgggctgctgcttcatccccttctgcgtggatgccctgcaggacgtggaccattactgtcccaactgcagagctctcctgggcacctacaagcgtttgtaggactcagccagacgtggagggagccgggtgccgcaggaagtcctttccacctctcatccagcttcacgcctggtggaggttctgccctggtggtctcacctctccagggggcccaccttcatgtcttcttttggggggaatacgtcgcaaaactaacaaatctccaaaccccagaaattgctgcttggagtcgtgcataggacttgcaaagacattccccttgagtgtcagttccacggtttcctgcctccctgagaccctgagtcctgccatctaactgtgatcattgccctatccgaatatcttcctgtgatctgccatcagtggctcttttttcctgcttccatgggcctttctggtggcagtctcaaactgagaagccacagttgccttatttttgaggctgttctgcccagagctcggctgaaccagcctttagtgcctaccattatcttatccgtctcttcccgtccctgatgacaaagatcttgccttacagactttacaggcttggctttgagattctgtaactgcagacttcattagcacacagattcactttaatttcttaatttttttttttaaatacaaggagggggctattaacacccagtacagacatatccacaaggtcgtaaatgcatgctagaaaaatagggctggatcttatcactgccctgtctccccttgtttctctgtgccagatcttcagtgcccctttccatacagggatttttttctcatagagtaattatatgaacagtttttatgacctccttttggtctgaaatacttttgaacagaatttcttttttttaaaaaaaaacagagatggggtcttactatgttgcccaggctggtgtcgaactcctgggctcaagcgatccttctgccttggcctcccgaagtgctgggattgcaggcataagctaccatgctgggcctgaacataatttcaagaggaggatttataaaaccattttctgtaatcaaatgattggtgtcattttcccatttgccaatgtagtctcacttaaaaaaaaaaaaaagaaaaagaaatggataatttcatctactgcctttacttggggttaatgtgattcttaaacaccttcatcatggaactctcagagtggggtccgttttggtttcctggtggtgggttttgaaagataagggaaagcacattttgagcatgtctgggtaccatggtgcggatgcttgggaaccagaactgtttcagaggaatctaaagtctgattttagttttcagagacacagcttgttgtaaaacatgagaagacatgatttctaggactcaagcagcaagccaggattctaggttggctgctgtgtcatctttgaagtcaagacaaagctgggctcgaccttcaagggtcctcgttttgataatacttcagaatagggaactcatgtgaatactactatgtagaaataaaacctagaccttgagcgaacatctgtatattggttgaaaacgatagtggtaaccattgatcccccttcatttgatgtttggaaaattccagtaattatcatttttgccaaattaaacaatacttgggatacaccaaccaat

SEQ ID NO: 73278 - DNA, 2200 bp, Homo sapiens
gcccttttctcggggcgcccgagaggccagctcagacctcccggctcgacaggcggcgcgggcggcggtaaaatgtcggttccaggaccttaccaggcggccactgggccttcctcagcaccatccgcacctccatcctatgaagagacagtggctgttaacagttattaccccacacctccagctcccatgcctgggccaactacggggcttgtgacggggcctgatgggaagggcatgaatcctccttcgtattatacccagccagcgcccatccccaataacaatccaattaccgtgcagacggtctacgtgcagcaccccatcacctttttggaccgccctatccaaatgtgttgtccttcctgcaacaagatgatcgtgagtcagctgtcctataacgccggtgctctgacctggctgtcctgcgggagcctgtgcctgctggggtgcatagcgggctgctgcttcatccccttctgcgtggatgccctgcaggacgtggaccattactgtcccaactgcagagctctcctgggcacctacaagcgtttgtaggactcagccagacgtggagggagccgggtgccgcaggaagtcctttccacctctcatccagcttcacgcctggtggaggttctgccctggtggtctcacctctccagggggcccaccttcatgtcttcttttggggggaatacgtcgcaaaactaacaaatctccaaaccccagaaattgctgcttggagtcgtgcataggacttgcaaagacattccccttgagtgtcagttccacggtttcctgcctccctgagaccctgagtcctgccatctaactgtgatcattgccctatccgaatatcttcctgtgatctgccatcagtggctcttttttcctgcttccatgggcctttctggtggcagtctcaaactgagaagccacagttgccttatttttgaggctgttctgcccagagctcggctgaaccagcctttagtgcctaccattatcttatccgtctcttcccgtccctgatgacaaagatcttgccttacagactttacaggcttggctttgagattctgtaactgcagacttcattagcacacagattcactttaatttcttaatttttttttttaaatacaaggagggggctattaacacccagtacagacatatccacaaggtcgtaaatgcatgctagaaaaatagggctggatcttatcactgccctgtctccccttgtttctctgtgccagatcttcagtgcccctttccatacagggatttttttctcatagagtaattatatgaacagtttttatgacctccttttggtctgaaatacttttgaacagaatttcttttttttaaaaaaaaacagagatggggtcttactatgttgcccaggctggtgtcgaactcctgggctcaagcgatccttctgccttggcctcccgaagtgctgggattgcaggcataagctaccatgctgggcctgaacataatttcaagaggaggatttataaaaccattttctgtaatcaaatgattggtgtcattttcccatttgccaatgtagtctcacttaaaaaaaaaaaaaagaaaaagaaatggataatttcatctactgcctttacttggggttaatgtgattcttaaacaccttcatcatggaactctcagagtggggtccgttttggtttcctggtggtgggttttgaaagataagggaaagcacattttgagcatgtctgggtaccatggtgcggatgcttgggaaccagaactgtttcagaggaatctaaagtctgattttagttttcagagacacagcttgttgtaaaacatgagaagacatgatttctaggactcaagcagcaagccaggattctaggttggctgctgtgtcatctttgaagtcaagacaaagctgggctcgaccttcaagggtcctcgttttgataatacttcagaatagggaactcatgtgaatactactatgtagaaataaaacctagaccttgagcgaacatctgtatattggttgaaaacgatagtggtaaccattgatcccccttcatttgatgtttggaaaattccagtaattatcatttttacacagacataacagcgacataatgcttgttattaactgcatttgaagggaggagaaaaaaattcaaccgacgaacgg

SEQ ID NO: 73279 - DNA, 2157 bp, Homo sapiens
aaggagggacgcgtctgcagcaaaggtaaaatgtcggttccaggaccttaccaggcggccactgggccttcctcagcaccatccgcacctccatcctatgaagagacagtggctgttaacagttattaccccacacctccagctcccatgcctgggccaactacggggcttgtgacggggcctgatgggaagggcatgaatcctccttcgtattatacccagccagcgcccatccccaataacaatccaattaccgtgcagacggtctacgtgcagcaccccatcacctttttggaccgccctatccaaatgtgttgtccttcctgcaacaagatgatcgtgagtcagctgtcctataacgccggtgctctgacctggctgtcctgcgggagcctgtgcctgctggggtgcatagcgggctgctgcttcatccccttctgcgtggatgccctgcaggacgtggaccattactgtcccaactgcagagctctcctgggcacctacaagcgtttgtaggactcagccagacgtggagggagccgggtgccgcaggaagtcctttccacctctcatccagcttcacgcctggtggaggttctgccctggtggtctcacctctccagggggcccaccttcatgtcttcttttggggggaatacgtcgcaaaactaacaaatctccaaaccccagaaattgctgcttggagtcgtgcataggacttgcaaagacattccccttgagtgtcagttccacggtttcctgcctccctgagaccctgagtcctgccatctaactgtgatcattgccctatccgaatatcttcctgtgatctgccatcagtggctcttttttcctgcttccatgggcctttctggtggcagtctcaaactgagaagccacagttgccttatttttgaggctgttctgcccagagctcggctgaaccagcctttagtgcctaccattatcttatccgtctcttcccgtccctgatgacaaagatcttgccttacagactttacaggcttggctttgagattctgtaactgcagacttcattagcacacagattcactttaatttcttaatttttttttttaaatacaaggagggggctattaacacccagtacagacatatccacaaggtcgtaaatgcatgctagaaaaatagggctggatcttatcactgccctgtctccccttgtttctctgtgccagatcttcagtgcccctttccatacagggatttttttctcatagagtaattatatgaacagtttttatgacctccttttggtctgaaatacttttgaacagaatttcttttttttaaaaaaaaacagagatggggtcttactatgttgcccaggctggtgtcgaactcctgggctcaagcgatccttctgccttggcctcccgaagtgctgggattgcaggcataagctaccatgctgggcctgaacataatttcaagaggaggatttataaaaccattttctgtaatcaaatgattggtgtcattttcccatttgccaatgtagtctcacttaaaaaaaaaaaaaagaaaaagaaatggataatttcatctactgcctttacttggggttaatgtgattcttaaacaccttcatcatggaactctcagagtggggtccgttttggtttcctggtggtgggttttgaaagataagggaaagcacattttgagcatgtctgggtaccatggtgcggatgcttgggaaccagaactgtttcagaggaatctaaagtctgattttagttttcagagacacagcttgttgtaaaacatgagaagacatgatttctaggactcaagcagcaagccaggattctaggttggctgctgtgtcatctttgaagtcaagacaaagctgggctcgaccttcaagggtcctcgttttgataatacttcagaatagggaactcatgtgaatactactatgtagaaataaaacctagaccttgagcgaacatctgtatattggttgaaaacgatagtggtaaccattgatcccccttcatttgatgtttggaaaattccagtaattatcatttttgcaacgaatatggataccacatagtactttggtgttacctgcttttgaaaaataaagtctttggttcacccggtgaa

SEQ ID NO: 73280 - DNA, 2380 bp, Homo sapiens
gcccttttctcggggcgcccgagaggccagctcagacctcccggctcgacaggcggcgcgggcggcggagttgaatccccctgggggttttcaagttgttcttggactgctggtttttgaaatagaagcccctttggtggggtcccccataaacccaggcgctggtgcccaccttgtgatgtgaaggctcctgtaacacgacctcactttcctggccccgcactactcacctgccccacgggacacaggtaaaatgtcggttccaggaccttaccaggcggccactgggccttcctcagcaccatccgcacctccatcctatgaagagacagtggctgttaacagttattaccccacacctccagctcccatgcctgggccaactacggggcttgtgacggggcctgatgggaagggcatgaatcctccttcgtattatacccagccagcgcccatccccaataacaatccaattaccgtgcagacggtctacgtgcagcaccccatcacctttttggaccgccctatccaaatgtgttgtccttcctgcaacaagatgatcgtgagtcagctgtcctataacgccggtgctctgacctggctgtcctgcgggagcctgtgcctgctggggtgcatagcgggctgctgcttcatccccttctgcgtggatgccctgcaggacgtggaccattactgtcccaactgcagagctctcctgggcacctacaagcgtttgtaggactcagccagacgtggagggagccgggtgccgcaggaagtcctttccacctctcatccagcttcacgcctggtggaggttctgccctggtggtctcacctctccagggggcccaccttcatgtcttcttttggggggaatacgtcgcaaaactaacaaatctccaaaccccagaaattgctgcttggagtcgtgcataggacttgcaaagacattccccttgagtgtcagttccacggtttcctgcctccctgagaccctgagtcctgccatctaactgtgatcattgccctatccgaatatcttcctgtgatctgccatcagtggctcttttttcctgcttccatgggcctttctggtggcagtctcaaactgagaagccacagttgccttatttttgaggctgttctgcccagagctcggctgaaccagcctttagtgcctaccattatcttatccgtctcttcccgtccctgatgacaaagatcttgccttacagactttacaggcttggctttgagattctgtaactgcagacttcattagcacacagattcactttaatttcttaatttttttttttaaatacaaggagggggctattaacacccagtacagacatatccacaaggtcgtaaatgcatgctagaaaaatagggctggatcttatcactgccctgtctccccttgtttctctgtgccagatcttcagtgcccctttccatacagggatttttttctcatagagtaattatatgaacagtttttatgacctccttttggtctgaaatacttttgaacagaatttcttttttttaaaaaaaaacagagatggggtcttactatgttgcccaggctggtgtcgaactcctgggctcaagcgatccttctgccttggcctcccgaagtgctgggattgcaggcataagctaccatgctgggcctgaacataatttcaagaggaggatttataaaaccattttctgtaatcaaatgattggtgtcattttcccatttgccaatgtagtctcacttaaaaaaaaaaaaaagaaaaagaaatggataatttcatctactgcctttacttggggttaatgtgattcttaaacaccttcatcatggaactctcagagtggggtccgttttggtttcctggtggtgggttttgaaagataagggaaagcacattttgagcatgtctgggtaccatggtgcggatgcttgggaaccagaactgtttcagaggaatctaaagtctgattttagttttcagagacacagcttgttgtaaaacatgagaagacatgatttctaggactcaagcagcaagccaggattctaggttggctgctgtgtcatctttgaagtcaagacaaagctgggctcgaccttcaagggtcctcgttttgataatacttcagaatagggaactcatgtgaatactactatgtagaaataaaacctagaccttgagcgaacatctgtatattggttgaaaacgatagtggtaaccattgatcccccttcatttgatgtttggaaaattccagtaattatcatttttgcaacgaatatggataccacatagtactttggtgttacctgcttttgaaaaataaagtctttggttcacccggtgaa

SEQ ID NO: 73281 - DNA, 2163 bp, Homo sapiens
ggcggacgggtggggctggcaccgagaggcaggggcaggataggagagtgggggagacaccaggtccgcgccaggcgtctcggggcatccgcacctccatcctatgaagagacagtggctgttaacagttattaccccacacctccagctcccatgcctgggccaactacggggcttgtgacggggcctgatgggaagggcatgaatcctccttcgtattatacccagccagcgcccatccccaataacaatccaattaccgtgcagacggtctacgtgcagcaccccatcacctttttggaccgccctatccaaatgtgttgtccttcctgcaacaagatgatcgtgagtcagctgtcctataacgccggtgctctgacctggctgtcctgcgggagcctgtgcctgctggggtgcatagcgggctgctgcttcatccccttctgcgtggatgccctgcaggacgtggaccattactgtcccaactgcagagctctcctgggcacctacaagcgtttgtaggactcagccagacgtggagggagccgggtgccgcaggaagtcctttccacctctcatccagcttcacgcctggtggaggttctgccctggtggtctcacctctccagggggcccaccttcatgtcttcttttggggggaatacgtcgcaaaactaacaaatctccaaaccccagaaattgctgcttggagtcgtgcataggacttgcaaagacattccccttgagtgtcagttccacggtttcctgcctccctgagaccctgagtcctgccatctaactgtgatcattgccctatccgaatatcttcctgtgatctgccatcagtggctcttttttcctgcttccatgggcctttctggtggcagtctcaaactgagaagccacagttgccttatttttgaggctgttctgcccagagctcggctgaaccagcctttagtgcctaccattatcttatccgtctcttcccgtccctgatgacaaagatcttgccttacagactttacaggcttggctttgagattctgtaactgcagacttcattagcacacagattcactttaatttcttaatttttttttttaaatacaaggagggggctattaacacccagtacagacatatccacaaggtcgtaaatgcatgctagaaaaatagggctggatcttatcactgccctgtctccccttgtttctctgtgccagatcttcagtgcccctttccatacagggatttttttctcatagagtaattatatgaacagtttttatgacctccttttggtctgaaatacttttgaacagaatttcttttttttaaaaaaaaacagagatggggtcttactatgttgcccaggctggtgtcgaactcctgggctcaagcgatccttctgccttggcctcccgaagtgctgggattgcaggcataagctaccatgctgggcctgaacataatttcaagaggaggatttataaaaccattttctgtaatcaaatgattggtgtcattttcccatttgccaatgtagtctcacttaaaaaaaaaaaaaagaaaaagaaatggataatttcatctactgcctttacttggggttaatgtgattcttaaacaccttcatcatggaactctcagagtggggtccgttttggtttcctggtggtgggttttgaaagataagggaaagcacattttgagcatgtctgggtaccatggtgcggatgcttgggaaccagaactgtttcagaggaatctaaagtctgattttagttttcagagacacagcttgttgtaaaacatgagaagacatgatttctaggactcaagcagcaagccaggattctaggttggctgctgtgtcatctttgaagtcaagacaaagctgggctcgaccttcaagggtcctcgttttgataatacttcagaatagggaactcatgtgaatactactatgtagaaataaaacctagaccttgagcgaacatctgtatattggttgaaaacgatagtggtaaccattgatcccccttcatttgatgtttggaaaattccagtaattatcatttttgcaacgaatatggataccacatagtactttggtgttacctgcttttgaaaaataaagtctttggttcacccggtgaa

SEQ ID NO: 73282 - DNA, 1651 bp, Homo sapiens
gcccttttctcggggcgcccgagaggccagctcagacctcccggctcgacaggcggcgcgggcggcggtaaaatgtcggttccaggaccttaccaggcggccactgggccttcctcagcaccatccgcacctccatcctatgaagagacagtggctgttaacagttattaccccacacctccagctcccatgcctgggccaactacggggcttgtgacggggcctgatgggaagggcatgaatcctccttcgtattatacccagccagcgcccatccccaataacaatccaattaccgtgcagacggtctacgtgcagcaccccatcacctttttggaccgccctatccaaatgtgttgtccttcctgcaacaagatgatcgtgagtcagctgtcctataacgccggtgctctgacctggctgtcctgcgggagcctgtgcctgctggggtgcatagcgggctgctgcttcatccccttctgcgtggatgccctgcaggacgtggaccattactgtcccaactgcagagctctcctgggcacctacaagcgtttgtaggactcagccagacgtggagggagccgggtgccgcaggaagtcctttccacctctcatccagcttcacgcctggtggaggttctgccctggtggtctcacctctccagggggcccaccttcatgtcttcttttggggggaatacgtcgcaaaactaacaaatctccaaaccccagaaattgctgcttggagtcgtgcataggacttgcaaagacattccccttgagtgtcagttccacggtttcctgcctccctgagaccctgagtcctgccatctaactgtgatcattgccctatccgaatatcttcctgtgatctgccatcagtggctcttttttcctgcttccatgggcctttctggtggcagtctcaaactgagaagccacagttgccttatttttgaggctgttctgcccagagctcggctgaaccagcctttagtgcctaccattatcttatccgtctcttcccgtccctgatgacaaagatcttgccttacagactttacaggcttggctttgagattctgtaactgcagacttcattagcacacagattcactttaatttcttaatttttttttttaaatacaaggagggggctattaacacccagtacagacatatccacaaggtcgtaaatgcatgctagaaaaatagggctggatcttatcactgccctgtctccccttgtttctctgtgccagatcttcagtgcccctttccatacagggatttttttctcatagagtaattatatgaacagtttttatgacctccttttggtctgaaatacttttgaacagaatttcttttttttaaaaaaaaacagagatggggtcttactatgttgcccaggctggtgtcgaactcctgggctcaagcgatccttctgccttggcctcccgaagtgctgggattgcaggcataagctaccatgctgggcctgaacataatttcaagaggaggatttataaaaccattttctgtaatcaaatgattggtgtcattttcccatttgccaatgtagtctcacttaaaaaaaaaaaaaagaaccaaaaactcgagactagttctaaactcgtgccgctaaagc

SEQ ID NO: 73283 - DNA, 1675 bp, Homo sapiens
gcccttttctcggggcgcccgagaggccagctcagacctcccggctcgacaggcggcgcgggcggcggtaaaatgtcggttccaggaccttaccaggcggccactgggccttcctcagcaccatccgcacctccatcctatgaagagacagtggctgttaacagttattaccccacacctccagctcccatgcctgggccaactacggggcttgtgacggggcctgatgggaagggcatgaatcctccttcgtattatacccagccagcgcccatccccaataacaatccaattaccgtgcagacggtctacgtgcagcaccccatcacctttttggaccgccctatccaaatgtgttgtccttcctgcaacaagatgatcgtgagtcagctgtcctataacgccggtgctctgacctggctgtcctgcgggagcctgtgcctgctggggtgcatagcgggctgctgcttcatccccttctgcgtggatgccctgcaggacgtggaccattactgtcccaactgcagagctctcctgggcacctacaagcgtttgtaggactcagccagacgtggagggagccgggtgccgcaggaagtcctttccacctctcatccagcttcacgcctggtggaggttctgccctggtggtctcacctctccagggggcccaccttcatgtcttcttttggggggaatacgtcgcaaaactaacaaatctccaaaccccagaaattgctgcttggagtcgtgcataggacttgcaaagacattccccttgagtgtcagttccacggtttcctgcctccctgagaccctgagtcctgccatctaactgtgatcattgccctatccgaatatcttcctgtgatctgccatcagtggctcttttttcctgcttccatgggcctttctggtggcagtctcaaactgagaagccacagttgccttatttttgaggctgttctgcccagagctcggctgaaccagcctttagtgcctaccattatcttatccgtctcttcccgtccctgatgacaaagatcttgccttacagactttacaggcttggctttgagattctgtaactgcagacttcattagcacacagattcactttaatttcttaatttttttttttaaatacaaggagggggctattaacacccagtacagacatatccacaaggtcgtaaatgcatgctagaaaaatagggctggatcttatcactgccctgtctccccttgtttctctgtgccagatcttcagtgcccctttccatacagggatttttttctcatagagtaattatatgaacagtttttatgacctccttttggtctgaaatacttttgaacagaatttcttttttttaaaaaaaaacagagatggggtcttactatgttgcccaggctggtgtcgaactcctgggctcaagcgatccttctgccttggcctcccgaagtgctgggattgcaggcataagctaccatgctgggcctgaacataatttcaagaggaggatttataaaaccattttctgtaatcaaatgattggtgtcattttcccatttgccaatgtagtctcacttaaaaaaaaaaaaaagaaaaaatttggggggggtggggccggggaaaagtttttaaaaaatttggtgggggggggggcccagt

SEQ ID NO: 73284 - DNA, 2216 bp, Homo sapiens
acactctcgggtccggggtccgcatgaggaggaaaagagtgagtaatggtagcgtcaccaggggcgcggggactgcctcctatcagctgataacctagtgtcatgatagcagtagccgctgaggagtaaaggcacgattaatatgaaccaattacgatccatctcgacataccaactaatgtcgcgtagggcccgaacgtacggtgagcggagatactctggacacgcgatggtcatgcggcttcctatgtggcttcccatgatgcctgtgaagctacattacctgagtgacgtaggcgacattacagagcaaacgtggcttcacggagtcgatctcgatttaacgctttttggaccgccctatccaaatgtgttgtccttcctgcaacaagatgatcgtgagtcagctgtcctataacgccggtgctctgacctggctgtcctgcgggagcctgtgcctgctggggtgcatagcgggctgctgcttcatccccttctgcgtggatgccctgcaggacgtggaccattactgtcccaactgcagagctctcctgggcacctacaagcgtttgtaggactcagccagacgtggagggagccgggtgccgcaggaagtcctttccacctctcatccagcttcacgcctggtggaggttctgccctggtggtctcacctctccagggggcccaccttcatgtcttcttttggggggaatacgtcgcaaaactaacaaatctccaaaccccagaaattgctgcttggagtcgtgcataggacttgcaaagacattccccttgagtgtcagttccacggtttcctgcctccctgagaccctgagtcctgccatctaactgtgatcattgccctatccgaatatcttcctgtgatctgccatcagtggctcttttttcctgcttccatgggcctttctggtggcagtctcaaactgagaagccacagttgccttatttttgaggctgttctgcccagagctcggctgaaccagcctttagtgcctaccattatcttatccgtctcttcccgtccctgatgacaaagatcttgccttacagactttacaggcttggctttgagattctgtaactgcagacttcattagcacacagattcactttaatttcttaatttttttttttaaatacaaggagggggctattaacacccagtacagacatatccacaaggtcgtaaatgcatgctagaaaaatagggctggatcttatcactgccctgtctccccttgtttctctgtgccagatcttcagtgcccctttccatacagggatttttttctcatagagtaattatatgaacagtttttatgacctccttttggtctgaaatacttttgaacagaatttcttttttttaaaaaaaaacagagatggggtcttactatgttgcccaggctggtgtcgaactcctgggctcaagcgatccttctgccttggcctcccgaagtgctgggattgcaggcataagctaccatgctgggcctgaacataatttcaagaggaggatttataaaaccattttctgtaatcaaatgattggtgtcattttcccatttgccaatgtagtctcacttaaaaaaaaaaaaaagaaaaagaaatggataatttcatctactgcctttacttggggttaatgtgattcttaaacaccttcatcatggaactctcagagtggggtccgttttggtttcctggtggtgggttttgaaagataagggaaagcacattttgagcatgtctgggtaccatggtgcggatgcttgggaaccagaactgtttcagaggaatctaaagtctgattttagttttcagagacacagcttgttgtaaaacatgagaagacatgatttctaggactcaagcagcaagccaggattctaggttggctgctgtgtcatctttgaagtcaagacaaagctgggctcgaccttcaagggtcctcgttttgataatacttcagaatagggaactcatgtgaatactactatgtagaaataaaacctagaccttgagcgaacatctgtatattggttgaaaacgatagtggtaaccattgatcccccttcatttgatgtttggaaaattccagtaattatcatttttgcaacgaatatggataccacatagtactttggtgttacctgcttttgaaaaataaagtctttggttcacccggtgaa

SEQ ID NO: 73285 - DNA, 2047 bp, Homo sapiens
cacgcgcagcatagcagagtcgacactagaggcatccaaagaataccggctcgacaggcggcgcgggcggcggtaaaatgtcggttccaggaccttaccaggcggccactgggccttcctcagcaccatccgcacctccatcctatgaagagacagtggctgttaacagttattaccccacacctccagctcccatgcctgggccaactacggggcttgtgacggggcctgatgggaagggcatgaatcctccttcgtattatacccagccagcgcccatccccaataacaatccaagtgcatagcgggctgctgcttcatccccttctgcgtggatgccctgcaggacgtggaccattactgtcccaactgcagagctctcctgggcacctacaagcgtttgtaggactcagccagacgtggagggagccgggtgccgcaggaagtcctttccacctctcatccagcttcacgcctggtggaggttctgccctggtggtctcacctctccagggggcccaccttcatgtcttcttttggggggaatacgtcgcaaaactaacaaatctccaaaccccagaaattgctgcttggagtcgtgcataggacttgcaaagacattccccttgagtgtcagttccacggtttcctgcctccctgagaccctgagtcctgccatctaactgtgatcattgccctatccgaatatcttcctgtgatctgccatcagtggctcttttttcctgcttccatgggcctttctggtggcagtctcaaactgagaagccacagttgccttatttttgaggctgttctgcccagagctcggctgaaccagcctttagtgcctaccattatcttatccgtctcttcccgtccctgatgacaaagatcttgccttacagactttacaggcttggctttgagattctgtaactgcagacttcattagcacacagattcactttaatttcttaatttttttttttaaatacaaggagggggctattaacacccagtacagacatatccacaaggtcgtaaatgcatgctagaaaaatagggctggatcttatcactgccctgtctccccttgtttctctgtgccagatcttcagtgcccctttccatacagggatttttttctcatagagtaattatatgaacagtttttatgacctccttttggtctgaaatacttttgaacagaatttcttttttttaaaaaaaaacagagatggggtcttactatgttgcccaggctggtgtcgaactcctgggctcaagcgatccttctgccttggcctcccgaagtgctgggattgcaggcataagctaccatgctgggcctgaacataatttcaagaggaggatttataaaaccattttctgtaatcaaatgattggtgtcattttcccatttgccaatgtagtctcacttaaaaaaaaaaaaaagaaaaagaaatggataatttcatctactgcctttacttggggttaatgtgattcttaaacaccttcatcatggaactctcagagtggggtccgttttggtttcctggtggtgggttttgaaagataagggaaagcacattttgagcatgtctgggtaccatggtgcggatgcttgggaaccagaactgtttcagaggaatctaaagtctgattttagttttcagagacacagcttgttgtaaaacatgagaagacatgatttctaggactcaagcagcaagccaggattctaggttggctgctgtgtcatctttgaagtcaagacaaagctgggctcgaccttcaagggtcctcgttttgataatacttcagaatagggaactcatgtgaatactactatgtagaaataaaacctagaccttgagcgaacatctgtatattggttgaaaacgatagtggtaaccattgatcccccttcatttgatgtttggaaaattccagtaattatcatttttgcaacgaatatggataccacatagtactttggtgttacctgcttttgaaaaataaagtctttggttcacccggtgaa

SEQ ID NO: 73286 - DNA, 1351 bp, Homo sapiens
atgataggccgcgggttaatcggacgagggtcagtggctcttttttcctgcttccatgggcctttctggtggcagtctcaaactgagaagccacagttgccttatttttgaggctgttctgcccagagctcggctgaaccagcctttagtgcctaccattatcttatccgtctcttcccgtccctgatgacaaagatcttgccttacagactttacaggcttggctttgagattctgtaactgcagacttcattagcacacagattcactttaatttcttaatttttttttttaaatacaaggagggggctattaacacccagtacagacatatccacaaggtcgtaaatgcatgctagaaaaatagggctggatcttatcactgccctgtctccccttgtttctctgtgccagatcttcagtgcccctttccatacagggatttttttctcatagagtaattatatgaacagtttttatgacctccttttggtctgaaatacttttgaacagaatttcttttttttaaaaaaaaacagagatggggtcttactatgttgcccaggctggtgtcgaactcctgggctcaagcgatccttctgccttggcctcccgaagtgctgggattgcaggcataagctaccatgctgggcctgaacataatttcaagaggaggatttataaaaccattttctgtaatcaaatgattggtgtcattttcccatttgccaatgtagtctcacttaaaaaaaaaaaaaagaaaaagaaatggataatttcatctactgcctttacttggggttaatgtgattcttaaacaccttcatcatggaactctcagagtggggtccgttttggtttcctggtggtgggttttgaaagataagggaaagcacattttgagcatgtctgggtaccatggtgcggatgcttgggaaccagaactgtttcagaggaatctaaagtctgattttagttttcagagacacagcttgttgtaaaacatgagaagacatgatttctaggactcaagcagcaagccaggattctaggttggctgctgtgtcatctttgaagtcaagacaaagctgggctcgaccttcaagggtcctcgttttgataatacttcagaatagggaactcatgtgaatactactatgtagaaataaaacctagaccttgagcgaacatctgtatattggttgaaaacgatagtggtaaccattgatcccccttcatttgatgtttggaaaattccagtaattatcatttttgcaacgaatatggataccacatagtactttggtgttacctgcttttgaaaaataaagtctttggttcacccggtgaa

SEQ ID NO: 73287 - DNA, 1454 bp, Homo sapiens
gcccttttctcggggcgcccgagaggccagctcagacctcccggctcgacaggcggcgcgggcggcggtaaaatgtcggttccaggaccttaccaggcggccactgggccttcctcagcaccatccgcacctccatcctatgaagagacagtggctgttaacagttattaccccacacctccagctcccatgcctgggccaactacggggcttgtgacggggcctgatgggaagggcatgaatcctccttcgtattatacccagccagcgcccatccccaataacaatccaattaccgtgcagacggtctacgtgcagcaccccatcacctttttggaccgccctatccaaatgtgttgtccttcctgcaacaagatgatcgtgagtcagctgtcctataacgccggtgctctgacctggctgtcctgcgggagcctgtgcctgctggggtgcatagcgggctgctgcttcatccccttctgcgtggatgccctgcaggacgtggaccattactgtcccaactgcagagctctcctgggcacctacaagcgtttgtaggactcagccagacgtggagggagccgggtgccgcaggaagtcctttccacctctcatccagcttcacgcctggtggaggttctgccctggtggtctcacctctccagggggcccaccttcatgtcttcttttggggggaatacgtcgcaaaactaacaaatctccaaaccccagaaattgctgcttggagtcgtgcataggacttgcaaagacattccccttgagtgtcagttccacggtttcctgcctccctgagaccctgagtcctgccatctaactgtgatcattgccctatccgaatatcttcctgtgatctgccatcagtggctcttttttcctgcttccatgggcctttctggtggcagtctcaaactgagaagccacagttgccttatttttgaggctgttctgcccagagctcggctgaaccagcctttagtgcctaccattatcttatccgtctcttcccgtccctgatgacaaagatcttgccttacagactttacaggcttggctttgagattctgtaactgcagacttcattagcacacagattcactttaatttcttaatttttttttttaaatacaaggagggggctattaacacccagtacagacatatccacaaggtcgtaaatgcatgctagaaaaatagggctggatcttatcactgccctgtctccccttgtttctctgtgccagatcttcagtgcccctttccatacagggatttttttctcatagagtaattatatgaacagtttttatgacctccttttggtctgaaatacttttgaacagaatttcttttttttaaaaaaaaacagagatggggtcttactatgttgcccaggctggtgtcgaaacacctcgagagatcctctagatcagcca

SEQ ID NO: 73288 - DNA, 1051 bp, Homo sapiens
gacccacgcgtccgcggacgcgtgggtcgacccacgcgtccgtcgtaaatgcatgctagaaaaatagggctggatcttatcactgccctgtctccccttgtttctctgtgccagatcttcagtgcccctttccatacagggatttttttctcatagagtaattatatgaacagtttttatgacctccttttggtctgaaatacttttgaacagaatttcttttttttaaaaaaaaacagagatggggtcttactatgttgcccaggctggtgtcgaactcctgggctcaagcgatccttctgccttggcctcccgaagtgctgggattgcaggcataagctaccatgctgggcctgaacataatttcaagaggaggatttataaaaccattttctgtaatcaaatgattggtgtcattttcccatttgccaatgtagtctcacttaaaaaaaaaaaaaagaaaaagaaatggataatttcatctactgcctttacttggggttaatgtgattcttaaacaccttcatcatggaactctcagagtggggtccgttttggtttcctggtggtgggttttgaaagataagggaaagcacattttgagcatgtctgggtaccatggtgcggatgcttgggaaccagaactgtttcagaggaatctaaagtctgattttagttttcagagacacagcttgttgtaaaacatgagaagacatgatttctaggactcaagcagcaagccaggattctaggttggctgctgtgtcatctttgaagtcaagacaaagctgggctcgaccttcaagggtcctcgttttgataatacttcagaatagggaactcatgtgaatactactatgtagaaataaaacctagaccttgagcgaacatctgtatattggttgaaaacgatagtggtaaccattgatcccccttcatttgatgtttggaaaattccagtaattatcatttttgcaacgaatatggataccacatagtactttggtgttacctgcttttgaaaaataaagtctttggttcacccggtgaa

SEQ ID NO: 73289 - DNA, 837 bp, Homo sapiens
gtatttttagtagagacggggtttcaccgtgttagccaggatggtctcgatctcctgacctcactcctgggctcaagcgatccttctgccttggcctcccgaagtgctgggattgcaggcataagctaccatgctgggcctgaacataatttcaagaggaggatttataaaaccattttctgtaatcaaatgattggtgtcattttcccatttgccaatgtagtctcacttaaaaaaaaaaaaaagaaaaagaaatggataatttcatctactgcctttacttggggttaatgtgattcttaaacaccttcatcatggaactctcagagtggggtccgttttggtttcctggtggtgggttttgaaagataagggaaagcacattttgagcatgtctgggtaccatggtgcggatgcttgggaaccagaactgtttcagaggaatctaaagtctgattttagttttcagagacacagcttgttgtaaaacatgagaagacatgatttctaggactcaagcagcaagccaggattctaggttggctgctgtgtcatctttgaagtcaagacaaagctgggctcgaccttcaagggtcctcgttttgataatacttcagaatagggaactcatgtgaatactactatgtagaaataaaacctagaccttgagcgaacatctgtatattggttgaaaacgatagtggtaaccattgatcccccttcatttgatgtttggaaaattccagtaattatcatttttgcaacgaatatggataccacatagtactttggtgttacctgcttttgaaaaataaagtctttggttcacccggtgaa

SEQ ID NO: 73290 - DNA, 810 bp, Homo sapiens
agtgcagtagcacgatcccggctcactgcaacctccctcctgggctcaagcgatccttctgccttggcctcccgaagtgctgggattgcaggcataagctaccatgctgggcctgaacataatttcaagaggaggatttataaaaccattttctgtaatcaaatgattggtgtcattttcccatttgccaatgtagtctcacttaaaaaaaaaaaaaagaaaaagaaatggataatttcatctactgcctttacttggggttaatgtgattcttaaacaccttcatcatggaactctcagagtggggtccgttttggtttcctggtggtgggttttgaaagataagggaaagcacattttgagcatgtctgggtaccatggtgcggatgcttgggaaccagaactgtttcagaggaatctaaagtctgattttagttttcagagacacagcttgttgtaaaacatgagaagacatgatttctaggactcaagcagcaagccaggattctaggttggctgctgtgtcatctttgaagtcaagacaaagctgggctcgaccttcaagggtcctcgttttgataatacttcagaatagggaactcatgtgaatactactatgtagaaataaaacctagaccttgagcgaacatctgtatattggttgaaaacgatagtggtaaccattgatcccccttcatttgatgtttggaaaattccagtaattatcatttttgcaacgaatatggataccacatagtactttggtgttacctgcttttgaaaaataaagtctttggttcacccggtgaa

SEQ ID NO: 73291 - DNA, 791 bp, Homo sapiens
ggcataagctaccatgctgggcctgcaatcccagcacttcgggaggccaaggcagaagtgctgggattgcaggcataagctaccatgctgggcctgaacataatttcaagaggaggatttataaaaccattttctgtaatcaaatgattggtgtcattttcccatttgccaatgtagtctcacttaaaaaaaaaaaaaagaaaaagaaatggataatttcatctactgcctttacttggggttaatgtgattcttaaacaccttcatcatggaactctcagagtggggtccgttttggtttcctggtggtgggttttgaaagataagggaaagcacattttgagcatgtctgggtaccatggtgcggatgcttgggaaccagaactgtttcagaggaatctaaagtctgattttagttttcagagacacagcttgttgtaaaacatgagaagacatgatttctaggactcaagcagcaagccaggattctaggttggctgctgtgtcatctttgaagtcaagacaaagctgggctcgaccttcaagggtcctcgttttgataatacttcagaatagggaactcatgtgaatactactatgtagaaataaaacctagaccttgagcgaacatctgtatattggttgaaaacgatagtggtaaccattgatcccccttcatttgatgtttggaaaattccagtaattatcatttttgcaacgaatatggataccacatagtactttggtgttacctgcttttgaaaaataaagtctttggttcacccggtgaa

SEQ ID NO: 73292 - DNA, 492 bp, Homo sapiens
tcgagctcggcccgcgtatccgcataagggaaagcacattttgagcatgtctgggtaccatggtgcggatgcttgggaaccagaactgtttcagaggaatctaaagtctgattttagttttcagagacacagcttgttgtaaaacatgagaagacatgatttctaggactcaagcagcaagccaggattctaggttggctgctgtgtcatctttgaagtcaagacaaagctgggctcgaccttcaagggtcctcgttttgataatacttcagaatagggaactcatgtgaatactactatgtagaaataaaacctagaccttgagcgaacatctgtatattggttgaaaacgatagtggtaaccattgatcccccttcatttgatgtttggaaaattccagtaattatcatttttgcaacgaatatggataccacatagtactttggtgttacctgcttttgaaaaataaagtctttggttcacccggtgaa

SEQ ID NO: 73293 - DNA, 634 bp, Homo sapiens
gccgaatttcgcacgagctcgtgccgttctaggactcaagcagcaagccaggattctaggttggctgctgtgtcatctttgaagtcaagacaaagctgggctcgaccttcaagggtcctcgttttgataatacttcagaatagggaactcatgtgaatactactatgtagaaataaaacctagaccttgagcgaacatctgtatattggttgaaaacgatagtggtaaccattgatcccccttcatttgatgtttggaaaattccagtaattatcatttttgcaacgaatatggataccacatagtactttggtgttacctgcttttgaaaaataaagtctttggttcacccggtgaaactatttatgagttcttttggtgtgaagaaagggctcatgttgcatttccagccattgctacaaagaacctttatttgttcagtaacggtagaaaatccttcccgattaaaaacttcagacttgctgaatatcctgcaatgtcaagatgaccgatgttgagttgggtggatttgctaacgagtcagatttgaacatgaggctattggaacccaataggcgtcattgatggcggcaagccatagctttcaagttttaataaaatgcacaaaagagaa

SEQ ID NO: 73294 - DNA, 529 bp, Homo sapiens
cctcttcctagcttttggacaaagctggatggaagtcattttctcagaatttctgtttgccagaaagaaaattgaagacttaggtgaaaaagagagggagagatcaactgaatttcttatctggtatgttctgtttctgttttaggtaaaatgtcggttccaggaccttaccaggcggccactgggccttcctcagcaccatccgcacctccatcctatgaagagacagtggctgttaacagttattaccccacacctccagctcccatgcctgggccaactacggggcttgtgacggggcctgatgggaagggcatgaatcctccttcgtattatacccagccagcgcccatccccaataacaatccaagtacgtgtggcctcccaggccccccttaccattccttggccttccaccctgggaatcaggagagtgaccgaagtgactctgccaaagagtctaagtgaagtgccagtacgttccagttttacccccttaccttgaaattccacacgcagtcttttagat

SEQ ID NO: 73295 - DNA, 841 bp, Homo sapiens
  misc_feature (11)..(11): n is a, c, g, or t
  misc_feature (13)..(14): n is a, c, g, or t
  misc_feature (17)..(17): n is a, c, g, or t
gcacagaaatnanntcntaggtgcgaggcctgggtgttgagaggccagctcagacctcccggctcgacaggcggcgcgggcggcggtaaaatgtcggttccaggaccttaccaggcggccactgggccttcctcagcaccatccgcacctccatcctatgaagagacagtggctgttaacagttattaccccacacctccagctcccatgcctgggccaactacggggcttgtgacggggcctgatgggaagggcatgaatcctccttcgtattatacccagccagcgcccatccccaataacaatccaattaccgtgcagacggtctacgtgcagcaccccatcacctttttggaccgccctatccaaatgtgttgtccttcctgcaacaagatgatcgtgagtcagctgtcctataacgccggtgctctgacctggctgtcctgcgggagcctgtgcctgctggggtgcatagcgggctgctgcttcatccccttctgcgtggatgccctgcaggacgtggaccattactgtcccaactgcagagctctcctgggcacctacaagcgtttgtaggactcagccagacgtggagggagccgggtgccgcaggaagtcctttccacctctcatccagcttcacgcctggtggaggttctgccctggtggtctcacctctccagggggcccaccttcatgtcttcttttggggggaatacgtcgcaaaactaacaaatctccaaaccccagaaattgctgcttggagtcgtgcataggacttgcaaagacattccctggtgcagcccgtccgcccctgaccggccgcctaatgtattgccaa

SEQ ID NO: 73296 - DNA, 2199 bp, Homo sapiens
gcccttttctcggggcgcccgagaggccagctcagacctcccggctcgacaggcggcgcgggcggcggtaaaatgtcggttccaggaccttaccaggcggccactgggccttcctcagcaccatccgcacctccatcctatgaagagacagtggctgttaacagttattaccccacacctccagctcccatgcctgggccaactacggggcttgtgacggggcctgatgggaagggcatgaatcctccttcgtattatacccagccagcgcccatccccaataacaatccaattaccgtgcagacggtctacgtgcagcaccccatcacctttttggaccgccctatccaaatgtgttgtccttcctgcaacaagatgatcgtgagtcagctgtcctataacgccggtgctctgacctggctgtcctgcgggagcctgtgcctgctggggtgcatagcgggctgctgcttcatccccttctgcgtggatgccctgcaggacgtggaccattactgtcccaactgcagagctctcctgggcacctacaagcgtttgtaggactcagccagacgtggagggagccgggtgccgcaggaagtcctttccacctctcatccagcttcacgcctggtggaggttctgccctggtggtctcacctctccagggggcccaccttcatgtcttcttttggggggaatacgtcgcaaaactaacaaatctccaaaccccagaaattgctgcttggagtcgtgcataggacttgcaaagacattccccttgagtgtcagttccacggtttcctgcctccctgagaccctgagtcctgccatctaactgtgatcattgccctatccgaatatcttcctgtgatctgccatcagtggctcttttttcctgcttccatgggcctttctggtggcagtctcaaactgagaagccacagttgccttatttttgaggctgttctgcccagagctcggctgaaccagcctttagtgcctaccattatcttatccgtctcttcccgtccctgatgacaaagatcttgccttacagactttacaggcttggctttgagattctgtaactgcagacttcattagcacacagattcactttaatttcttaatttttttttttaaatacaaggagggggctattaacacccagtacagacatatccacaaggtcgtaaatgcatgctagaaaaatagggctggatcttatcactgccctgtctccccttgtttctctgtgccagatcttcagtgcccctttccatacagggatttttttctcatagagtaattatatgaacagtttttatgacctccttttggtctgaaatacttttgaacagaatttcttttttttaaaaaaaaacagagatggggtcttactatgttgcccaggctggtgtcgaactcctgggctcaagcgatccttctgccttggcctcccgaagtgctgggattgcaggcataagctaccatgctgggcctgaacataatttcaagaggaggatttataaaaccattttctgtaatcaaatgattggtgtcattttcccatttgccaatgtagtctcacttaaaaaaaaaaaaaagaaaaagaaatggataatttcatctactgcctttacttggggttaatgtgattcttaaacaccttcatcatggaactctcagagtggggtccgttttggtttcctggtggtgggttttgaaagataagggaaagcacattttgagcatgtctgggtaccatggtgcggatgcttgggaaccagaactgtttcagaggaatctaaagtctgattttagttttcagagacacagcttgttgtaaaacatgagaagacatgatttctaggactcaagcagcaagccaggattctaggttggctgctgtgtcatctttgaagtcaagacaaagctgggctcgaccttcaagggtcctcgttttgataatacttcagaatagggaactcatgtgaatactactatgtagaaataaaacctagaccttgagcgaacatctgtatattggttgaaaacgatagtggtaaccattgatcccccttcatttgatgtttggaaaattccagtaattatcatttttgcaacgaatatggataccacatagtactttggtgttacctgcttttgaaaaataaagtctttggttcacccggtgaa

SEQ ID NO: 73297 - DNA, 2360 bp, Homo sapiens
gtttctctccctgcccccgcgacttcgcgcaagatccgggaaggacacccgaggcccctgggagaccctggggaggtgaaagtcagagagcgaagcgggccgtggcccctaggcctgacccctccccgcggggtaaggcgggcaccccgcgagcgcaggggtcctcttactgctgatggcacccagctctgggcccagacgccgctcaccgtccaccgccggtgctgggtaaaatgtcggttccaggaccttaccaggcggccactgggccttcctcagcaccatccgcacctccatcctatgaagagacagtggctgttaacagttattaccccacacctccagctcccatgcctgggccaactacggggcttgtgacggggcctgatgggaagggcatgaatcctccttcgtattatacccagccagcgcccatccccaataacaatccaattaccgtgcagacggtctacgtgcagcaccccatcacctttttggaccgccctatccaaatgtgttgtccttcctgcaacaagatgatcgtgagtcagctgtcctataacgccggtgctctgacctggctgtcctgcgggagcctgtgcctgctggggtgcatagcgggctgctgcttcatccccttctgcgtggatgccctgcaggacgtggaccattactgtcccaactgcagagctctcctgggcacctacaagcgtttgtaggactcagccagacgtggagggagccgggtgccgcaggaagtcctttccacctctcatccagcttcacgcctggtggaggttctgccctggtggtctcacctctccagggggcccaccttcatgtcttcttttggggggaatacgtcgcaaaactaacaaatctccaaaccccagaaattgctgcttggagtcgtgcataggacttgcaaagacattccccttgagtgtcagttccacggtttcctgcctccctgagaccctgagtcctgccatctaactgtgatcattgccctatccgaatatcttcctgtgatctgccatcagtggctcttttttcctgcttccatgggcctttctggtggcagtctcaaactgagaagccacagttgccttatttttgaggctgttctgcccagagctcggctgaaccagcctttagtgcctaccattatcttatccgtctcttcccgtccctgatgacaaagatcttgccttacagactttacaggcttggctttgagattctgtaactgcagacttcattagcacacagattcactttaatttcttaatttttttttttaaatacaaggagggggctattaacacccagtacagacatatccacaaggtcgtaaatgcatgctagaaaaatagggctggatcttatcactgccctgtctccccttgtttctctgtgccagatcttcagtgcccctttccatacagggatttttttctcatagagtaattatatgaacagtttttatgacctccttttggtctgaaatacttttgaacagaatttcttttttttaaaaaaaaacagagatggggtcttactatgttgcccaggctggtgtcgaactcctgggctcaagcgatccttctgccttggcctcccgaagtgctgggattgcaggcataagctaccatgctgggcctgaacataatttcaagaggaggatttataaaaccattttctgtaatcaaatgattggtgtcattttcccatttgccaatgtagtctcacttaaaaaaaaaaaaaagaaaaagaaatggataatttcatctactgcctttacttggggttaatgtgattcttaaacaccttcatcatggaactctcagagtggggtccgttttggtttcctggtggtgggttttgaaagataagggaaagcacattttgagcatgtctgggtaccatggtgcggatgcttgggaaccagaactgtttcagaggaatctaaagtctgattttagttttcagagacacagcttgttgtaaaacatgagaagacatgatttctaggactcaagcagcaagccaggattctaggttggctgctgtgtcatctttgaagtcaagacaaagctgggctcgaccttcaagggtcctcgttttgataatacttcagaatagggaactcatgtgaatactactatgtagaaataaaacctagaccttgagcgaacatctgtatattggttgaaaacgatagtggtaaccattgatcccccttcatttgatgtttggaaaattccagtaattatcatttttgcaacgaatatggataccacatagtactttggtgttacctgcttttgaaaaataaagtctttggttcacccggtgaa

SEQ ID NO: 73298 - DNA, 2450 bp, Homo sapiens
  misc_feature (2369)..(2369): n is a, c, g, or t
gtttctctccctgcccccgcgacttcgcgcaagatccgggaaggacacccgaggcccctgggagaccctggggaggtgaaagtcagagagcgaagcgggccgtggcccctaggcctgacccctccccgcggggtaaggcgggcaccccgcgagcgcaggggtcctcttactgctgatggcacccagctctgggcccagacgccgctcaccgtccaccgccggtgctgggtaaaatgtcggttccaggaccttaccaggcggccactgggccttcctcagcaccatccgcacctccatcctatgaagagacagtggctgttaacagttattaccccacacctccagctcccatgcctgggccaactacggggcttgtgacggggcctgatgggaagggcatgaatcctccttcgtattatacccagccagcgcccatccccaataacaatccaattaccgtgcagacggtctacgtgcagcaccccatcacctttttggaccgccctatccaaatgtgttgtccttcctgcaacaagatgatcgtgagtcagctgtcctataacgccggtgctctgacctggctgtcctgcgggagcctgtgcctgctggggtgcatagcgggctgctgcttcatccccttctgcgtggatgccctgcaggacgtggaccattactgtcccaactgcagagctctcctgggcacctacaagcgtttgtaggactcagccagacgtggagggagccgggtgccgcaggaagtcctttccacctctcatccagcttcacgcctggtggaggttctgccctggtggtctcacctctccagggggcccaccttcatgtcttcttttggggggaatacgtcgcaaaactaacaaatctccaaaccccagaaattgctgcttggagtcgtgcataggacttgcaaagacattccccttgagtgtcagttccacggtttcctgcctccctgagaccctgagtcctgccatctaactgtgatcattgccctatccgaatatcttcctgtgatctgccatcagtggctcttttttcctgcttccatgggcctttctggtggcagtctcaaactgagaagccacagttgccttatttttgaggctgttctgcccagagctcggctgaaccagcctttagtgcctaccattatcttatccgtctcttcccgtccctgatgacaaagatcttgccttacagactttacaggcttggctttgagattctgtaactgcagacttcattagcacacagattcactttaatttcttaatttttttttttaaatacaaggagggggctattaacacccagtacagacatatccacaaggtcgtaaatgcatgctagaaaaatagggctggatcttatcactgccctgtctccccttgtttctctgtgccagatcttcagtgcccctttccatacagggatttttttctcatagagtaattatatgaacagtttttatgacctccttttggtctgaaatacttttgaacagaatttcttttttttaaaaaaaaacagagatggggtcttactatgttgcccaggctggtgtcgaactcctgggctcaagcgatccttctgccttggcctcccgaagtgctgggattgcaggcataagctaccatgctgggcctgaacataatttcaagaggaggatttataaaaccattttctgtaatcaaatgattggtgtcattttcccatttgccaatgtagtctcacttaaaaaaaaaaaaaagaaaaagaaatggataatttcatctactgcctttacttggggttaatgtgattcttaaacaccttcatcatggaactctcagagtggggtccgttttggtttcctggtggtgggttttgaaagataagggaaagcacattttgagcatgtctgggtaccatggtgcggatgcttgggaaccagaactgtttcagaggaatctaaagtctgattttagttttcagagacacagcttgttgtaaaacatgagaagacatgatttctaggactcaagcagcaagccaggattctaggttggctgctgtgtcatctttgaagtcaagacaaagctgggctcgaccttcaagggtcctcgttttgataatacttcagaatagggaactcatgtgaatactactatgtagaaataaaacctagaccttgagcgaacatctgtatattggttgaaaacgatagtggtaaccattgatcccccttcatttgatgtttggaaaattccagtaattatcatttttgcaacgaatatggataccacatagtactttggtgttacctgcttttgaaaaataaagtctttggttcacccggtgaaaaaaaaaanaaaaaaaaaaaaaaaaaaaatttggggggggtggggccggggaaaagtttttaaaaaatttggtgggggggggggcccagt

SEQ ID NO: 73299 - DNA, 2204 bp, Homo sapiens
cacgcgcagcatagcagagtcgacactagaggcatccaaagaataccggctcgacaggcggcgcgggcggcggtaaaatgtcggttccaggaccttaccaggcggccactgggccttcctcagcaccatccgcacctccatcctatgaagagacagtggctgttaacagttattaccccacacctccagctcccatgcctgggccaactacggggcttgtgacggggcctgatgggaagggcatgaatcctccttcgtattatacccagccagcgcccatccccaataacaatccaattaccgtgcagacggtctacgtgcagcaccccatcacctttttggaccgccctatccaaatgtgttgtccttcctgcaacaagatgatcgtgagtcagctgtcctataacgccggtgctctgacctggctgtcctgcgggagcctgtgcctgctggggtgcatagcgggctgctgcttcatccccttctgcgtggatgccctgcaggacgtggaccattactgtcccaactgcagagctctcctgggcacctacaagcgtttgtaggactcagccagacgtggagggagccgggtgccgcaggaagtcctttccacctctcatccagcttcacgcctggtggaggttctgccctggtggtctcacctctccagggggcccaccttcatgtcttcttttggggggaatacgtcgcaaaactaacaaatctccaaaccccagaaattgctgcttggagtcgtgcataggacttgcaaagacattccccttgagtgtcagttccacggtttcctgcctccctgagaccctgagtcctgccatctaactgtgatcattgccctatccgaatatcttcctgtgatctgccatcagtggctcttttttcctgcttccatgggcctttctggtggcagtctcaaactgagaagccacagttgccttatttttgaggctgttctgcccagagctcggctgaaccagcctttagtgcctaccattatcttatccgtctcttcccgtccctgatgacaaagatcttgccttacagactttacaggcttggctttgagattctgtaactgcagacttcattagcacacagattcactttaatttcttaatttttttttttaaatacaaggagggggctattaacacccagtacagacatatccacaaggtcgtaaatgcatgctagaaaaatagggctggatcttatcactgccctgtctccccttgtttctctgtgccagatcttcagtgcccctttccatacagggatttttttctcatagagtaattatatgaacagtttttatgacctccttttggtctgaaatacttttgaacagaatttcttttttttaaaaaaaaacagagatggggtcttactatgttgcccaggctggtgtcgaactcctgggctcaagcgatccttctgccttggcctcccgaagtgctgggattgcaggcataagctaccatgctgggcctgaacataatttcaagaggaggatttataaaaccattttctgtaatcaaatgattggtgtcattttcccatttgccaatgtagtctcacttaaaaaaaaaaaaaagaaaaagaaatggataatttcatctactgcctttacttggggttaatgtgattcttaaacaccttcatcatggaactctcagagtggggtccgttttggtttcctggtggtgggttttgaaagataagggaaagcacattttgagcatgtctgggtaccatggtgcggatgcttgggaaccagaactgtttcagaggaatctaaagtctgattttagttttcagagacacagcttgttgtaaaacatgagaagacatgatttctaggactcaagcagcaagccaggattctaggttggctgctgtgtcatctttgaagtcaagacaaagctgggctcgaccttcaagggtcctcgttttgataatacttcagaatagggaactcatgtgaatactactatgtagaaataaaacctagaccttgagcgaacatctgtatattggttgaaaacgatagtggtaaccattgatcccccttcatttgatgtttggaaaattccagtaattatcatttttgcaacgaatatggataccacatagtactttggtgttacctgcttttgaaaaataaagtctttggttcacccggtgaa

SEQ ID NO: 73300 - DNA, 2217 bp, Homo sapiens
ggcggacgggtggggctggcaccgagaggcaggggcaggataggagagtgggggagacaccaggtccgcgccaggcgtctcgggggtaaaatgtcggttccaggaccttaccaggcggccactgggccttcctcagcaccatccgcacctccatcctatgaagagacagtggctgttaacagttattaccccacacctccagctcccatgcctgggccaactacggggcttgtgacggggcctgatgggaagggcatgaatcctccttcgtattatacccagccagcgcccatccccaataacaatccaattaccgtgcagacggtctacgtgcagcaccccatcacctttttggaccgccctatccaaatgtgttgtccttcctgcaacaagatgatcgtgagtcagctgtcctataacgccggtgctctgacctggctgtcctgcgggagcctgtgcctgctggggtgcatagcgggctgctgcttcatccccttctgcgtggatgccctgcaggacgtggaccattactgtcccaactgcagagctctcctgggcacctacaagcgtttgtaggactcagccagacgtggagggagccgggtgccgcaggaagtcctttccacctctcatccagcttcacgcctggtggaggttctgccctggtggtctcacctctccagggggcccaccttcatgtcttcttttggggggaatacgtcgcaaaactaacaaatctccaaaccccagaaattgctgcttggagtcgtgcataggacttgcaaagacattccccttgagtgtcagttccacggtttcctgcctccctgagaccctgagtcctgccatctaactgtgatcattgccctatccgaatatcttcctgtgatctgccatcagtggctcttttttcctgcttccatgggcctttctggtggcagtctcaaactgagaagccacagttgccttatttttgaggctgttctgcccagagctcggctgaaccagcctttagtgcctaccattatcttatccgtctcttcccgtccctgatgacaaagatcttgccttacagactttacaggcttggctttgagattctgtaactgcagacttcattagcacacagattcactttaatttcttaatttttttttttaaatacaaggagggggctattaacacccagtacagacatatccacaaggtcgtaaatgcatgctagaaaaatagggctggatcttatcactgccctgtctccccttgtttctctgtgccagatcttcagtgcccctttccatacagggatttttttctcatagagtaattatatgaacagtttttatgacctccttttggtctgaaatacttttgaacagaatttcttttttttaaaaaaaaacagagatggggtcttactatgttgcccaggctggtgtcgaactcctgggctcaagcgatccttctgccttggcctcccgaagtgctgggattgcaggcataagctaccatgctgggcctgaacataatttcaagaggaggatttataaaaccattttctgtaatcaaatgattggtgtcattttcccatttgccaatgtagtctcacttaaaaaaaaaaaaaagaaaaagaaatggataatttcatctactgcctttacttggggttaatgtgattcttaaacaccttcatcatggaactctcagagtggggtccgttttggtttcctggtggtgggttttgaaagataagggaaagcacattttgagcatgtctgggtaccatggtgcggatgcttgggaaccagaactgtttcagaggaatctaaagtctgattttagttttcagagacacagcttgttgtaaaacatgagaagacatgatttctaggactcaagcagcaagccaggattctaggttggctgctgtgtcatctttgaagtcaagacaaagctgggctcgaccttcaagggtcctcgttttgataatacttcagaatagggaactcatgtgaatactactatgtagaaataaaacctagaccttgagcgaacatctgtatattggttgaaaacgatagtggtaaccattgatcccccttcatttgatgtttggaaaattccagtaattatcatttttgcaacgaatatggataccacatagtactttggtgttacctgcttttgaaaaataaagtctttggttcacccggtgaa

SEQ ID NO: 73301 - DNA, 2182 bp, Homo sapiens
tcaggctgtacggccccgggtttatggctcgacaggcggcgcgggcggcggtaaaatgtcggttccaggaccttaccaggcggccactgggccttcctcagcaccatccgcacctccatcctatgaagagacagtggctgttaacagttattaccccacacctccagctcccatgcctgggccaactacggggcttgtgacggggcctgatgggaagggcatgaatcctccttcgtattatacccagccagcgcccatccccaataacaatccaattaccgtgcagacggtctacgtgcagcaccccatcacctttttggaccgccctatccaaatgtgttgtccttcctgcaacaagatgatcgtgagtcagctgtcctataacgccggtgctctgacctggctgtcctgcgggagcctgtgcctgctggggtgcatagcgggctgctgcttcatccccttctgcgtggatgccctgcaggacgtggaccattactgtcccaactgcagagctctcctgggcacctacaagcgtttgtaggactcagccagacgtggagggagccgggtgccgcaggaagtcctttccacctctcatccagcttcacgcctggtggaggttctgccctggtggtctcacctctccagggggcccaccttcatgtcttcttttggggggaatacgtcgcaaaactaacaaatctccaaaccccagaaattgctgcttggagtcgtgcataggacttgcaaagacattccccttgagtgtcagttccacggtttcctgcctccctgagaccctgagtcctgccatctaactgtgatcattgccctatccgaatatcttcctgtgatctgccatcagtggctcttttttcctgcttccatgggcctttctggtggcagtctcaaactgagaagccacagttgccttatttttgaggctgttctgcccagagctcggctgaaccagcctttagtgcctaccattatcttatccgtctcttcccgtccctgatgacaaagatcttgccttacagactttacaggcttggctttgagattctgtaactgcagacttcattagcacacagattcactttaatttcttaatttttttttttaaatacaaggagggggctattaacacccagtacagacatatccacaaggtcgtaaatgcatgctagaaaaatagggctggatcttatcactgccctgtctccccttgtttctctgtgccagatcttcagtgcccctttccatacagggatttttttctcatagagtaattatatgaacagtttttatgacctccttttggtctgaaatacttttgaacagaatttcttttttttaaaaaaaaacagagatggggtcttactatgttgcccaggctggtgtcgaactcctgggctcaagcgatccttctgccttggcctcccgaagtgctgggattgcaggcataagctaccatgctgggcctgaacataatttcaagaggaggatttataaaaccattttctgtaatcaaatgattggtgtcattttcccatttgccaatgtagtctcacttaaaaaaaaaaaaaagaaaaagaaatggataatttcatctactgcctttacttggggttaatgtgattcttaaacaccttcatcatggaactctcagagtggggtccgttttggtttcctggtggtgggttttgaaagataagggaaagcacattttgagcatgtctgggtaccatggtgcggatgcttgggaaccagaactgtttcagaggaatctaaagtctgattttagttttcagagacacagcttgttgtaaaacatgagaagacatgatttctaggactcaagcagcaagccaggattctaggttggctgctgtgtcatctttgaagtcaagacaaagctgggctcgaccttcaagggtcctcgttttgataatacttcagaatagggaactcatgtgaatactactatgtagaaataaaacctagaccttgagcgaacatctgtatattggttgaaaacgatagtggtaaccattgatcccccttcatttgatgtttggaaaattccagtaattatcatttttgcaacgaatatggataccacatagtactttggtgttacctgcttttgaaaaataaagtctttggttcacccggtgaa

SEQ ID NO: 73302 - DNA, 2250 bp, Homo sapiens
acatgcccgaaggcacagagagtgtcttggtctgtccggacgcgtctgtagagttacaggaagagaagggccgccctccagagggccgggagcgccccagcgcgggtccggggtcgaggtaaaatgtcggttccaggaccttaccaggcggccactgggccttcctcagcaccatccgcacctccatcctatgaagagacagtggctgttaacagttattaccccacacctccagctcccatgcctgggccaactacggggcttgtgacggggcctgatgggaagggcatgaatcctccttcgtattatacccagccagcgcccatccccaataacaatccaattaccgtgcagacggtctacgtgcagcaccccatcacctttttggaccgccctatccaaatgtgttgtccttcctgcaacaagatgatcgtgagtcagctgtcctataacgccggtgctctgacctggctgtcctgcgggagcctgtgcctgctggggtgcatagcgggctgctgcttcatccccttctgcgtggatgccctgcaggacgtggaccattactgtcccaactgcagagctctcctgggcacctacaagcgtttgtaggactcagccagacgtggagggagccgggtgccgcaggaagtcctttccacctctcatccagcttcacgcctggtggaggttctgccctggtggtctcacctctccagggggcccaccttcatgtcttcttttggggggaatacgtcgcaaaactaacaaatctccaaaccccagaaattgctgcttggagtcgtgcataggacttgcaaagacattccccttgagtgtcagttccacggtttcctgcctccctgagaccctgagtcctgccatctaactgtgatcattgccctatccgaatatcttcctgtgatctgccatcagtggctcttttttcctgcttccatgggcctttctggtggcagtctcaaactgagaagccacagttgccttatttttgaggctgttctgcccagagctcggctgaaccagcctttagtgcctaccattatcttatccgtctcttcccgtccctgatgacaaagatcttgccttacagactttacaggcttggctttgagattctgtaactgcagacttcattagcacacagattcactttaatttcttaatttttttttttaaatacaaggagggggctattaacacccagtacagacatatccacaaggtcgtaaatgcatgctagaaaaatagggctggatcttatcactgccctgtctccccttgtttctctgtgccagatcttcagtgcccctttccatacagggatttttttctcatagagtaattatatgaacagtttttatgacctccttttggtctgaaatacttttgaacagaatttcttttttttaaaaaaaaacagagatggggtcttactatgttgcccaggctggtgtcgaactcctgggctcaagcgatccttctgccttggcctcccgaagtgctgggattgcaggcataagctaccatgctgggcctgaacataatttcaagaggaggatttataaaaccattttctgtaatcaaatgattggtgtcattttcccatttgccaatgtagtctcacttaaaaaaaaaaaaaagaaaaagaaatggataatttcatctactgcctttacttggggttaatgtgattcttaaacaccttcatcatggaactctcagagtggggtccgttttggtttcctggtggtgggttttgaaagataagggaaagcacattttgagcatgtctgggtaccatggtgcggatgcttgggaaccagaactgtttcagaggaatctaaagtctgattttagttttcagagacacagcttgttgtaaaacatgagaagacatgatttctaggactcaagcagcaagccaggattctaggttggctgctgtgtcatctttgaagtcaagacaaagctgggctcgaccttcaagggtcctcgttttgataatacttcagaatagggaactcatgtgaatactactatgtagaaataaaacctagaccttgagcgaacatctgtatattggttgaaaacgatagtggtaaccattgatcccccttcatttgatgtttggaaaattccagtaattatcatttttgcaacgaatatggataccacatagtactttggtgttacctgcttttgaaaaataaagtctttggttcacccggtgaa

SEQ ID NO: 73303 - DNA, 832 bp, Homo sapiens
gctgcgagggggaaactggggaaagggcctaattccccagtctccacctcgaatcaggaaagagaaggggcgggctgctgggcaaaagaggtgaagtgtccggacgcaccctcatcgacattggttcaggccccaccgtgtaccagctgctcagtgcctgcagccactttgaggacatcaccatgacagatttcctggaggtcaaccgccaggagctggggcgctggctgcaggaggagccgggggccttcaactggagcatgtacagccaacatgcctgcctcattgagggcaagggggaatgctggcaggataaggagcgccagctgcgagccagggtgaaacgggtcctgcccatcgacgtgcaccagccccagcccctgggtgctgggagcccagctcccctgcctgctgacgccctggtctctgccttctgcttggaggctgtgagcccagatcttgccagctttcagcgggccctggaccacatcaccacgctgctgaggcctggggggcacctcctcctcatcggggccctggaggagtcgtggtacctggctggggaggccaggctgacggtggtgccagtgtctgaggaggaggtgagggaggccctggtgcgtagtggctacaaggtccgggacctccgcacctatatcatgcctgcccaccttcagacaggcgtagatgatgtcaagggcgtcttcttcgcctgggctcagaaggttgggctgtgagggctgtacctggtgccctgtggcccccacccacctggattccctgttctttgaagtggcacctaataaagaaataataccctgccgctgcggtc

SEQ ID NO: 73304 - DNA, 593 bp, Homo sapiens
ctccgcaacaactacgcgccccctcgcggggacctgtgcaacccgaacggcgtcgggccgtggaagctgcgctgcttggcgcagaccttcgccaccggtgagcgggggaaactgaggcacgagggacaagaggtcgtcggggagtgaaagcaggcgcagggaaataaaaagaaggaaagggagacagaccaggcgcctaacagatggggaccaagaaacaagagatagctgagaggtgcaaacagaagagaaaaaggagcaacatcccttaggagaggggcagaggagagagaggtggagagagggggcggagagtgctcagaattgagagctaaggtgggggatgcaggacagactgaggtggagatgcataggaggaaatggaggcagatgtgggacaggggtgagaaactgccaggatttcctcgctgagcctggctggtaggtatagttgttttctttctttttctttattttattttcatttatttacttatttttattttttatttgttttgagacggagtttcgctcttgttgcccaggctggagtacaatggcgccatctcggctcactgcaacctccgcctccc

SEQ ID NO: 73305 - DNA, 1166 bp, Homo sapiens
ggacgattgccgctgcagccgccgccccactcacctccggtgtgtctgcagcccggacactaagggagatggatgaatgggtggggaggatgcggcgcacatggccccgggcggctcggcggtcagctgccgcccccacagcggaccggtcggggcgggggtcgggcggtagaaaaaagggccgcgaggcgagcggggcactgggcggaccgcggcggcagcatgagcggcgcagaccgtagccccaatgcgggcgcagcccctgactcggccccgggccaggcggcggtggcttcggcctaccagcgcttcgagccgcgcgcctacctccgcaacaactacgcgccccctcgcggggacctgtgcaacccgaacggcgtcgggccgtggaagctgcgctgcttggcgcagaccttcgccaccggtgaagtgtccggacgcaccctcatcgacattggttcaggccccaccgtgtaccagctgctcagtgcctgcagccactttgaggacatcaccatgacagatttcctggaggtcaaccgccaggagctggggcgctggctgcaggaggagccgggggccttcaactggagcatgtacagccaacatgcctgcctcattgagggcaagggggaatgctggcaggataaggagcgccagctgcgagccagggtgaaacgggtcctgcccatcgacgtgcaccagccccagcccctgggtgctgggagcccagctcccctgcctgctgacgccctggtctctgccttctgcttggaggctgtgagcccagatcttgccagctttcagcgggccctggaccacatcaccacgctgctgaggcctggggggcacctcctcctcatcggggccctggaggagtcgtggtacctggctggggaggccaggctgacggtggtgccagtgtctgaggaggaggtgagggaggccctggtgcgtagtggctacaaggtccgggacctccgcacctatatcatgcctgcccaccttcagacaggcgtagatgatgtcaagggcgtcttcttcgcctgggctcagaaggttgggctgtgagggctgtacctggtgccctgtggcccccacccacctggattccctgttctttgaagtggcacctaataaagaaataataccctgccgctgcggtc

SEQ ID NO: 73306 - DNA, 1280 bp, Homo sapiens
ggacgattgccgctgcagccgccgccccactcacctccggtgtgtctgcagcccggacactaagggagatggatgaatgggtggggaggatgcggcgcacatggccccgggcggctcggcggtcagctgccgcccccacagcggaccggtcggggcgggggtcgggcggtagaaaaaagggccgcgaggcgagcggggcactgggcggaccgcggcggcagcatgagcggcgcagaccgtagccccaatgcgggcgcagcccctgactcggccccgggccaggcggcggtggcttcggcctaccagcgcttcgagccgcgcgcctacctccgcaacaactacgcgccccctcgcggggacctgtgcaacccgaacggcgtcgggccgtggaagctgcgctgcttggcgcagaccttcgccaccggtgaagtgtccggacgcaccctcatcgacattggttcaggccccaccgtgtaccagctgctcagtgcctgcagccactttgaggacatcaccatgacagatttcctggaggtcaaccgccaggagctggggcgctggctgcaggaggagccgggggccttcaactggagcatgtacagccaacatgcctgcctcattgagggcaaggggtaaggactggggggtgagggttggggaggaggcttcccatagagtggctggttggggcaacagaggcctgagcgtagaacagccttgagccctgccttgtgcctcctgcacagggaatgctggcaggataaggagcgccagctgcgagccagggtgaaacgggtcctgcccatcgacgtgcaccagccccagcccctgggtgctgggagcccagctcccctgcctgctgacgccctggtctctgccttctgcttggaggctgtgagcccagatcttgccagctttcagcgggccctggaccacatcaccacgctgctgaggcctggggggcacctcctcctcatcggggccctggaggagtcgtggtacctggctggggaggccaggctgacggtggtgccagtgtctgaggaggaggtgagggaggccctggtgcgtagtggctacaaggtccgggacctccgcacctatatcatgcctgcccaccttcagacaggcgtagatgatgtcaagggcgtcttcttcgcctgggctcagaaggttgggctgtgagggctgtacctggtgccctgtggcccccacccacctggattccctgttctttgaagtggcacctaataaagaaataataccctgccgctgcggtc

SEQ ID NO: 73307 - DNA, 464 bp, Homo sapiens
tactactactagattcgcggccgcgtcgaccttgtttaatgaagaaaaatgcttggggtggaagggactcttgagatttcaccagagactttttctttttaataaatcaaaccttttgatgatttgaggttttatctgcagttttggaagcagtcacaaatgagacctgttataaggtggtatttttttttttcttctggacagtatttaaaggatcttattcttatttcccagggaaattctgggctcccacaaagtaaaaaaaaaaaaaaatcatagaaaaagaatgagcaggaatagttcttattccagaattgtacagtattcaccttaagttgattttttttctccttctgcaattgaactgaatacatttttcatgcatgttttccagaaaatagaagtattaatgttattaaaaagattattttttttattaaaggctatttatattatagaaacta

SEQ ID NO: 73308 - DNA, 4300 bp, Homo sapiens
  misc_feature (15)..(15): n is a, c, g, or t
  misc_feature (23)..(23): n is a, c, g, or t
  misc_feature (27)..(27): n is a, c, g, or t
  misc_feature (30)..(30): n is a, c, g, or t
  misc_feature (59)..(59): n is a, c, g, or t
  misc_feature (64)..(64): n is a, c, g, or t
  misc_feature (86)..(86): n is a, c, g, or t
  misc_feature (90)..(90): n is a, c, g, or t
  misc_feature (354)..(354): n is a, c, g, or t
ggaggcgggggcgtngcgcctcntccntcntccctcggcgccgctgccgcccccgcggngtggngacccgagtgcggttagagccngganctggaagagccccgagcgtttctgctttgggacaaccatacatctaattccttaaagtagttttatatgtaaaacttgcaaagaatcagaacaatgcctccaagaccatcatcaggtgaactgtggggcatccacttgatgcccccaagaatcctagtagaatgtttactaccaaatggaatgatagtgactttagaatgcctccgtgaggctacattaataaccataaagcatgaactatttaaagaagcaagaaaatacccnctccatcaacttcttcaagatgaatcttcttacattttcgtaagtgttacccaagaagcagaaagggaagaattttttgatgaaacaagacgactttgtgaccttcggctttttcaaccctttttaaaagtaattgaaccagtaggcaaccgtgaagaaaagatcctcaatcgagaaattggttttgctatcggcatgccagtgtgtgaatttgatatggttaaagatccagaagtacaggacttccgaagaaatattctgaacgtttgtaaagaagctgtggatcttagggacctcaattcacctcatagtagagcaatgtatgtctatcctccaaatgtagaatcttcaccagaattgccaaagcacatatataataaattagataaagggcaaataatagtggtgatctgggtaatagtttctccaaataatgacaagcagaagtatactctgaaaatcaaccatgactgtgtaccagaacaagtaattgctgaagcaatcaggaaaaaaactcgaagtatgttgctatcctctgaacaactaaaactctgtgttttagaatatcagggcaagtatattttaaaagtgtgtggatgtgatgaatacttcctagaaaaatatcctctgagtcagtataagtatataagaagctgtataatgcttgggaggatgcccaatttgatgttgatggctaaagaaagcctttattctcaactgccaatggactgttttacaatgccatcttattccagacgcatttccacagctacaccatatatgaatggagaaacatctacaaaatccctttgggttataaatagtgcactcagaataaaaattctttgtgcaacctacgtgaatgtaaatattcgagacattgataagatctatgttcgaacaggtatctaccatggaggagaacccttatgtgacaatgtgaacactcaaagagtaccttgttccaatcccaggtggaatgaatggctgaattatgatatatacattcctgatcttcctcgtgctgctcgactttgcctttccatttgctctgttaaaggccgaaagggtgctaaagaggaacactgtccattggcatggggaaatataaacttgtttgattacacagacactctagtatctggaaaaatggctttgaatctttggccagtacctcatggattagaagatttgctgaaccctattggtgttactggatcaaatccaaataaagaaactccatgcttagagttggagtttgactggttcagcagtgtggtaaagttcccagatatgtcagtgattgaagagcatgccaattggtctgtatcccgagaagcaggatttagctattcccacgcaggactgagtaacagactagctagagacaatgaattaagggaaaatgacaaagaacagctcaaagcaatttctacacgagatcctctctctgaaatcactgagcaggagaaagattttctatggagtcacagacactattgtgtaactatccccgaaattctacccaaattgcttctgtctgttaaatggaattctagagatgaagtagcccagatgtattgcttggtaaaagattggcctccaatcaaacctgaacaggctatggaacttctggactgtaattacccagatcctatggttcgaggttttgctgttcggtgcttggaaaaatatttaacagatgacaaactttctcagtatttaattcagctagtacaggtcctaaaatatgaacaatatttggataacttgcttgtgagatttttactgaagaaagcattgactaatcaaaggattgggcactttttcttttggcatttaaaatctgagatgcacaataaaacagttagccagaggtttggcctgcttttggagtcctattgtcgtgcatgtgggatgtatttgaagcacctgaataggcaagtcgaggcaatggaaaagctcattaacttaactgacattctcaaacaggagaagaaggatgaaacacaaaaggtacagatgaagtttttagttgagcaaatgaggcgaccagatttcatggatgctctacagggctttctgtctcctctaaaccctgctcatcaactaggaaacctcaggcttgaagagtgtcgaattatgtcctctgcaaaaaggccactgtggttgaattgggagaacccagacatcatgtcagagttactgtttcagaacaatgagatcatctttaaaaatggggatgatttacggcaagatatgctaacacttcaaattattcgtattatggaaaatatctggcaaaatcaaggtcttgatcttcgaatgttaccttatggttgtctgtcaatcggtgactgtgtgggacttattgaggtggtgcgaaattctcacactattatgcaaattcagtgcaaaggcggcttgaaaggtgcactgcagttcaacagccacacactacatcagtggctcaaagacaagaacaaaggagaaatatatgatgcagccattgacctgtttacacgttcatgtgctggatactgtgtagctaccttcattttgggaattggagatcgtcacaatagtaacatcatggtgaaagacgatggacaactgtttcatatagattttggacactttttggatcacaagaagaaaaaatttggttataaacgagaacgtgtgccatttgttttgacacaggatttcttaatagtgattagtaaaggagcccaagaatgcacaaagacaagagaatttgagaggtttcaggagatgtgttacaaggcttatctagctattcgacagcatgccaatctcttcataaatcttttctcaatgatgcttggctctggaatgccagaactacaatcttttgatgacattgcatacattcgaaagaccctagccttagataaaactgagcaagaggctttggagtatttcatgaaacaaatgaatgatgcacatcatggtggctggacaacaaaaatggattggatcttccacacaattaaacagcatgcattgaactgaaaagataactgagaaaatgaaagctcactctggattccacactgcactgttaataactctcagcaggcaaagaccgattgcataggaattgcacaatccatgaacagcattagaatttacagcaagaacagaaataaaatactatataatttaaataatgtaaacgcaaacagggtttgatagcacttaaactagttcatttcaaaattaagctttagaataatgcgcaatttcatgttatgccttaagtccaaaaaggtaaactttgaagattgtttgtatctttttttaaaaaacaaaacaaaacaaaaatccccaaaatatatagaaatgatggagaaggaaaaagtgatggttttttttgtcttgcaaatgttctatgttttgaaatgtggacacaacaaaggctgttattgcattaggtgtaagtaaactggagtttatgttaaattacattgattggaaaagaatgaaaatttcttatttttccattgctgttcaatttatagtttgaagtgggtttttgactgcttgtttaatgaagataataaatcaaaccttttgatgatttgaggttttatctgcagttttggaagcagtcacaaatgagacctgttataaggtggtatttttttttttcttctggacagtatttaaaggatcttattcttatttcccagggaaattctgggctcccacaaagtaaaaaaaaaaaaaaatcatagaaaaagaatgagcaggaatagttcttattccagaattgtacagtattcaccttaagttgattttttttctccttctgcaattgaactgaatacatttttcatgcatgttttccagaaaatagaagtattaatgttattaaaaagattattttttttattaaaggctatttatattatagaaacta

SEQ ID NO: 73309 - DNA, 4300 bp, Homo sapiens
  misc_feature (15)..(15): n is a, c, g, or t
  misc_feature (23)..(23): n is a, c, g, or t
  misc_feature (27)..(27): n is a, c, g, or t
  misc_feature (30)..(30): n is a, c, g, or t
  misc_feature (59)..(59): n is a, c, g, or t
  misc_feature (64)..(64): n is a, c, g, or t
  misc_feature (86)..(86): n is a, c, g, or t
  misc_feature (90)..(90): n is a, c, g, or t
  misc_feature (354)..(354): n is a, c, g, or t
ggaggcgggggcgtngcgcctcntccntcntccctcggcgccgctgccgcccccgcggngtggngacccgagtgcggttagagccngganctggaagagccccgagcgtttctgctttgggacaaccatacatctaattccttaaagtagttttatatgtaaaacttgcaaagaatcagaacaatgcctccaagaccatcatcaggtgaactgtggggcatccacttgatgcccccaagaatcctagtagaatgtttactaccaaatggaatgatagtgactttagaatgcctccgtgaggctacattaataaccataaagcatgaactatttaaagaagcaagaaaatacccnctccatcaacttcttcaagatgaatcttcttacattttcgtaagtgttacccaagaagcagaaagggaagaattttttgatgaaacaagacgactttgtgaccttcggctttttcaaccctttttaaaagtaattgaaccagtaggcaaccgtgaagaaaagatcctcaatcgagaaattggttttgctatcggcatgccagtgtgtgaatttgatatggttaaagatccagaagtacaggacttccgaagaaatattctgaacgtttgtaaagaagctgtggatcttagggacctcaattcacctcatagtagagcaatgtatgtctatcctccaaatgtagaatcttcaccagaattgccaaagcacatatataataaattagataaagggcaaataatagtggtgatctgggtaatagtttctccaaataatgacaagcagaagtatactctgaaaatcaaccatgactgtgtaccagaacaagtaattgctgaagcaatcaggaaaaaaactcgaagtatgttgctatcctctgaacaactaaaactctgtgttttagaatatcagggcaagtatattttaaaagtgtgtggatgtgatgaatacttcctagagatgcccaatttgatgttgatggctaaagaaagcctttattctcaactgccaatggactgttttacaatgccatcttattccagacgcatttccacagctacaccatatatgaatggagaaacatctacaaaatccctttgggttataaatagtgcactcagaataaaaattctttgtgcaacctacgtgaatgtaaatattcgagacattgataagatctatgttcgaacaggtatctaccatggaggagaacccttatgtgacaatgtgaacactcaaagagtaccttgttccaatcccaggtggaatgaatggctgaattatgatatatacattcctgatcttcctcgtgctgctcgactttgcctttccatttgctctgttaaaggccgaaagggtgctaaagaggaacactgtccattggcatggggaaatataaacttgtttgattacacagacactctagtatctggaaaaatggctttgaatctttggccagtacctcatggattagaagatttgctgaaccctattggtgttactggatcaaatccaaataaagaaactccatgcttagagttggagtttgactggttcagcagtgtggtaaagttcccagatatgtcagtgattgaagagcatgccaattggtctgtatcccgagaagcaggatttagctattcccacgcaggactgagtaacagactagctagagacaatgaattaagggaaaatgacaaagaacagctcaaagcaatttctacacgagatcctctctctgaaatcactgagcaggagaaagattttctatggagtcacagacactattgtgtaactatccccgaaattctacccaaattgcttctgtctgttaaatggaattctagagatgaagtagcccagatgtattgcttggtaaaagattggcctccaatcaaacctgaacaggctatggaacttctggactgtaattacccagatcctatggttcgaggttttgctgttcggtgcttggaaaaatatttaacagatgacaaactttctcagtatttaattcagctagtacaggtcctaaaatatgaacaatatttggataacttgcttgtgagatttttactgaagaaagcattgactaatcaaaggattgggcactttttcttttggcatttaaaatctgagatgcacaataaaacagttagccagaggtttggcctgcttttggagtcctattgtcgtgcatgtgggatgtatttgaagcacctgaataggcaagtcgaggcaatggaaaagctcattaacttaactgacattctcaaacaggagaagaaggatgaaacacaaaaggtacagatgaagtttttagttgagcaaatgaggcgaccagatttcatggatgctctacagggctttctgtctcctctaaaccctgctcatcaactaggaaacctcaggcttgaagagtgtcgaattatgtcctctgcaaaaaggccactgtggttgaattgggagaacccagacatcatgtcagagttactgtttcagaacaatgagatcatctttaaaaatggggatgatttacggcaagatatgctaacacttcaaattattcgtattatggaaaatatctggcaaaatcaaggtcttgatcttcgaatgttaccttatggttgtctgtcaatcggtgactgtgtgggacttattgaggtggtgcgaaattctcacactattatgcaaattcagtgcaaaggcggcttgaaaggtgcactgcagttcaacagccacacactacatcagtggctcaaagacaagaacaaaggagaaatatatgatgcagccattgacctgtttacacgttcatgtgctggatactgtgtagctaccttcattttgggaattggagatcgtcacaatagtaacatcatggtgaaagacgatggacaactgtttcatatagattttggacactttttggatcacaagaagaaaaaatttggttataaacgagaacgtgtgccatttgttttgacacaggatttcttaatagtgattagtaaaggagcccaagaatgcacaaagacaagagaatttgagaggtttcaggagatgtgttacaaggcttatctagctattcgacagcatgccaatctcttcataaatcttttctcaatgatgcttggctctggaatgccagaactacaatcttttgatgacattgcatacattcgaaagaccctagccttagataaaactgagcaagaggctttggagtatttcatgaaacaaatgaatgatgcacatcatggtggctggacaacaaaaatggattggatcttccacacaattaaacagcatgcattgaactgaaaagataactgagaaaatgaaagctcactctggattccacactgcactgttaataactctcagcaggcaaagaccgattgcataggaattgcacaatccatgaacagcattagaatttacagcaagaacagaaataaaatactatataatttaaataatgtaaacgcaaacagggtttgatagcacttaaactagttcatttcaaaattaagctttagaataatgcgcaatttcatgttatgccttaagtccaaaaaggtaaactttgaagattgtttgtatctttttttaaaaaacaaaacaaaacaaaaatccccaaaatatatagaaatgatggagaaggaaaaagtgatggttttttttgtcttgcaaatgttctatgttttgaaatgtggacacaacaaaggctgttattgcattaggtgtaagtaaactggagtttatgttaaattacattgattggaaaagaatgaaaatttcttatttttccattgctgttcaatttatagtttgaagtgggtttttgactgcttgtttaatgaagaaaaatgcttggggtggaagggactcttgagatttcaccagagactttttctttttaataaatcaaaccttttgatgatttgaggttttatctgcagttttggaagcagtcacaaatgagacctgttataaggtggtatttttttttttcttctggacagtatttaaaggatcttattcttatttcccagggaaattctgggctcccacaaagtaaaaaaaaaaaaaaatcatagaaaaagaatgagcaggaatagttcttattccagaattgtacagtattcaccttaagttgattttttttctccttctgcaattgaactgaatacatttttcatgcatgttttccagaaaatagaagtattaatgttattaaaaagattattttttttattaaaggctatttatattatagaaacta

SEQ ID NO: 73310 - DNA, 2560 bp, Homo sapiens
ttgattttaatgtaactgagtatgaaaagtttattgatacagttttagattacattttgcaacttaagaaacttatcttgtcaggttttagaatagtaccaaagaaaaatatcacaattatctgaaaagtctattataatactccttctttttctacctacctatctttgtgaggccagattttctttttatactttaattaaaacattgcattagattgcatacaaaagcatatatgagaatccagctgggtactatgaagccagacatttaaaaatttttttaaatgtgaaagaatttcactcttctcactaaattttttaaatgcattttttgtttcatgaaatatgttacttatattaacatgtcatagtttgttgcttttaaatgaattagtaaatatttaaaatttttattttccctatttcaatttctaatatcattagatgtaattcacataactaaaagctctttggagtcctcagtaatttctacaagtgtaaaggagtcctgagaccaaaattgagaacttctgccctacagttttatttcgatgtcaattaaacatctttaaattaacacatatttttaaaatcataaatgtttgtaaaattttaattgccacaataattttcttaattcttttctgataaaaatacagtgctttctcagttgaaggttataataaatgatgacaggtaattttgaggattattccaggagtatgtttatcacaccataaaaaagaaaattaaaattggggaaaggcagtaaaggtcatgcatgacaaatttactaataaaatactcatgttttagcctgttaaaacatttgctattttaaaattccatcatttaattgtaaacgtgttactcctctttcagaatgttaccttatggttgtctgtcaatcggtgactgtgtgggacttattgaggtggtgcgaaattctcacactattatgcaaattcagtgcaaaggcggcttgaaaggtgcactgcagttcaacagccacacactacatcagtggctcaaagacaagaacaaaggagaaatatatgatgcagccattgacctgtttacacgttcatgtgctggatactgtgtagctaccttcattttgggaattggagatcgtcacaatagtaacatcatggtgaaagacgatggacaactgtttcatatagattttggacactttttggatcacaagaagaaaaaatttggttataaacgagaacgtgtgccatttgttttgacacaggatttcttaatagtgattagtaaaggagcccaagaatgcacaaagacaagagaatttgagaggtttcaggagatgtgttacaaggcttatctagctattcgacagcatgccaatctcttcataaatcttttctcaatgatgcttggctctggaatgccagaactacaatcttttgatgacattgcatacattcgaaagaccctagccttagataaaactgagcaagaggctttggagtatttcatgaaacaaatgaatgatgcacatcatggtggctggacaacaaaaatggattggatcttccacacaattaaacagcatgcattgaactgaaaagataactgagaaaatgaaagctcactctggattccacactgcactgttaataactctcagcaggcaaagaccgattgcataggaattgcacaatccatgaacagcattagaatttacagcaagaacagaaataaaatactatataatttaaataatgtaaacgcaaacagggtttgatagcacttaaactagttcatttcaaaattaagctttagaataatgcgcaatttcatgttatgccttaagtccaaaaaggtaaactttgaagattgtttgtatctttttttaaaaaacaaaacaaaacaaaaatccccaaaatatatagaaatgatggagaaggaaaaagtgatggttttttttgtcttgcaaatgttctatgttttgaaatgtggacacaacaaaggctgttattgcattaggtgtaagtaaactggagtttatgttaaattacattgattggaaaagaatgaaaatttcttatttttccattgctgttcaatttatagtttgaagtgggtttttgactgcttgtttaatgaagaaaaatgcttggggtggaagggactcttgagatttcaccagagactttttctttttaataaatcaaaccttttgatgatttgaggttttatctgcagttttggaagcagtcacaaatgagacctgttataaggtggtatttttttttttcttctggacagtatttaaaggatcttattcttatttcccagggaaattctgggctcccacaaagtaaaaaaaaaaaaaaatcatagaaaaagaatgagcaggaatagttcttattccagaattgtacagtattcaccttaagttgattttttttctccttctgcaattgaactgaatacatttttcatgcatgttttccagaaaatagaagtattaatgttattaaaaagattattttttttattaaaggctatttatattatagaaacta

SEQ ID NO: 73311 - DNA, 297 bp, Homo sapiens
tgcaaaggcggcttgaaaggtgcactgcagttcaacagccacacactacatcagtggctcaaagacaagaacaaaggagaaatgtgagttgtattattctttcttcctatgttaatctaagtttttgttagatgagtctgtcggtgtttgtgtattcctctgagttagaacagagaaaacaattgtactttctatggaaaaaaatatgctcaacctttgaaatatttgatgttaatggatttaaatgattataattacttttaatttggtaaaatcttaaacattcatcttatgtat

SEQ ID NO: 73312 - DNA, 151 bp, Homo sapiens
gtgtcgaattatgtcctctgcaaaaaggccactgtggttgaattgggagaacccagacatcatgtcagagttactgtttcagaacaatgagatcatctttaaaaatggggatggtaaggaagagtattaatgagcttatgatgcatgaatt

SEQ ID NO: 73313 - DNA, 4354 bp, Homo sapiens
  misc_feature (15)..(15): n is a, c, g, or t
  misc_feature (23)..(23): n is a, c, g, or t
  misc_feature (27)..(27): n is a, c, g, or t
  misc_feature (30)..(30): n is a, c, g, or t
  misc_feature (59)..(59): n is a, c, g, or t
  misc_feature (64)..(64): n is a, c, g, or t
  misc_feature (86)..(86): n is a, c, g, or t
  misc_feature (90)..(90): n is a, c, g, or t
  misc_feature (354)..(354): n is a, c, g, or t
ggaggcgggggcgtngcgcctcntccntcntccctcggcgccgctgccgcccccgcggngtggngacccgagtgcggttagagccngganctggaagagccccgagcgtttctgctttgggacaaccatacatctaattccttaaagtagttttatatgtaaaacttgcaaagaatcagaacaatgcctccaagaccatcatcaggtgaactgtggggcatccacttgatgcccccaagaatcctagtagaatgtttactaccaaatggaatgatagtgactttagaatgcctccgtgaggctacattaataaccataaagcatgaactatttaaagaagcaagaaaatacccnctccatcaacttcttcaagatgaatcttcttacattttcgtaagtgttacccaagaagcagaaagggaagaattttttgatgaaacaagacgactttgtgaccttcggctttttcaaccctttttaaaagtaattgaaccagtaggcaaccgtgaagaaaagatcctcaatcgagaaattggttttgctatcggcatgccagtgtgtgaatttgatatggttaaagatccagaagtacaggacttccgaagaaatattctgaacgtttgtaaagaagctgtggatcttagggacctcaattcacctcatagtagagcaatgtatgtctatcctccaaatgtagaatcttcaccagaattgccaaagcacatatataataaattagataaagggcaaataatagtggtgatctgggtaatagtttctccaaataatgacaagcagaagtatactctgaaaatcaaccatgactgtgtaccagaacaagtaattgctgaagcaatcaggaaaaaaactcgaagtatgttgctatcctctgaacaactaaaactctgtgttttagaatatcagggcaagtatattttaaaagtgtgtggatgtgatgaatacttcctagaaaaatatcctctgagtcagtataagtatataagaagctgtataatgcttgggaggatgcccaatttgatgttgatggctaaagaaagcctttattctcaactgccaatggactgttttacaatgccatcttattccagacgcatttccacagctacaccatatatgaatggagaaacatctacaaaatccctttgggttataaatagtgcactcagaataaaaattctttgtgcaacctacgtgaatgtaaatattcgagacattgataagatctatgttcgaacaggtatctaccatggaggagaacccttatgtgacaatgtgaacactcaaagagtaccttgttccaatcccaggtggaatgaatggctgaattatgatatatacattcctgatcttcctcgtgctgctcgactttgcctttccatttgctctgttaaaggccgaaagggtgctaaagaggaacactgtccattggcatggggaaatataaacttgtttgattacacagacactctagtatctggaaaaatggctttgaatctttggccagtacctcatggattagaagatttgctgaaccctattggtgttactggatcaaatccaaataaagaaactccatgcttagagttggagtttgactggttcagcagtgtggtaaagttcccagatatgtcagtgattgaagagcatgccaattggtctgtatcccgagaagcaggatttagctattcccacgcaggactgagtaacagactagctagagacaatgaattaagggaaaatgacaaagaacagctcaaagcaatttctacacgagatcctctctctgaaatcactgagcaggagaaagattttctatggagtcacagacactattgtgtaactatccccgaaattctacccaaattgcttctgtctgttaaatggaattctagagatgaagtagcccagatgtattgcttggtaaaagattggcctccaatcaaacctgaacaggctatggaacttctggactgtaattacccagatcctatggttcgaggttttgctgttcggtgcttggaaaaatatttaacagatgacaaactttctcagtatttaattcagctagtacaggtcctaaaatatgaacaatatttggataacttgcttgtgagatttttactgaagaaagcattgactaatcaaaggattgggcactttttcttttggcatttaaaatctgagatgcacaataaaacagttagccagaggtttggcctgcttttggagtcctattgtcgtgcatgtgggatgtatttgaagcacctgaataggcaagtcgaggcaatggaaaagctcattaacttaactgacattctcaaacaggagaagaaggatgaaacacaaaaggtacagatgaagtttttagttgagcaaatgaggcgaccagatttcatggatgctctacagggctttctgtctcctctaaaccctgctcatcaactaggaaacctcaggcttgaagagtgtcgaattatgtcctctgcaaaaaggccactgtggttgaattgggagaacccagacatcatgtcagagttactgtttcagaacaatgagatcatctttaaaaatggggatgatttacggcaagatatgctaacacttcaaattattcgtattatggaaaatatctggcaaaatcaaggtcttgatcttcgaatgttaccttatggttgtctgtcaatcggtgactgtgtgggacttattgaggtggtgcgaaattctcacactattatgcaaattcagtgcaaaggcggcttgaaaggtgcactgcagttcaacagccacacactacatcagtggctcaaagacaagaacaaaggagaaatatatgatgcagccattgacctgtttacacgttcatgtgctggatactgtgtagctaccttcattttgggaattggagatcgtcacaatagtaacatcatggtgaaagacgatggacaactgtttcatatagattttggacactttttggatcacaagaagaaaaaatttggttataaacgagaacgtgtgccatttgttttgacacaggatttcttaatagtgattagtaaaggagcccaagaatgcacaaagacaagagaatttgagaggtttcaggagatgtgttacaaggcttatctagctattcgacagcatgccaatctcttcataaatcttttctcaatgatgcttggctctggaatgccagaactacaatcttttgatgacattgcatacattcgaaagaccctagccttagataaaactgagcaagaggctttggagtatttcatgaaacaaatgaatgatgcacatcatggtggctggacaacaaaaatggattggatcttccacacaattaaacagcatgcattgaactgaaaagataactgagaaaatgaaagctcactctggattccacactgcactgttaataactctcagcaggcaaagaccgattgcataggaattgcacaatccatgaacagcattagaatttacagcaagaacagaaataaaatactatataatttaaataatgtaaacgcaaacagggtttgatagcacttaaactagttcatttcaaaattaagctttagaataatgcgcaatttcatgttatgccttaagtccaaaaaggtaaactttgaagattgtttgtatctttttttaaaaaacaaaacaaaacaaaaatccccaaaatatatagaaatgatggagaaggaaaaagtgatggttttttttgtcttgcaaatgttctatgttttgaaatgtggacacaacaaaggctgttattgcattaggtgtaagtaaactggagtttatgttaaattacattgattggaaaagaatgaaaatttcttatttttccattgctgttcaatttatagtttgaagtgggtttttgactgcttgtttaatgaagaaaaatgcttggggtggaagggactcttgagatttcaccagagactttttctttttaataaatcaaaccttttgatgatttgaggttttatctgcagttttggaagcagtcacaaatgagacctgttataaggtggtatttttttttttcttctggacagtatttaaaggatcttattcttatttcccagggaaattctgggctcccacaaagtaaaaaaaaaaaaaaatcatagaaaaagaatgagcaggaatagttcttattccagaattgtacagtattcaccttaagttgattttttttctccttctgcaattgaactgaatacatttttcatgcatgttttccagaaaatagaagtattaatgttattaaaaagattattttttttattaaaggctatttatattatagaaacta

SEQ ID NO: 73314 - DNA, 1769 bp, Homo sapiens
  misc_feature (2)..(2): n is a, c, g, or t
  misc_feature (12)..(12): n is a, c, g, or t
  misc_feature (18)..(18): n is a, c, g, or t
  misc_feature (23)..(26): n is a, c, g, or t
  misc_feature (34)..(34): n is a, c, g, or t
cngtactagagnatcccngtcannnnctacaccnacacttcaaattattcgtattatggaaaatatctggcaaaatcaaggtcttgatcttcgaatgttaccttatggttgtctgtcaatcggtgactgtgtgggacttattgaggtggtgcgaaattctcacactattatgcaaattcagtgcaaaggcggcttgaaaggtgcactgcagttcaacagccacacactacatcagtggctcaaagacaagaacaaaggagaaatatatgatgcagccattgacctgtttacacgttcatgtgctggatactgtgtagctaccttcattttgggaattggagatcgtcacaatagtaacatcatggtgaaagacgatggacaactgtttcatatagattttggacactttttggatcacaagaagaaaaaatttggttataaacgagaacgtgtgccatttgttttgacacaggatttcttaatagtgattagtaaaggagcccaagaatgcacaaagacaagagaatttgagaggtttcaggagatgtgttacaaggcttatctagctattcgacagcatgccaatctcttcataaatcttttctcaatgatgcttggctctggaatgccagaactacaatcttttgatgacattgcatacattcgaaagaccctagccttagataaaactgagcaagaggctttggagtatttcatgaaacaaatgaatgatgcacatcatggtggctggacaacaaaaatggattggatcttccacacaattaaacagcatgcattgaactgaaaagataactgagaaaatgaaagctcactctggattccacactgcactgttaataactctcagcaggcaaagaccgattgcataggaattgcacaatccatgaacagcattagaatttacagcaagaacagaaataaaatactatataatttaaataatgtaaacgcaaacagggtttgatagcacttaaactagttcatttcaaaattaagctttagaataatgcgcaatttcatgttatgccttaagtccaaaaaggtaaactttgaagattgtttgtatctttttttaaaaaacaaaacaaaacaaaaatccccaaaatatatagaaatgatggagaaggaaaaagtgatggttttttttgtcttgcaaatgttctatgttttgaaatgtggacacaacaaaggctgttattgcattaggtgtaagtaaactggagtttatgttaaattacattgattggaaaagaatgaaaatttcttatttttccattgctgttcaatttatagtttgaagtgggtttttgactgcttgtttaatgaagaaaaatgcttggggtggaagggactcttgagatttcaccagagactttttctttttaataaatcaaaccttttgatgatttgaggttttatctgcagttttggaagcagtcacaaatgagacctgttataaggtggtatttttttttttcttctggacagtatttaaaggatcttattcttatttcccagggaaattctgggctcccacaaagtaaaaaaaaaaaaaaatcatagaaaaagaatgagcaggaatagttcttattccagaattgtacagtattcaccttaagttgattttttttctccttctgcaattgaactgaatacatttttcatgcatgttttccagaaaatagaagtattaatgttattaaaaagattattttttttattaaaggctatttatattatagaaacta

SEQ ID NO: 73315 - DNA, 294 bp, Homo sapiens
gacatgagccactgtgcctgaccagaggttctcaatagtttttaagagtactaaggagtcctgagagcaagaagtttaaacactgccaatttatagtttgaggaagagcaagtttctctgagcatgaccccaaagccagaagagtgacagatacccccaaaatgggaatgaggacatgaaacactaatgggaaaacagcataatacacaaggggccaatatacaggtagaagaataaccttcagaagctgggcacagtggctcatgcctataatcccagcactttgggaagacg

SEQ ID NO: 73316 - DNA, 563 bp, Homo sapiens
ggattccctgaggtcaggagttcgagaccagcctggccaatgtggtgaaaaccctgtctctaataaaaatgtaaaaattagctgggcatggtggcgggcgcctgtagtcccagctactcaggaggctgaggcaggagaattgcttgaaccctggaggcggaggtagcagtgagtcgagatcgcgccactgcactccagcctgggtgacagagcaagactccgtctcgaaaaaaaaaaaaaacagtaagggggaatattggacaatacccccccaaaaatgtgcagaaatagccatatcagacgaaaccgaaattaaggcaaaaccgctgacgggttaagaggaactccgtatcggggggaaaaagacactcccccaagaagatgcagaaaccacactcggcctgttagctttcagtgcatcaaacaaagactcatggtgacaagggggtccatttggggatcccagagcccactggggcctgcaggtcgggctgtccttggccactcctgggacccagagcccgggcatgtccagcaccccctccgccagcccgtgcgccaca

SEQ ID NO: 73317 - DNA, 137 bp, Homo sapiens
ccctgtattcgaaagtgatcgtgggctgcctttgccctggtcattgatagtgcagggagaggaatcaatgaaagcgcttccccgtgtttgaagggtccactcctatcccttccaaactctggagctttcgtacatgc

SEQ ID NO: 73318 - DNA, 4359 bp, Homo sapiens
  misc_feature (3398)..(3398): n is a, c, g, or t
ttctttcttcctttcttttttctctctccccttccttccttctttccttcttttcttttcttttcttttcttttctttctctctttctttctgtctttcttttctcattctgttgccctggctggagtgcagtggcatgatctcggctcatagcagcctccacctcctgggttcaagcgattctcctgccttagcctccctagtagctgggattacaggtacccaccatgatgcctggctaattttttgtattttcaatggagacggggtttcaccatgttggccaggctcgtcttgacctcctggcctcaaatgatccacccactttggcctcccaaattgctggcattacaggcgtgagccactgcacccggcctgttccttcttaagaacactttgtctcccctttaatctctgctggatttcaagcaccccttttacacaactcttgatatccatcaataaagaataattcccataagcccatcatgtagtgaccgactatttttcagtgacaaaaaaaaagtctttaaaaatagaagtaaaagtctaaagtcatcaaaacaacgttatatcctgtgtgaaatgctgcagtcaggatgccttgtggtttgagtgccttgatcatgtgccctaaggggatggtggcggtggtggtggccgtggatgacggagactctcaggccttggcaggtgcgtctttcagttcccctcacacttcgggttcctcggggaggaggggctggaaccctagcccatcgtcaggacaaagatgctcaggctgctcttggctctcaacttattcccttcaattcaagtaacaggaaacaagattttggtgaagcagtcgcccatgcttgtagcgtacgacaatgcggtcaaccttagctgcaagtattcctacaatctcttctcaagggagttccgggcatcccttcacaaaggactggatagtgctgtggaagtctgtgttgtatatgggaattactcccagcagcttcaggtttactcaaaaacggggttcaactgtgatgggaaattgggcaatgaatcagtgacattctacctccagaatttgtatgttaaccaaacagatatttacttctgcaaaattgaagttatgtatcctcctccttacctagacaatgagaagagcaatggaaccattatccatgtgaaagggaaacacctttgtccaagtcccctatttcccggaccttctaagcccttttgggtgctggtggtggttggtggagtcctggcttgctatagcttgctagtaacagtggcctttattattttctgggtgaggagtaagaggagcaggctcctgcacagtgactacatgaacatgactccccgccgccccgggcccacccgcaagcattaccagccctatgccccaccacgcgacttcgcagcctatcgctcctgacacggacgcctatccagaagccagccggctggcagcccccatctgctcaatatcactgctctggataggaaatgaccgccatctccagccggccacctcaggcccctgttgggccaccaatgccaatttttctcgagtgactagaccaaatatcaagatcattttgagactctgaaatgaagtaaaagagatttcctgtgacaggccaagtcttacagtgccatggcccacattccaacttaccatgtacttagtgacttgactgagaagttagggtagaaaacaaaaagggagtggattctgggagcctcttccctttctcactcacctgcacatctcagtcaagcaaagtgtggtatccacagacattttagttgcagaagaaaggctaggaaatcattccttttggttaaatgggtgtttaatcttttggttagtgggttaaacggggtaagttagagtagggggagggataggaagacatatttaaaaaccattaaaacactgtctcccactcatgaaatgagccacgtagttcctatttaatgctgttttcctttagtttagaaatacatagacattgtcttttatgaattctgatcatatttagtcattttgaccaaatgagggatttggtcaaatgagggattccctcaaagcaatatcaggtaaaccaagttgctttcctcactccctgtcatgagacttcagtgttaatgttcacaatatactttcgaaagaataaaatagttctcctacatgaagaaagaatatgtcaggaaataaggtcactttatgtcaaaattatttgagtactatgggacctggcgcagtggctcatgcttgtaatcccagcactttgggaggccgaggtgggcagatcacttgagatcaggaccagcctggtcaagatggtgaaactccgtctgtactaaaaatacaaaatttagcttggcctggtggcaggcacctgtaatcccagctgcccaggaggctgaggcatgagaatcgcttgaacctggcaggcggaggttgcagtgagccgagatagtgccacagctctccagcctgggcgacagagtgagactccatctcaaacaacaacaacaacaacaacaacaacaacaaaccacaaaattatttgagtactgtgaaggattatttgtctaacagttcattccaatcagaccaggtaggagctttcctgtttcatatgtttcagggttgcacagttggtctctttaatgtcggtgtggagatccaaagtgggttgtggaaagagcgtccataggagaagtgagaatactgtgaaaagggatgttagcattcattagagtatgaggatgagtcccaagaaggttctttggaaggaggacgaatagaatggagtaatgaaattcttgccatgtgctgaggagatagccagcattaggtgacaatcttccagaagtggtcaggcagaaggtgccctggtgagagctcctttacagggactttatgtggtttagggctcagagctccaaaactctgggctcagctgctcctgtaccttggaggtccattcacatgggaaagtattttggaatgtgtcttttgaagagagcatcagagttcttaagggactgggtaaggcctgaccctgaaatgaccatggatatttttctacctacagtttgagtcaactagaatatgcctggggaccttgaagaatgcccttcagtggccctcaccatttgttcatgcttcagttaattcaggtgttgaaggagcttaggttttagaggcacgtagacttggttcaagtctcgttagtagttgaatagcctcaggcaagtcactgcccacctaagatgatggttcttcaactataaatggagataatggttacaaatgtctcttcctatagtataatctccataagggcatggcccaagtctgtctttgactctgcctatccctgacntttagtagcatgcccgacatacaatgttagctattggtattattgccatatagataaattatgtataaaaattaaactgggcaatagcctaagaaggggggaatattgtaacacaaatttaaacccactacgcagggatgaggtgctataatatgaggaccttttaacttccatcattttcctgtttcttgaaatagtttatcttgtaatgaaatataaggcacctcccacttttatgtatagaaagaggtcttttaatttttttttaatgtgagaaggaagggaggagtaggaatcttgagattccagatcgaaaatactgtactttggttgatttttaagtgggcttccattccatggatttaatcagtcccaagaagatcaaactcagcagtacttgggtgctgaagaactgttggatttaccctggcacgtgtgccacttgccagcttcttgggcacacagagttcttcaatccaagttatcagattgtatttgaaaatgacagagctggagagttttttgaaatggcagtggcaaataaataaatacttttttttaaatggaaagacttgatctatggtaataaatgattttgttttctgactggaaaaataggcctactaaagatgaatcacacttgagatgtttcttactcactctgcacagaaacaaagaagaaatgttatacagggaagtccgttttcactattagtatgaaccaagaaatggttcaaaaacagtggtaggagcaatgctttcatagtttcagatatggtagttatgaagaaaacaatgtcatttgctgctattattgtaagagtcttataattaatggtactcctataatttttgattgtgagctcacctatttgggttaagcatgccaatttaaagagaccaagtgtatgtacattatgttctacatattcagtgataaaattactaaactactatatgt

SEQ ID NO: 73319 - DNA, 4068 bp, Homo sapiens
  misc_feature (3107)..(3107): n is a, c, g, or t
ttctttcttcctttcttttttctctctccccttccttccttctttccttcttttcttttcttttcttttcttttctttctctctttctttctgtctttcttttctcattctgttgccctggctggagtgcagtggcatgatctcggctcatagcagcctccacctcctgggttcaagcgattctcctgccttagcctccctagtagctgggattacaggtacccaccatgatgcctggctaattttttgtattttcaatggagacggggtttcaccatgttggccaggctcgtcttgacctcctggcctcaaatgatccacccactttggcctcccaaattgctggcattacaggcgtgagccactgcacccggcctgttccttcttaagaacactttgtctcccctttaatctctgctggatttcaagcaccccttttacacaactcttgatatccatcaataaagaataattcccataagcccatcatgtagtgaccgactatttttcagtgacaaaaaaaaagtctttaaaaatagaagtaaaagtctaaagtcatcaaaacaacgttatatcctgtgtgaaatgctgcagtcaggatgccttgtggtttgagtgccttgatcatgtgccctaaggggatggtggcggtggtggtggccgtggatgacggagactctcaggccttggcaggtgcgtctttcagttcccctcacacttcgggttcctcggggaggaggggctggaaccctagcccatcgtcaggacaaagatgctcaggctgctcttggctctcaacttattcccttcaattcaagtaacaggaaacaagattttggtgaagcagtcgcccatgcttgtagcgtacgacaatgcggtcaaccttagctggaaacacctttgtccaagtcccctatttcccggaccttctaagcccttttgggtgctggtggtggttggtggagtcctggcttgctatagcttgctagtaacagtggcctttattattttctgggtgaggagtaagaggagcaggctcctgcacagtgactacatgaacatgactccccgccgccccgggcccacccgcaagcattaccagccctatgccccaccacgcgacttcgcagcctatcgctcctgacacggacgcctatccagaagccagccggctggcagcccccatctgctcaatatcactgctctggataggaaatgaccgccatctccagccggccacctcaggcccctgttgggccaccaatgccaatttttctcgagtgactagaccaaatatcaagatcattttgagactctgaaatgaagtaaaagagatttcctgtgacaggccaagtcttacagtgccatggcccacattccaacttaccatgtacttagtgacttgactgagaagttagggtagaaaacaaaaagggagtggattctgggagcctcttccctttctcactcacctgcacatctcagtcaagcaaagtgtggtatccacagacattttagttgcagaagaaaggctaggaaatcattccttttggttaaatgggtgtttaatcttttggttagtgggttaaacggggtaagttagagtagggggagggataggaagacatatttaaaaaccattaaaacactgtctcccactcatgaaatgagccacgtagttcctatttaatgctgttttcctttagtttagaaatacatagacattgtcttttatgaattctgatcatatttagtcattttgaccaaatgagggatttggtcaaatgagggattccctcaaagcaatatcaggtaaaccaagttgctttcctcactccctgtcatgagacttcagtgttaatgttcacaatatactttcgaaagaataaaatagttctcctacatgaagaaagaatatgtcaggaaataaggtcactttatgtcaaaattatttgagtactatgggacctggcgcagtggctcatgcttgtaatcccagcactttgggaggccgaggtgggcagatcacttgagatcaggaccagcctggtcaagatggtgaaactccgtctgtactaaaaatacaaaatttagcttggcctggtggcaggcacctgtaatcccagctgcccaggaggctgaggcatgagaatcgcttgaacctggcaggcggaggttgcagtgagccgagatagtgccacagctctccagcctgggcgacagagtgagactccatctcaaacaacaacaacaacaacaacaacaacaacaaaccacaaaattatttgagtactgtgaaggattatttgtctaacagttcattccaatcagaccaggtaggagctttcctgtttcatatgtttcagggttgcacagttggtctctttaatgtcggtgtggagatccaaagtgggttgtggaaagagcgtccataggagaagtgagaatactgtgaaaagggatgttagcattcattagagtatgaggatgagtcccaagaaggttctttggaaggaggacgaatagaatggagtaatgaaattcttgccatgtgctgaggagatagccagcattaggtgacaatcttccagaagtggtcaggcagaaggtgccctggtgagagctcctttacagggactttatgtggtttagggctcagagctccaaaactctgggctcagctgctcctgtaccttggaggtccattcacatgggaaagtattttggaatgtgtcttttgaagagagcatcagagttcttaagggactgggtaaggcctgaccctgaaatgaccatggatatttttctacctacagtttgagtcaactagaatatgcctggggaccttgaagaatgcccttcagtggccctcaccatttgttcatgcttcagttaattcaggtgttgaaggagcttaggttttagaggcacgtagacttggttcaagtctcgttagtagttgaatagcctcaggcaagtcactgcccacctaagatgatggttcttcaactataaatggagataatggttacaaatgtctcttcctatagtataatctccataagggcatggcccaagtctgtctttgactctgcctatccctgacntttagtagcatgcccgacatacaatgttagctattggtattattgccatatagataaattatgtataaaaattaaactgggcaatagcctaagaaggggggaatattgtaacacaaatttaaacccactacgcagggatgaggtgctataatatgaggaccttttaacttccatcattttcctgtttcttgaaatagtttatcttgtaatgaaatataaggcacctcccacttttatgtatagaaagaggtcttttaatttttttttaatgtgagaaggaagggaggagtaggaatcttgagattccagatcgaaaatactgtactttggttgatttttaagtgggcttccattccatggatttaatcagtcccaagaagatcaaactcagcagtacttgggtgctgaagaactgttggatttaccctggcacgtgtgccacttgccagcttcttgggcacacagagttcttcaatccaagttatcagattgtatttgaaaatgacagagctggagagttttttgaaatggcagtggcaaataaataaatacttttttttaaatggaaagacttgatctatggtaataaatgattttgttttctgactggaaaaataggcctactaaagatgaatcacacttgagatgtttcttactcactctgcacagaaacaaagaagaaatgttatacagggaagtccgttttcactattagtatgaaccaagaaatggttcaaaaacagtggtaggagcaatgctttcatagtttcagatatggtagttatgaagaaaacaatgtcatttgctgctattattgtaagagtcttataattaatggtactcctataatttttgattgtgagctcacctatttgggttaagcatgccaatttaaagagaccaagtgtatgtacattatgttctacatattcagtgataaaattactaaactactatatgt

SEQ ID NO: 73320 - DNA, 4002 bp, Homo sapiens
  misc_feature (3041)..(3041): n is a, c, g, or t
ttctttcttcctttcttttttctctctccccttccttccttctttccttcttttcttttcttttcttttcttttctttctctctttctttctgtctttcttttctcattctgttgccctggctggagtgcagtggcatgatctcggctcatagcagcctccacctcctgggttcaagcgattctcctgccttagcctccctagtagctgggattacaggtacccaccatgatgcctggctaattttttgtattttcaatggagacggggtttcaccatgttggccaggctcgtcttgacctcctggcctcaaatgatccacccactttggcctcccaaattgctggcattacaggcgtgagccactgcacccggcctgttccttcttaagaacactttgtctcccctttaatctctgctggatttcaagcaccccttttacacaactcttgatatccatcaataaagaataattcccataagcccatcatgtagtgaccgactatttttcagtgacaaaaaaaaagtctttaaaaatagaagtaaaagtctaaagtcatcaaaacaacgttatatcctgtgtgaaatgctgcagtcaggatgccttgtggtttgagtgccttgatcatgtgccctaaggggatggtggcggtggtggtggccgtggatgacggagactctcaggccttggcaggtgcgtctttcagttcccctcacacttcgggttcctcggggaggaggggctggaaccctagcccatcgtcaggacaaagatgctcaggctgctcttggctctcaacttattcccttcaattcaagtaacagggaaacacctttgtccaagtcccctatttcccggaccttctaagcccttttgggtgctggtggtggttggtggagtcctggcttgctatagcttgctagtaacagtggcctttattattttctgggtgaggagtaagaggagcaggctcctgcacagtgactacatgaacatgactccccgccgccccgggcccacccgcaagcattaccagccctatgccccaccacgcgacttcgcagcctatcgctcctgacacggacgcctatccagaagccagccggctggcagcccccatctgctcaatatcactgctctggataggaaatgaccgccatctccagccggccacctcaggcccctgttgggccaccaatgccaatttttctcgagtgactagaccaaatatcaagatcattttgagactctgaaatgaagtaaaagagatttcctgtgacaggccaagtcttacagtgccatggcccacattccaacttaccatgtacttagtgacttgactgagaagttagggtagaaaacaaaaagggagtggattctgggagcctcttccctttctcactcacctgcacatctcagtcaagcaaagtgtggtatccacagacattttagttgcagaagaaaggctaggaaatcattccttttggttaaatgggtgtttaatcttttggttagtgggttaaacggggtaagttagagtagggggagggataggaagacatatttaaaaaccattaaaacactgtctcccactcatgaaatgagccacgtagttcctatttaatgctgttttcctttagtttagaaatacatagacattgtcttttatgaattctgatcatatttagtcattttgaccaaatgagggatttggtcaaatgagggattccctcaaagcaatatcaggtaaaccaagttgctttcctcactccctgtcatgagacttcagtgttaatgttcacaatatactttcgaaagaataaaatagttctcctacatgaagaaagaatatgtcaggaaataaggtcactttatgtcaaaattatttgagtactatgggacctggcgcagtggctcatgcttgtaatcccagcactttgggaggccgaggtgggcagatcacttgagatcaggaccagcctggtcaagatggtgaaactccgtctgtactaaaaatacaaaatttagcttggcctggtggcaggcacctgtaatcccagctgcccaggaggctgaggcatgagaatcgcttgaacctggcaggcggaggttgcagtgagccgagatagtgccacagctctccagcctgggcgacagagtgagactccatctcaaacaacaacaacaacaacaacaacaacaacaaaccacaaaattatttgagtactgtgaaggattatttgtctaacagttcattccaatcagaccaggtaggagctttcctgtttcatatgtttcagggttgcacagttggtctctttaatgtcggtgtggagatccaaagtgggttgtggaaagagcgtccataggagaagtgagaatactgtgaaaagggatgttagcattcattagagtatgaggatgagtcccaagaaggttctttggaaggaggacgaatagaatggagtaatgaaattcttgccatgtgctgaggagatagccagcattaggtgacaatcttccagaagtggtcaggcagaaggtgccctggtgagagctcctttacagggactttatgtggtttagggctcagagctccaaaactctgggctcagctgctcctgtaccttggaggtccattcacatgggaaagtattttggaatgtgtcttttgaagagagcatcagagttcttaagggactgggtaaggcctgaccctgaaatgaccatggatatttttctacctacagtttgagtcaactagaatatgcctggggaccttgaagaatgcccttcagtggccctcaccatttgttcatgcttcagttaattcaggtgttgaaggagcttaggttttagaggcacgtagacttggttcaagtctcgttagtagttgaatagcctcaggcaagtcactgcccacctaagatgatggttcttcaactataaatggagataatggttacaaatgtctcttcctatagtataatctccataagggcatggcccaagtctgtctttgactctgcctatccctgacntttagtagcatgcccgacatacaatgttagctattggtattattgccatatagataaattatgtataaaaattaaactgggcaatagcctaagaaggggggaatattgtaacacaaatttaaacccactacgcagggatgaggtgctataatatgaggaccttttaacttccatcattttcctgtttcttgaaatagtttatcttgtaatgaaatataaggcacctcccacttttatgtatagaaagaggtcttttaatttttttttaatgtgagaaggaagggaggagtaggaatcttgagattccagatcgaaaatactgtactttggttgatttttaagtgggcttccattccatggatttaatcagtcccaagaagatcaaactcagcagtacttgggtgctgaagaactgttggatttaccctggcacgtgtgccacttgccagcttcttgggcacacagagttcttcaatccaagttatcagattgtatttgaaaatgacagagctggagagttttttgaaatggcagtggcaaataaataaatacttttttttaaatggaaagacttgatctatggtaataaatgattttgttttctgactggaaaaataggcctactaaagatgaatcacacttgagatgtttcttactcactctgcacagaaacaaagaagaaatgttatacagggaagtccgttttcactattagtatgaaccaagaaatggttcaaaaacagtggtaggagcaatgctttcatagtttcagatatggtagttatgaagaaaacaatgtcatttgctgctattattgtaagagtcttataattaatggtactcctataatttttgattgtgagctcacctatttgggttaagcatgccaatttaaagagaccaagtgtatgtacattatgttctacatattcagtgataaaattactaaactactatatgt

SEQ ID NO: 73321 - DNA, 3940 bp, Homo sapiens
  misc_feature (2979)..(2979): n is a, c, g, or t
ttctttcttcctttcttttttctctctccccttccttccttctttccttcttttcttttcttttcttttcttttctttctctctttctttctgtctttcttttctcattctgttgccctggctggagtgcagtggcatgatctcggctcatagcagcctccacctcctgggttcaagcgattctcctgccttagcctccctagtagctgggattacaggtacccaccatgatgcctggctaattttttgtattttcaatggagacggggtttcaccatgttggccaggctcgtcttgacctcctggcctcaaatgatccacccactttggcctcccaaattgctggcattacaggcgtgagccactgcacccggcctgttccttcttaagaacactttgtctcccctttaatctctgctggatttcaagcaccccttttacacaactcttgatatccatcaataaagaataattcccataagcccatcatgtagtgaccgactatttttcagtgacaaaaaaaaagtctttaaaaatagaagtaaaagtctaaagtcatcaaaacaacgttatatcctgtgtgaaatgctgcagtcaggatgccttgtggtttgagtgccttgatcatgtgccctaaggggatggtggcggtggtggtggccgtggatgacggagactctcaggccttggcaggtgcgtctttcagttcccctcacacttcgggttcctcggggaggaggggctggaaccctagcccatcgtcaggacaaagatgctcaggctgctcttggctctcaacttattcccttcaattcaagtaacaggaaacaagattttggtgaagcagtcgcccatgcttgtagcgtacgacaatgcggtcaaccttagctacaatgagaagagcaatggaaccattatccatgtgaaagggaaacacctttgtccaagtcccctatttcccggaccttctaagcccctatgccccaccacgcgacttcgcagcctatcgctcctgacacggacgcctatccagaagccagccggctggcagcccccatctgctcaatatcactgctctggataggaaatgaccgccatctccagccggccacctcaggcccctgttgggccaccaatgccaatttttctcgagtgactagaccaaatatcaagatcattttgagactctgaaatgaagtaaaagagatttcctgtgacaggccaagtcttacagtgccatggcccacattccaacttaccatgtacttagtgacttgactgagaagttagggtagaaaacaaaaagggagtggattctgggagcctcttccctttctcactcacctgcacatctcagtcaagcaaagtgtggtatccacagacattttagttgcagaagaaaggctaggaaatcattccttttggttaaatgggtgtttaatcttttggttagtgggttaaacggggtaagttagagtagggggagggataggaagacatatttaaaaaccattaaaacactgtctcccactcatgaaatgagccacgtagttcctatttaatgctgttttcctttagtttagaaatacatagacattgtcttttatgaattctgatcatatttagtcattttgaccaaatgagggatttggtcaaatgagggattccctcaaagcaatatcaggtaaaccaagttgctttcctcactccctgtcatgagacttcagtgttaatgttcacaatatactttcgaaagaataaaatagttctcctacatgaagaaagaatatgtcaggaaataaggtcactttatgtcaaaattatttgagtactatgggacctggcgcagtggctcatgcttgtaatcccagcactttgggaggccgaggtgggcagatcacttgagatcaggaccagcctggtcaagatggtgaaactccgtctgtactaaaaatacaaaatttagcttggcctggtggcaggcacctgtaatcccagctgcccaggaggctgaggcatgagaatcgcttgaacctggcaggcggaggttgcagtgagccgagatagtgccacagctctccagcctgggcgacagagtgagactccatctcaaacaacaacaacaacaacaacaacaacaacaaaccacaaaattatttgagtactgtgaaggattatttgtctaacagttcattccaatcagaccaggtaggagctttcctgtttcatatgtttcagggttgcacagttggtctctttaatgtcggtgtggagatccaaagtgggttgtggaaagagcgtccataggagaagtgagaatactgtgaaaagggatgttagcattcattagagtatgaggatgagtcccaagaaggttctttggaaggaggacgaatagaatggagtaatgaaattcttgccatgtgctgaggagatagccagcattaggtgacaatcttccagaagtggtcaggcagaaggtgccctggtgagagctcctttacagggactttatgtggtttagggctcagagctccaaaactctgggctcagctgctcctgtaccttggaggtccattcacatgggaaagtattttggaatgtgtcttttgaagagagcatcagagttcttaagggactgggtaaggcctgaccctgaaatgaccatggatatttttctacctacagtttgagtcaactagaatatgcctggggaccttgaagaatgcccttcagtggccctcaccatttgttcatgcttcagttaattcaggtgttgaaggagcttaggttttagaggcacgtagacttggttcaagtctcgttagtagttgaatagcctcaggcaagtcactgcccacctaagatgatggttcttcaactataaatggagataatggttacaaatgtctcttcctatagtataatctccataagggcatggcccaagtctgtctttgactctgcctatccctgacntttagtagcatgcccgacatacaatgttagctattggtattattgccatatagataaattatgtataaaaattaaactgggcaatagcctaagaaggggggaatattgtaacacaaatttaaacccactacgcagggatgaggtgctataatatgaggaccttttaacttccatcattttcctgtttcttgaaatagtttatcttgtaatgaaatataaggcacctcccacttttatgtatagaaagaggtcttttaatttttttttaatgtgagaaggaagggaggagtaggaatcttgagattccagatcgaaaatactgtactttggttgatttttaagtgggcttccattccatggatttaatcagtcccaagaagatcaaactcagcagtacttgggtgctgaagaactgttggatttaccctggcacgtgtgccacttgccagcttcttgggcacacagagttcttcaatccaagttatcagattgtatttgaaaatgacagagctggagagttttttgaaatggcagtggcaaataaataaatacttttttttaaatggaaagacttgatctatggtaataaatgattttgttttctgactggaaaaataggcctactaaagatgaatcacacttgagatgtttcttactcactctgcacagaaacaaagaagaaatgttatacagggaagtccgttttcactattagtatgaaccaagaaatggttcaaaaacagtggtaggagcaatgctttcatagtttcagatatggtagttatgaagaaaacaatgtcatttgctgctattattgtaagagtcttataattaatggtactcctataatttttgattgtgagctcacctatttgggttaagcatgccaatttaaagagaccaagtgtatgtacattatgttctacatattcagtgataaaattactaaactactatatgt

SEQ ID NO: 73322 - DNA, 3982 bp, Homo sapiens
  misc_feature (3021)..(3021): n is a, c, g, or t
ttctttcttcctttcttttttctctctccccttccttccttctttccttcttttcttttcttttcttttcttttctttctctctttctttctgtctttcttttctcattctgttgccctggctggagtgcagtggcatgatctcggctcatagcagcctccacctcctgggttcaagcgattctcctgccttagcctccctagtagctgggattacaggtacccaccatgatgcctggctaattttttgtattttcaatggagacggggtttcaccatgttggccaggctcgtcttgacctcctggcctcaaatgatccacccactttggcctcccaaattgctggcattacaggcgtgagccactgcacccggcctgttccttcttaagaacactttgtctcccctttaatctctgctggatttcaagcaccccttttacacaactcttgatatccatcaataaagaataattcccataagcccatcatgtagtgaccgactatttttcagtgacaaaaaaaaagtctttaaaaatagaagtaaaagtctaaagtcatcaaaacaacgttatatcctgtgtgaaatgctgcagtcaggatgccttgtggtttgagtgccttgatcatgtgccctaaggggatggtggcggtggtggtggccgtggatgacggagactctcaggccttggcaggtgcgtctttcagttcccctcacacttcgggttcctcggggaggaggggctggaaccctagcccatcgtcaggacaaagatgctcaggctgctcttggctctcaacttattcccttcaattcaagtaacaggaaacaagattttggtgaagcagtcgcccatgcttgtagcgtacgacaatgcggtcaaccttagctacaatgagaagagcaatggaaccattatccatgtgaaaggtgaggagtaagaggagcaggctcctgcacagtgactacatgaacatgactccccgccgccccgggcccacccgcaagcattaccagccctatgccccaccacgcgacttcgcagcctatcgctcctgacacggacgcctatccagaagccagccggctggcagcccccatctgctcaatatcactgctctggataggaaatgaccgccatctccagccggccacctcaggcccctgttgggccaccaatgccaatttttctcgagtgactagaccaaatatcaagatcattttgagactctgaaatgaagtaaaagagatttcctgtgacaggccaagtcttacagtgccatggcccacattccaacttaccatgtacttagtgacttgactgagaagttagggtagaaaacaaaaagggagtggattctgggagcctcttccctttctcactcacctgcacatctcagtcaagcaaagtgtggtatccacagacattttagttgcagaagaaaggctaggaaatcattccttttggttaaatgggtgtttaatcttttggttagtgggttaaacggggtaagttagagtagggggagggataggaagacatatttaaaaaccattaaaacactgtctcccactcatgaaatgagccacgtagttcctatttaatgctgttttcctttagtttagaaatacatagacattgtcttttatgaattctgatcatatttagtcattttgaccaaatgagggatttggtcaaatgagggattccctcaaagcaatatcaggtaaaccaagttgctttcctcactccctgtcatgagacttcagtgttaatgttcacaatatactttcgaaagaataaaatagttctcctacatgaagaaagaatatgtcaggaaataaggtcactttatgtcaaaattatttgagtactatgggacctggcgcagtggctcatgcttgtaatcccagcactttgggaggccgaggtgggcagatcacttgagatcaggaccagcctggtcaagatggtgaaactccgtctgtactaaaaatacaaaatttagcttggcctggtggcaggcacctgtaatcccagctgcccaggaggctgaggcatgagaatcgcttgaacctggcaggcggaggttgcagtgagccgagatagtgccacagctctccagcctgggcgacagagtgagactccatctcaaacaacaacaacaacaacaacaacaacaacaaaccacaaaattatttgagtactgtgaaggattatttgtctaacagttcattccaatcagaccaggtaggagctttcctgtttcatatgtttcagggttgcacagttggtctctttaatgtcggtgtggagatccaaagtgggttgtggaaagagcgtccataggagaagtgagaatactgtgaaaagggatgttagcattcattagagtatgaggatgagtcccaagaaggttctttggaaggaggacgaatagaatggagtaatgaaattcttgccatgtgctgaggagatagccagcattaggtgacaatcttccagaagtggtcaggcagaaggtgccctggtgagagctcctttacagggactttatgtggtttagggctcagagctccaaaactctgggctcagctgctcctgtaccttggaggtccattcacatgggaaagtattttggaatgtgtcttttgaagagagcatcagagttcttaagggactgggtaaggcctgaccctgaaatgaccatggatatttttctacctacagtttgagtcaactagaatatgcctggggaccttgaagaatgcccttcagtggccctcaccatttgttcatgcttcagttaattcaggtgttgaaggagcttaggttttagaggcacgtagacttggttcaagtctcgttagtagttgaatagcctcaggcaagtcactgcccacctaagatgatggttcttcaactataaatggagataatggttacaaatgtctcttcctatagtataatctccataagggcatggcccaagtctgtctttgactctgcctatccctgacntttagtagcatgcccgacatacaatgttagctattggtattattgccatatagataaattatgtataaaaattaaactgggcaatagcctaagaaggggggaatattgtaacacaaatttaaacccactacgcagggatgaggtgctataatatgaggaccttttaacttccatcattttcctgtttcttgaaatagtttatcttgtaatgaaatataaggcacctcccacttttatgtatagaaagaggtcttttaatttttttttaatgtgagaaggaagggaggagtaggaatcttgagattccagatcgaaaatactgtactttggttgatttttaagtgggcttccattccatggatttaatcagtcccaagaagatcaaactcagcagtacttgggtgctgaagaactgttggatttaccctggcacgtgtgccacttgccagcttcttgggcacacagagttcttcaatccaagttatcagattgtatttgaaaatgacagagctggagagttttttgaaatggcagtggcaaataaataaatacttttttttaaatggaaagacttgatctatggtaataaatgattttgttttctgactggaaaaataggcctactaaagatgaatcacacttgagatgtttcttactcactctgcacagaaacaaagaagaaatgttatacagggaagtccgttttcactattagtatgaaccaagaaatggttcaaaaacagtggtaggagcaatgctttcatagtttcagatatggtagttatgaagaaaacaatgtcatttgctgctattattgtaagagtcttataattaatggtactcctataatttttgattgtgagctcacctatttgggttaagcatgccaatttaaagagaccaagtgtatgtacattatgttctacatattcagtgataaaattactaaactactatatgt

SEQ ID NO: 73323 - DNA, 335 bp, Homo sapiens
gtcagcctggttaccaaggagaaccaggtcttcgtggctggaggcctcttctacaacgaagacaacaaagaggaccccatgagcgcatacttcctgcagtttgaccatctggactcagagtggctggggatgccaccgctgccctcgccccgctgcctctttggcctgggagaagctctcaactccatctacgtggtcggtggcagagagatcaaggacggcgagcgctgcctggactcggtcatgtgctacgacaggctgtcattcaaatggggtgaatcggacccgctgccttacgtggtgtatggccacacagtgctctcccacatggacct

SEQ ID NO: 73324 - DNA, 83 bp, Homo sapiens
gtgctttgctgagggtgctcatctaagagccagggaaatcccagtcaacagaacacaggacggcatgcagggtgatacgtgat

SEQ ID NO: 73325 - DNA, 3108 bp, Homo sapiens
ctggaggcgccggcagcgcccgccagacccgccagcccagcggcccgggctctggggaaaccggcgctcccgacaggggagcaccgggcctctgagctccctcgggagcctttcacgaggtcagctacgtctttgttgtgcgcgttcctgaacttttggtccattaaccaacaattagacacgccggtattcagtgcctggcgcggtgctagatgctgggtgtaatctcagaaaaatacattcaggggcgcgcctgagggtgctggctgctggcatctcaggtgctttacgtgcattcgtgaagaagcccatcagtatttcttgaataccagatctctatttctgaatatagaccccaagctaagtgaagctttagcctctaagctcaacatgtatgaagctttgccaggccctgctcctgaaaatgaagatggccttgtgaaagtgaaggaggaagatcccacctgggagcaggtgtgcaactcacaggagggcagctcccacactcaggagatttgccgcctgcgctttcggcacttctgctaccaggaggctcacggaccccaggaagctctggcccaactccgagaactttgtcatcaatggctgagaccggagatgcacaccaaggaacagataatggaactgctggtgctggagcagttcctgaccatcctgcccaaggagctccagccctgtgtgaagacatatcctctggagagtggagaggaggcagtgacagtgctggagaatctagagacaggaagtggagacacaggacaacaggcctctgtctatattcagggacaggacatgcacccaatggtggcagaatatcaaggagtctctttggagtgtcagagcctccagctcctgcctgggataaccaccctgaagtgtgaacctccacagcgtcctcaagggaacccccaagaagtgagtgggcctgttccccacggatcagctcatctccaggaaaaaaaccccagagacaaggctgtagtgcctgtgtttaacccagtcaggtcccagacattggtgaagactgaggaagaaacagcccaggccgttgctgcagagaagtggtcacatctgagtctgactcggaggaacctctgtgggaactcagctcaggagacagttatgagcctcagtccgatgactgaagaaattgtaactaaagatagattgtttaaagcaaagcaagaaacttctgaagaaatggaacaaagtggagaagcctcaggaaagcccaacagagagtgtgcaccccagattccttgtagtactcctattgctactgaaaggacagttgcacatttgaacactctgaaggaccgtcacccaggtgatttgtgggcccgcatgcacatctcatccctggaatatgctgcaggagacattacccgaaaagggagaaaaaaagacaaagctcgagtgagtgaactgctccaaggcctctcattctctggtgactcagatgtggaaaaagataatgagcctgagatccagcctgctcaaaagaagttaaaggtatcatgtttcccagaaaagagttggaccaaaagagacattaaacccaattttccaagctggtcagcactggattctggacttttgaatctcaagagcgaaaagttgaacccagtagagctttttgaattattttttgatgatgaaacattcaacttaattgtcaatgaaaccaataattatgcttctcagaaaaatgtcagcttggaagtcacagttcaggaaatgaggtgtgtgtttggtgtcttacttttgagtggatttatgaggcatcctagaagggaaatgtattgggaagtctctgacaccgatcagaacctggttagagatgcaatcagaagggacagatttgaattgattttctcaaacctgcactttgcagataatggccacctagatcaaaaagataagtttacaaagttgagacctctcataaaacaaatgaataaaaatttcctcttgtatgctcccctggaagaatactattgctttgataagtcaatgtgtgaatgctttgatagtgaccaattcctgaatggaaagcctattagaattggctataaaatttggtgtggtacaaccacacagggttatctggtttggtttgaaccctatcaagaagaatcaactatgaaggtagatgaggatcctgatcttgggttaggtggaaatctagtgatgaacttcgctgatgttcttttagagagaggtcagtatccctatcacctgtgttttgatagcttctttacaagtgtcaaattgttgtcagccttgaaaaagaagggggtgagggcaacaggaacaattcgtgagaacaggaccgaaaaatgtccccttatgaatgtagaacatatgaaaaaaatgaagagagggtattttgatttccgaatagaagaaaacaatgagataattttgtgtcgttggtatggggatggcattatcagtctgtgctccaatgctgtgggcatagaaccagtcaatgaggtaagctgttgtgatgctgataacgaagaaatccctcagataagtcaaccatccatagtaaaagtgtatgatgaatgcaaggaaggtgtagctaaaatggatcaaattatttcgaaatacagggtgaggataagaagcaagaaatggtactcaattttggtgagctacatgattgatgtagccatgaacaatgcatggcaactacacagagcctgtaacccaggtgcttctctagaccccttggattttcggagatttgttgcacatttctacttggaacacaatgctcatctgtcagattagggtacataaaatggacatagtgcagacattaataagacatagaaaaataataattatacatgctgttgtaccctcccaaagtaaatctgatatatgtaatgaagttattaaataatacttttaaaaatcagacatttatatagagtttcaaagactattgtaacaagtaatgttaaaaattgtctgtgagaatgttgaactgtagtacctttctctatgtcaagttttgtgtcagacatgggaaatcatgtatttgttcaattgactactttgtgcacttatttattt

SEQ ID NO: 73326 - DNA, 3088 bp, Homo sapiens
ctggaggcgccggcagcgcccgccagacccgccagcccagcggcccgggctctggggaaaccggcgctcccgacaggggagcaccgggcctctgagctccctcgggagcctttcacgaggtcagctacgtctttgttgtgcgcgttcctgaacttttggtccattaaccaacaattagacacgccggtattcagtgcctggcgcggtgctagatgctgggtgtaatctcagaaaaatacattcaggggcgcgcctgagggtgctggctgctggcatctcaggtgctttacgtgcattcgtgaagaagcccatcagtatttcttgaataccagaccccaagctaagtgaagctttagcctctaagctcaacatgtatgaagctttgccaggccctgctcctgaaaatgaagatggccttgtgaaagtgaaggaggaagatcccacctgggagcaggtgtgcaactcacaggagggcagctcccacactcaggagatttgccgcctgcgctttcggcacttctgctaccaggaggctcacggaccccaggaagctctggcccaactccgagaactttgtcatcaatggctgagaccggagatgcacaccaaggaacagataatggaactgctggtgctggagcagttcctgaccatcctgcccaaggagctccagccctgtgtgaagacatatcctctggagagtggagaggaggcagtgacagtgctggagaatctagagacaggaagtggagacacaggacaacaggcctctgtctatattcagggacaggacatgcacccaatggtggcagaatatcaaggagtctctttggagtgtcagagcctccagctcctgcctgggataaccaccctgaagtgtgaacctccacagcgtcctcaagggaacccccaagaagtgagtgggcctgttccccacggatcagctcatctccaggaaaaaaaccccagagacaaggctgtagtgcctgtgtttaacccagtcaggtcccagacattggtgaagactgaggaagaaacagcccaggccgttgctgcagagaagtggtcacatctgagtctgactcggaggaacctctgtgggaactcagctcaggagacagttatgagcctcagtccgatgactgaagaaattgtaactaaagatagattgtttaaagcaaagcaagaaacttctgaagaaatggaacaaagtggagaagcctcaggaaagcccaacagagagtgtgcaccccagattccttgtagtactcctattgctactgaaaggacagttgcacatttgaacactctgaaggaccgtcacccaggtgatttgtgggcccgcatgcacatctcatccctggaatatgctgcaggagacattacccgaaaagggagaaaaaaagacaaagctcgagtgagtgaactgctccaaggcctctcattctctggtgactcagatgtggaaaaagataatgagcctgagatccagcctgctcaaaagaagttaaaggtatcatgtttcccagaaaagagttggaccaaaagagacattaaacccaattttccaagctggtcagcactggattctggacttttgaatctcaagagcgaaaagttgaacccagtagagctttttgaattattttttgatgatgaaacattcaacttaattgtcaatgaaaccaataattatgcttctcagaaaaatgtcagcttggaagtcacagttcaggaaatgaggtgtgtgtttggtgtcttacttttgagtggatttatgaggcatcctagaagggaaatgtattgggaagtctctgacaccgatcagaacctggttagagatgcaatcagaagggacagatttgaattgattttctcaaacctgcactttgcagataatggccacctagatcaaaaagataagtttacaaagttgagacctctcataaaacaaatgaataaaaatttcctcttgtatgctcccctggaagaatactattgctttgataagtcaatgtgtgaatgctttgatagtgaccaattcctgaatggaaagcctattagaattggctataaaatttggtgtggtacaaccacacagggttatctggtttggtttgaaccctatcaagaagaatcaactatgaaggtagatgaggatcctgatcttgggttaggtggaaatctagtgatgaacttcgctgatgttcttttagagagaggtcagtatccctatcacctgtgttttgatagcttctttacaagtgtcaaattgttgtcagccttgaaaaagaagggggtgagggcaacaggaacaattcgtgagaacaggaccgaaaaatgtccccttatgaatgtagaacatatgaaaaaaatgaagagagggtattttgatttccgaatagaagaaaacaatgagataattttgtgtcgttggtatggggatggcattatcagtctgtgctccaatgctgtgggcatagaaccagtcaatgaggtaagctgttgtgatgctgataacgaagaaatccctcagataagtcaaccatccatagtaaaagtgtatgatgaatgcaaggaaggtgtagctaaaatggatcaaattatttcgaaatacagggtgaggataagaagcaagaaatggtactcaattttggtgagctacatgattgatgtagccatgaacaatgcatggcaactacacagagcctgtaacccaggtgcttctctagaccccttggattttcggagatttgttgcacatttctacttggaacacaatgctcatctgtcagattagggtacataaaatggacatagtgcagacattaataagacatagaaaaataataattatacatgctgttgtaccctcccaaagtaaatctgatatatgtaatgaagttattaaataatacttttaaaaatcagacatttatatagagtttcaaagactattgtaacaagtaatgttaaaaattgtctgtgagaatgttgaactgtagtacctttctctatgtcaagttttgtgtcagacatgggaaatcatgtatttgttcaattgactactttgtgcacttatttattt

SEQ ID NO: 73327 - DNA, 1573 bp, Homo sapiens
ctggaggcgccggcagcgcccgccagacccgccagcccagcggcccgggctctggggaaaccggcgctcccgacaggggagcaccgggcctctgagctccctcgggagcctttcacgaggtcagctacgtctttgttgtgcgcgttcctgaacttttggtccattaaccaacaattagacacgccggtattcagtgcctggcgcggtgctagatgctgggtgtaatctcagaaaaatacattcaggggcgcgcctgagggtgctggctgctggcatctcaggtgctttacgtgcattcgtgaagaagcccatcagtatttcttgaataccagatctctatttctgaatatagaccccaagctaagtgaagctttagcctctaagctcaacatgtatgaagctttgccaggccctgctcctgaaaatgaagatggccttgtgaaagtgaaggaggaagatcccacctgggagcaggtgtgcaactcacaggagggcagctcccacactcaggagatttgccgcctgcgctttcggcacttctgctaccaggaggctcacggaccccaggaagctctggcccaactccgagaactttgtcatcaatggctgagaccggagatgcacaccaaggaacagataatggaactgctggtgctggagcagttcctgaccatcctgcccaaggagctccagccctgtgtgaagacatatcctctggagagtggagaggaggcagtgacagtgctggagaatctagagacaggaagtggagacacaggacaacaggcctctgtctatattcagggacaggacatgcacccaatggtggcagaatatcaaggagtctctttggagtgtcagagcctccagctcctgcctgggataaccaccctgaagtgtgaacctccacagcgtcctcaagggaacccccaagaagtgagtgggcctgttccccacggatcagctcatctccaggaaaaaaaccccagagacaaggctgtagtgcctgtgtttaacccagtcaggtcccagacattggtgaagactgaggaagaaacagcccaggccgttgctgcagagaagtggtcacatctgagtctgactcggaggaacctctgtgggaactcagctcaggagacagttatgagcctcagtccgatgagtaaggccaggcctctggctggacccctgtctggactctcattttcctgtcactcaccctggcttggcccttgggaggccacgtttcctacagacccacacccttcctttcccttcttctggcctctgcctccagacttctagcccttatcactttgcatccttcccaatcacattttcttctgttactaatcagtttactgattgttgtggttatcttctctgatcatctcttctagttccctgattccttcagtgactcctttgtatccttttccccttttttcttccctgtcaaggattccatataacttgtctttcagatatcccttcatacttggaagccccatgaacacctctgtctgaccttgtctttacctcagaggaggtcatcttcactctctaagaacac

SEQ ID NO: 73328 - DNA, 402 bp, Homo sapiens
cactttgtaaggtttttacttaatatcagagtagttctattttctcatattattttaaaacatttttcatagctgtatagaatttattgtatgggtcagccataatttgtttaatcagtcccataacatagggtctcagtatatgtattggttttctaccagctgctgcaaattacctcaaatttaattgatatgtaataactgtacatatttatggagtacaacgtgatgtttcaatacatgacagttatgtatcaattaaaaataaaagaaaaccttaaaaatgaaaaaaatcccacaaattatcttacagtctagtatgtcagaaatctgacagaggtcagatagatttacttctgcctccgtcttctactattaagactctcatgcttatattaggcc

SEQ ID NO: 73329 - DNA, 459 bp, Homo sapiens
ccctccccgcgcgcgtgcgcgccgcggccgcgcctgcgcagtgtagccgggtcagctggacagggtcatcctgagggtgcgactccgccgcgatggtgacccggttcctgggcccacgctaccgggagctggtcaagaactgggtcccgacggcctacacatggggcgctgtgggcgccgtggggctggtgtgggccaccgattggcggctgatcctggactgggtaccttacatcaatggcaagtttaagaaggataattaattacacaaacccttcacagactgctctggtgcctggtggtgctagctcctcccacctcagcacctgctgcatctggagcagcccaagcctcaggatggacaagaggaaacccacagctcagcttcaggcttcttatgtttctgaaaacagcttggatattttaatgcacgttgcattaaacctcactgaaacctgc

SEQ ID NO: 73330 - DNA, 480 bp, Homo sapiens
  misc_feature (16)..(16): n is a, c, g, or t
  misc_feature (33)..(33): n is a, c, g, or t
  misc_feature (83)..(83): n is a, c, g, or t
ctggacttaaagcttnaaattgcttttaagtgnccccaaaacttccctctctctctctctctctctctcctacttcttccttnccttccgaattcggcacgaaacccgccgcgatggtgacccggttcctgggcccacgctaccgggagctggtcaagaactgggtcccgacggcctacacatggggcgctgtgggcgccgtggggctggtgtgggccaccgattggcggctgatcctggactgggtaccttacatcaatggcaagtttaagaaggataattaattacacaaacccttcacagactgctctggtgcctggtggtgctagctcctcccacctcagcacctgctgcatctggagcagcccaagcctcaggatggacaagaggaaacccacagctcagcttcaggcttcttatgtttctgaaaacagcttggatattttaatgcacgttgcattaaacctcactgaaacctgc

SEQ ID NO: 73331 - DNA, 1059 bp, Homo sapiens
ccctccccgcgcgcgtgcgcgccgcggccgcgcctgcgcagtgtagccgggtcagctggacagggtcatcctgagggtgcgactccgccgcgatggtgacccggttcctgggcccacgctaccgggagctggtcaagaactgggtcccgacggcctacacatggggcgctgtgggcgccgtggggctggtgtgggccaccgattggcggctgatcctggactgggtaccttacatcaatggcaagtttaagaaggataattaattacacaaacccttcacagactgctctggtgcctggtggtgctagctcctcccacctcagcacctgctgcatctggagcagcccaagcctcaggatggacaagaggaaacccacagctcagcttcaggcttcttatgtttctgaaaacagcttggatattttaatgcacgttgcattaaacctcactgaaacctgcaaaaaaaaaaaaaaaaaaaaaaaaaaaaaaaaaaaaaaaaaaaaaaaaaacaacaaaaaaaaaaaaaaaaaaaagaagggggaaaaaaaaaaaaaaaaaaaaaaaagaaaaaaaagagacggcgggcagcgatgtatatgataagaaaagaaggagcacacacaaaaaagaagggaaacacaaaataaacaagaacaagagaggaaggcagcgcgccccatcaaaacacacgaggcggagtcacgagagaagaaaaccgcgccacggcggcaggacacattagaggaaagaggcacccacaaacacacggcgagggggaacaacgacaacagaacgagggaaaagcccacacggcaccgagacaacataggtgcccgacgacacgaacgaatgacgagaaacagaacactcacaccgatgaagagtaggagcaagcaacaccaagcccacgacatagagaaggaagcggaggaagaggaaaatagcgatggaacacacacgaaagaacgagataagagaaagcgaccgaaaccacaggggcggaaggcagaacaacatgagacgcaacaacacaccgccaagcagcaggaagagcgaagt

SEQ ID NO: 73332 - DNA, 358 bp, Homo sapiens
  misc_feature (26)..(26): n is a, c, g, or t
gccgcagtgtgcctggattcccgggngctggtcaagaactgggtcccgacggcctacacatggggcgctgtgggcgccgtggggctggtgtgggccaccgattggcggctgatcctggactgggtaccttacatcaatggcaagtttaagaaggataattaattacacaaacccttcacagactgctctggtgcctggtggtgctagctcctcccacctcagcacctgctgcatctggagcagcccaagcctcaggatggacaagaggaaacccacagctcagcttcaggcttcttatgtttctgaaaacagcttggatattttaatgcacgttgcattaaacctcactgaaacctgc

SEQ ID NO: 73333 - DNA, 1211 bp, Homo sapiens
ggtaaaaggggacctgctgcctggagggctcaggtctgagcacagggagccctcagcgcccacttcagcagacctattgggaatttactacctggagaccaattataggtctagggtcttctttgtgaatttgggggaatcgaggccttgaggggtgagaggtatggtctaaggtcacagtctgggagaggagtccttgggatcagaggttgtgcagaagcaccttccccacctcctgcctcatgagataaggttgccaggattcccattatcacggtgaacaccacgcgtccgggtcccgacggcctacacatggggcgctgtgggcgccgtggggctggtgtgggccaccgattggcggctgatcctggactgggtaccttacatcaatggcaagtttaagaaggataattaattacacaaacccttcacagactgctctggtgcctggtggtgctagctcctcccacctcagcacctgctgcatctggagcagcccaagcctcaggatggacaagaggaaacccacagctcagcttcaggcttcttatgtttctgaaaacagcttggatattttaatgcacgttgcattaaacctcactgaaacctgcaaaaaaaaaaaaaaaaaaaaaaaaaaaaaaaaaaaaaaaaaaaaaaaaaacaacaaaaaaaaaaaaaaaaaaaagaagggggaaaaaaaaaaaaaaaaaaaaaaaagaaaaaaaagagacggcgggcagcgatgtatatgataagaaaagaaggagcacacacaaaaaagaagggaaacacaaaataaacaagaacaagagaggaaggcagcgcgccccatcaaaacacacgaggcggagtcacgagagaagaaaaccgcgccacggcggcaggacacattagaggaaagaggcacccacaaacacacggcgagggggaacaacgacaacagaacgagggaaaagcccacacggcaccgagacaacataggtgcccgacgacacgaacgaatgacgagaaacagaacactcacaccgatgaagagtaggagcaagcaacaccaagcccacgacatagagaaggaagcggaggaagaggaaaatagcgatggaacacacacgaaagaacgagataagagaaagcgaccgaaaccacaggggcggaaggcagaacaacatgagacgcaacaacacaccgccaagcagcaggaagagcgaagt

SEQ ID NO: 73334 - DNA, 669 bp, Homo sapiens
ggcagcacacgaagtctaaagagattattctcttcccacagataccttttgagcaagccacagtgcttctatgagccaccctgagaagtctcacgtgatcacttccgccacagcctgtttatcaaaagcaagccccccaggcccagcccacgtgcagagggaggagaatgaggttctgtgttttgaagggaagaatatcagaattggtagacatttcaaactgtcacattagggatacaaaaatgaacaggctgggagtggtggctcagcctacaatcccaacactttgggaggctgaggaaggggcatcacttgaaccaggagttcagtactaacctgggcaacaaagaggcccctgtctctgataaaaagaaaaaaaatgaaaaaataaaaatgaacaggtataaaaagagaatcatccctatttctttacatgtcttaacttattcctcattacaatccaacatcctttgccaaactatttatccatgtaattctttttgccatttttaaacccgtctttatcatattataccccatggaatattgtccttttattatcaagcatattttatacggccttttttattatcatgatgtattactatatctcttgcaatatcttttcaggatatacaatattttgcccacgtatctatattcctcctt

SEQ ID NO: 73335 - DNA, 1495 bp, Homo sapiens
cccatcccccctcccccccttcccccccccccccccctcccccccccccccccccctccccctccccctccccctctccccctcccccccccctcccctcccctcctccccccccccccctccccccccgccccccccccccccccccccccccccccccccccccccccccaactatcggcttggtcgaggcctggctttggccgggtcagctggacagggtcatcctgagggtgcgactccgccgcgatggtgacccggttcctgggcccacgctaccgggagctggtcaagaactgggtcccgacggcctacacatggggcgctgtgggcgccgtggggctggtgtgggccaccgattggcggctgatcctggactgggtaccttacatcaatggcaagtttaagaaggataattaattacacaaacccttcacagactgctctggtgcctggtggtgctagctcctcccacctcagcacctgctgcatctggagcagcccaagcctcaggatggacaagaggaaacccacagctcagcttcaggcttcttatgtttctgaaaacagcttggatattttaatgcacgttgcattaaacctcactgaaacctgctccgtgcccggatgttgatcatgctggtggcttggttactgtgactgtagctggagtggcacaggtgacccaggcgtcctttcagctccagaatgttgcaagtctaggagagtgttccaatggctgacagaaactgcctatttgaaatggctcataagtagtatctgcagtgtgttcatccgttgctgccttaacaagtcacccacacgtagtggcttaaagcaacgaacattcactctctcacagtctgtgtcagtcggggatttgggagtgatgtatctgggtggttgtggcccagagtctctcatgaggttgcagttaagacatcagccaaggccacttcgtctgaggaaggctcaactggggctggagccacttccaagccagtgccctcacgtggctgtcggtgacagccacagttccttcccatgggggcccctacacgaagctgcttgagcatcctcacggcatggcctctgccttccccagagcaggtgaaccaagggagaggaaggagcaagccacagtgcttctatgagccaccctgagaagtctcacgtgatcacttccgccacagcctgtttatcaaaagcaagccccccaggcccagcccacgtgcagagggaggagaatgaggttctgtgttttgaagggaagaatatcagaattggtagacatttcaaactgtcacattagggatacaaaaatgaacaggctgggagtggtggctcagcctacaatcccaacactttgggaggctgaggaaggggcatcacttgaaccaggagttcagtactaacctgggcaacaaagaggcccctgtctctgataaaaagaaaaaaaatgaaaaaataaaaatgaacaggtataaaaagagaa

SEQ ID NO: 73336 - DNA, 610 bp, Homo sapiens
  misc_feature (460)..(460): n is a, c, g, or t
  misc_feature (462)..(462): n is a, c, g, or t
ccctccccgcgcgcgtgcgcgccgcggccgcgcctgcgcagtgtagccgggtcagctggacagggtcatcctgagggtgcgactccgccgcgatggtgacccggttcctgggcccacgctaccgggagctggtcaagaactgggtcccgacggcctacacatggggcgctgtgggcgccgtggggctggtgtgggccaccgattggcggctgatcctggactgggtaccttacatcaatggcaagtttaagaaggataattaattacacaaacccttcacagactgctctggtgcctggtggtgctagctcctcccacctcagcacctgctgcatctggagcagcccaagcctcaggatggacaagaggaaacccacagctcagcttcaggcttcttatgtttctgaaaacagcttggatattttaatgcacgttgcattaaacctcactgaaacctgcncnaacaaaacattttattattatttatgttccaaaacaggttggggtgcacacgaggaactttcacacttgtaggaatttaatcccagggggggggcacctcattttctccaaatattactctttggactgggtcgtgaaaaaaaacacc

SEQ ID NO: 73337 - DNA, 396 bp, Homo sapiens
ctctggggaaggcagaggccatgccgtgaggatgctcaagcagcttcgtgtaggggccaccctgagaagtctcacgtgatcacttccgccacagcctgtttatcaaaagcaagccccccaggcccagcccacgtgcagagggaggagaatgaggttctgtgttttgaagggaagaatatcagaattggtagacatttcaaactgtcacattagggatacaaaaatgaacaggctgggagtggtggctcagcctacaatcccaacactttgggaggctgaggaaggggcatcacttgaaccaggagttcagtactaacctgggcaacaaagaggcccctgtctctgataaaaagaaaaaaaatgaaaaaataaaaatgaacaggtataaaaagagaa

SEQ ID NO: 73338 - DNA, 939 bp, Homo sapiens
cccatcccccctcccccccttcccccccccccccccctcccccccccccccccccctccccctccccctccccctctccccctcccccccccctcccctcccctcctccccccccccccctccccccccgccccccccccccccccccccccccccccccccccccccccccaactatcggcttggtcgaggcctggctttggccgggtcagctggacagggtcatcctgagggtgcgactccgccgcgatggtgacccggttcctgggcccacgctaccgggagctggtcaagaactgggtcccgacggcctacacatggggcgctgtgggcgccgtggggctggtgtgggccaccgattggcggctgatcctggactgggtaccttacatcaatggcaagtttaagaaggataattaattacacaaacccttcacagactgctctggtaagtttcagtgggctgcggtgggtggactgcatgatggccggatggtggccgaagagtgggttctccaggctcccagagccggggcggcagccctcactgctccccctggagagacctgcattcgagagtggggccctgggtgccccttctggcatctccggcccacgggcacagaactgtccgccccgcagccttgggttgtgtgattggggtgtgggcctcgccctccctctggacaatcccagtgagtctttgaggcaaaccttgcttccgtctcagtgggcactgcagcctgaactgggtggggcccatgttacagacagagggggaaggtggaggctggcccacagtggctggacaccccatgagctcttggaagcgcctgtgaggccctggacgcatccacgtgtttctccagcatgccagctgcccccttaaccacagtgcctgtggcatcttcccagtgcccacatgacagtcccacgtgg

SEQ ID NO: 73339 - DNA, 540 bp, Homo sapiens
  misc_feature (495)..(495): n is a, c, g, or t
cccatcccccctcccccccttcccccccccccccccctcccccccccccccccccctccccctccccctccccctctccccctcccccccccctcccctcccctcctccccccccccccctccccccccgccccccccccccccccccccccccccccccccccccccccccaactatcggcttggtcgaggcctggctttggccgggtcagctggacagggtcatcctgagggtgcgactccgccgcgatggtgacccggttcctgggcccacgctaccgggagctggtcaagaactgggtcccgacggcctacacatggggcgctgtgggcgccgtggggctggtgtgggccaccgattggcggctgatcctggactgggtaccttacatcaatggcaagtttaagaaggataattaattacacaaacccttcacagactgctctggtgctgtgtgctagctctcactacactctgcatctgagcagcccaanctagatgacagagaaccacactactagctctatgttctgaaacac

SEQ ID NO: 73340 - DNA, 616 bp, Homo sapiens
cccatcccccctcccccccttcccccccccccccccctcccccccccccccccccctccccctccccctccccctctccccctcccccccccctcccctcccctcctccccccccccccctccccccccgccccccccccccccccccccccccccccccccccccccccccaactatcggcttggtcgaggcctggctttggccgggtcagctggacagggtcatcctgagggtgcgactccgccgcgatggtgacccggttcctgggcccacgctaccgggagctggtcaagaactgggtcccgacggcctacacatggggcgctgtgggcgccgtggggctggtgtgggccaccgattggcggctgatcctggactgggtaccttacatcaatggcaagtttaagaaggataattaattacacaaacccttcacagactgctctggtgcctggtggtgctagctcctcccacctcagcacctgctgcatctggagcagcccaagcctcaggatggacaagaggaaacccacagctcagcttcaggcttcttatgtttctgaaaacagcttggatattttaatgcacgttgcattaaacctcactgaaacctgc

SEQ ID NO: 73341 - DNA, 411 bp, Homo sapiens
ggctaggtacgaggcgggtgtgaatcggacgaggcgccgccgcgatggtgacccggttcctgggcccacgctaccgggagctggtcaagaactgggtcccgacggcctacacatggggcgctgtgggcgccgtggggctggtgtgggccaccgattggcggctgatcctggactgggtaccttacatcaatggcaagtttaagaaggataattaattacacaaacccttcacagactgctctggtgcctggtggtgctagctcctcccacctcagcacctgctgcatctggagcagcccaagcctcaggatggacaagaggaaacccacagctcagcttcaggcttcttatgtttctgaaaacagcttggatattttaatgcacgttgcattaaacctcactgaaacctgc

SEQ ID NO: 73342 - DNA, 1007 bp, Homo sapiens
ggtggagctccgggtttatttggacgagggagccgccgcgatggtgacccggttcctgggcccacgctaccgggagctggtcaagaactgggtcccgacggcctacacatggggcgctgtgggcgccgtggggctggtgtgggccaccgattggcggctgatcctggactgggtaccttacatcaatggcaagtttaagaaggataattaattacacaaacccttcacagactgctctggtgcctggtggtgctagctcctcccacctcagcacctgctgcatctggagcagcccaagcctcaggatggacaagaggaaacccacagctcagcttcaggcttcttatgtttctgaaaacagcttggatattttaatgcacgttgcattaaacctcactgaaacctgcaaaaaaaaaaaaaaaaaaaaaaaaaaaaaaaaaaaaaaaaaaaaaaaaaacaacaaaaaaaaaaaaaaaaaaaagaagggggaaaaaaaaaaaaaaaaaaaaaaaagaaaaaaaagagacggcgggcagcgatgtatatgataagaaaagaaggagcacacacaaaaaagaagggaaacacaaaataaacaagaacaagagaggaaggcagcgcgccccatcaaaacacacgaggcggagtcacgagagaagaaaaccgcgccacggcggcaggacacattagaggaaagaggcacccacaaacacacggcgagggggaacaacgacaacagaacgagggaaaagcccacacggcaccgagacaacataggtgcccgacgacacgaacgaatgacgagaaacagaacactcacaccgatgaagagtaggagcaagcaacaccaagcccacgacatagagaaggaagcggaggaagaggaaaatagcgatggaacacacacgaaagaacgagataagagaaagcgaccgaaaccacaggggcggaaggcagaacaacatgagacgcaacaacacaccgccaagcagcaggaagagcgaagt

SEQ ID NO: 73343 - DNA, 2095 bp, Homo sapiens
cccatcccccctcccccccttcccccccccccccccctcccccccccccccccccctccccctccccctccccctctccccctcccccccccctcccctcccctcctccccccccccccctccccccccgccccccccccccccccccccccccccccccccccccccccccaactatcggcttggtcgaggcctggctttggccgggtcagctggacagggtcatcctgagggtgcgactccgccgcgatggtgacccggttcctgggcccacgctaccgggagctggtcaagaactgggtcccgacggcctacacatggggcgctgtgggcgccgtggggctggtgtgggccaccgattggcggctgatcctggactgggtaccttacatcaatggcaagtttaagaaggataattaattacacaaacccttcacagactgctctggtgcctggtggtgctagctcctcccacctcagcacctgctgcatctggagcagcccaagcctcaggatggacaagaggaaacccacagctcagcttcaggcttcttatgtttctgaaaacagcttggatattttaatgcacgttgcattaaacctcactgaaacctgctccgtgcccggatgttgatcatgctggtggcttggttactgtgactgtagctggagtggcacaggtgacccaggcgtcctttcagctccagaatgttgcaagtctaggagagtgttccaatggctgacagaaactgcctatttgaaatggctcataagtagtatctgcagtgtgttcatccgttgctgccttaacaagtcacccacacgtagtggcttaaagcaacgaacattcactctctcacagtctgtgtcagtcggggatttgggagtgatgtatctgggtggttgtggcccagagtctctcatgaggttgcagttaagacatcagccaaggccacttcgtctgaggaaggctcaactggggctggagccacttccaagccagtgccctcacgtggctgtcggtgacagccacagttccttcccatgggggcccctacacgaagctgcttgagcatcctcacggcatggcctctgccttccccagagcaggtgaaccaagggagaggaaggagcaagccacagtgcttctatgagccaccctgagaagtctcacgtgatcacttccgccacagcctgtttatcaaaagcaagccccccaggcccagcccacgtgcagagggaggagaatgaggttctgtgttttgaagggaagaatatcagaattggtagacatttcaaactgtcacattagggatacaaaaatgaacaggctgggagtggtggctcagcctacaatcccaacactttgggaggctgaggaaggggcatcacttgaaccaggagttcagtactaacctgggcaacaaagaggcccctgtctctgataaaaagaaaaaaaatgaaaaaataaaaatgaacaggtataaaaagagaaaaaaaaaaaaaaaaaaaaaaaaaaaaaaaaaaaaaaaaaaaaaaaaaaaacaacaaaaaaaaaaaaaaaaaaaagaagggggaaaaaaaaaaaaaaaaaaaaaaaagaaaaaaaagagacggcgggcagcgatgtatatgataagaaaagaaggagcacacacaaaaaagaagggaaacacaaaataaacaagaacaagagaggaaggcagcgcgccccatcaaaacacacgaggcggagtcacgagagaagaaaaccgcgccacggcggcaggacacattagaggaaagaggcacccacaaacacacggcgagggggaacaacgacaacagaacgagggaaaagcccacacggcaccgagacaacataggtgcccgacgacacgaacgaatgacgagaaacagaacactcacaccgatgaagagtaggagcaagcaacaccaagcccacgacatagagaaggaagcggaggaagaggaaaatagcgatggaacacacacgaaagaacgagataagagaaagcgaccgaaaccacaggggcggaaggcagaacaacatgagacgcaacaacacaccgccaagcagcaggaagagcgaagt

SEQ ID NO: 73344 - DNA, 1290 bp, Homo sapiens
ggctaggtacgaggcgggtgtgaatcggacgaggcgccgccgcgatggtgacccggttcctgggcccacgctaccgggagctggtcaagaactgggtcccgacggcctacacatggggcgctgtgggcgccgtggggctggtgtgggccaccgattggcggctgatcctggactgggtaccttacatcaatggcaagtttaagaaggataattaattacacaaacccttcacagactgctctggtgcctggtggtgctagctcctcccacctcagcacctgctgcatctggagcagcccaagcctcaggatggacaagaggaaacccacagctcagcttcaggcttcttatgtttctgaaaacagcttggatattttaatgcacgttgcattaaacctcactgaaacctgctccgtgcccggatgttgatcatgctggtggcttggttactgtgactgtagctggagtggcacaggtgacccaggcgtcctttcagctccagaatgttgcaagtctaggagagtgttccaatggctgacagaaactgcctatttgaaatggctcataagtagtatctgcagtgtgttcatccgttgctgccttaacaagtcacccacacgtagtggcttaaagcaacgaacattcactctctcacagtctgtgtcagtcggggatttgggagtgatgtatctgggtggttgtggcccagagtctctcatgaggttgcagttaagacatcagccaaggccacttcgtctgaggaaggctcaactggggctggagccacttccaagccagtgccctcacgtggctgtcggtgacagccacagttccttcccatgggggcccctacacgaagctgcttgagcatcctcacggcatggcctctgccttccccagagcaggtgaaccaagggagaggaaggagcaagccacagtgcttctatgagccaccctgagaagtctcacgtgatcacttccgccacagcctgtttatcaaaagcaagccccccaggcccagcccacgtgcagagggaggagaatgaggttctgtgttttgaagggaagaatatcagaattggtagacatttcaaactgtcacattagggatacaaaaatgaacaggctgggagtggtggctcagcctacaatcccaacactttgggaggctgaggaaggggcatcacttgaaccaggagttcagtactaacctgggcaacaaagaggcccctgtctctgataaaaagaaaaaaaatgaaaaaataaaaatgaacaggtataaaaagagaa

SEQ ID NO: 73345 - DNA, 749 bp, Homo sapiens
cccatcccccctcccccccttcccccccccccccccctcccccccccccccccccctccccctccccctccccctctccccctcccccccccctcccctcccctcctccccccccccccctccccccccgccccccccccccccccccccccccccccccccccccccccccaactatcggcttggtcgaggcctggctttggccgggtcagctggacagggtcatcctgagggtgcgactccgccgcgatggtgacccggttcctgggcccacgctaccgggagctggtcaagaactgaatgccatcaagacaacacgtgcgaagattcctgccctgttggtggcatctgcctccgagccaggttccaggagcagctgtgcgtgcccccagctggtgagcgggcacctggcctacacttggagagtctctgggtcccgacggcctacacatggggcgctgtgggcgccgtggggctggtgtgggccaccgattggcggctgatcctggactgggtaccttacatcaatggcaagtttaagaaggataattaattacacaaacccttcacagactgctctggtgcctggtggtgctagctcctcccacctcagcacctgctgcatctggagcagcccaagcctcaggatggacaagaggaaacccacagctcagcttcaggcttcttatgtttctgaaaacagcttggatattttaatgcacgttgcattaaacctcactgaaacctgc

SEQ ID NO: 73346 - DNA, 592 bp, Homo sapiens
cataggctccagaaaacaagaagcaagactggaaagctggggatgattgtacgccctcgcctgaatcttacgtggttcctccttcttccacctggccagtgcagagccgtgggtgccacgtggccacttctggattgggttccccttggcctgccaccctgtccttctgctttcccactttgccagccagagtcaatttgaggacgccaagttctcctctccatacagagctcctggtctccttgtaacttgtaactcctgggcacagttacaagtgctgaattcttgcgaggatgaactcaagatacaaaatatgcttggcaactcacccctgagtggccacaggcacacgcaggagtcgaacccacccacctctgctgacagtcatgggtcaagctcaaagtcctggctgcttctctgctcaagaaattgccacagcctccgtaaccttcagcagccaccatcctgatcagttagcagccatcatcaagacaagacccttccccagcataaacattacggcttgctgaagacttagatcatagttagcatttttaagcaatcaagtgttttaaaattaaggtatgtacat

SEQ ID NO: 73347 - DNA, 519 bp, Homo sapiens
aaaaagttaattgaagaaaagtagaaatcaaatatttcagttgttctgaatcatgagtaagatgcctataaggaagaaaaattctcctaaatgactacatctggtcatgccttcttagcttttaaagtattttgtgatacacaggaatttatgtttttttcctgaggtgaagctctctgtaagaaggaaagcagatgtttctttttaagtgcttgtatacacctgccacaaggcagactgagtagttcatatggagagcaggctcgggttattttttatgttgcttgtgaaattaaaattcttttcctggcaagcataggtttataattaagtaatttatcataagagttcttttagctatatcaaaaatttgatgatatacagaagcaatatgtgagtggttacttagaaattagatgaatgagttatttcattggcatttatcatttgatgtgtaggtttttcctatttataacaaacattgaacactgactaattacctgcaactgaaagagggtt

SEQ ID NO: 73348 - DNA, 518 bp, Homo sapiens
gccttagtattctcgaggctgtttcttacagcaacccttgctggaaggtgagggcatgacaaaaaaacatgactcagtgatagcagttttcttagcgggatggggttgtgttgggagactagttgggttgggtagtgaagccaaagcattttgtttctgacagtccagtttaacgccagaataaaatacagagtaggtaagtgggtagaatgcgtgactctcaaacaattctttgtcgagttagtcttcatcagtcattgttttatcattgctaggtggaccacattgtacagttaagctctctggcacaggtctaagtgctgtgctttgtgctgctggttatggtaaccccatcactttaccaaataatgcagggttgaccctttgtgtgggttttatggagcttcattaaccacaattctcacctggataaatgcctccaaggtagaccaagggaatgccagacaagaccaggatattgctttgaaaagactcctggttgcagtgtggagtttaaa

SEQ ID NO: 73349 - DNA, 294 bp, Homo sapiens
cagttgtaaaaattgccctagtttgttaagtttcctactgttaggaagtggtagtttttattttattacccttgcagttttattagaaagttatattcttttaatggaaataacccttttaaagaataaatgtgttatctcctatttgttttcatttagtatatattctttaccttaatcttatattatttaagtatgagctcttcagaaaggaaattaggatgaagaggatttcatgtatttttcaatatcctggattcagtaaacagcaattttaacttctaggccatataa

SEQ ID NO: 73350 - DNA, 1271 bp, Homo sapiens
cccgagtagctgggattgcaggcatgcaccatcacacctggctaattttgtattttcagtagagacagcgttttgccatgctggccaggctcgtctcgaactcctgacctcaggtgatccgcccaccttggcctcccaaagtgctgggattacacgcgtgagccaccatgcccggccaatactacactcttattctgccttacgaggatttctggaagcttctgtaactgtagggaagaaagctgtaggggagcatggtttttttgttttgtttttgtttttgagacgaggtctcactgtcacccaggctggagtgcagtggtgccatcatgactcactgcagccttgacctcccaggcgcacaaaatcctcctctcagcctgagtaactgggactacaggtgtgtaccactacatccagctaaaggagagcgtttttttctttttctttttgagacagagtctcactctggcgcctggtcactgtgcccttcaccttctgggttcaagtgattctcctgcctcagcctccctagtagctgggattacaggcatgcaccaccatacccagctaatttctggtatttttagtagagatggagtttcaccatgttggccaggctggtctcgaactcctgacctcaggtgatccacctgcctcggcctcccaaagtgctaggattacaggcgtgagccaccatgcccagctgggagcgttctttcagcaaaaagtctaattcagagactcaccttccatcctggcactaaacaatagtactagaggtaagatctgccaagaatttctctcacttaagcaggatacttactttaaatataattaggcaagacttatttgagtacttgcctaattgtatttaattagaactatgctggatgctgtagacagaagaaataaaatactcaacttggtccctatcttccagcaggttagaggcctttagggaagaaaagcctgtgtgcagggaaagagaacctcaccagaaagtattcaataaaatgccaaagtgatcttacagaacagtgcctgtgacaccggaggggattgttctgtctttgtgagtgaacatacaatgatggggataactggtcctcataccatgcaggtcccatttctgatcaccccactggcaggacaattcacagttcttgagcaaactgagttagggagggtatgctaacgacagaacctatgcaagttcttagaaatattttttgtttgctgaaataaagctcaatcaacacactacctta

SEQ ID NO: 73351 - DNA, 1472 bp, Homo sapiens
cccgagtagctgggattgcaggcatgcaccatcacacctggctaattttgtattttcagtagagacagcgttttgccatgctggccaggctcgtctcgaactcctgacctcaggtgatccgcccaccttggcctcccaaagtgctgggattacacgcgtgagccaccatgcccggccaatactacactcttattctgccttacgaggatttctggaagcttctgtaactgtagggaagaaagctgtaggggagcatggtttttttgttttgtttttgtttttgagacgaggtctcactgtcacccaggctggagtgcagtggtgccatcatgactcactgcagccttgacctcccaggcgcacaaaatcctcctctcagcctgagtaactgggactacaggtgtgtaccactacatccagctaaaggagagcgtttttttctttttctttttgagacagagtctcactctggcgcctggtcactgtgcccttcaccttctgggttcaagtgattctcctgcctcagcctccctagtagctgggattacaggcatgcaccaccatacccagctaatttctggtatttttagtagagatggagtttcaccatgttggccaggctggtctcgaactcctgacctcaggtgatccacctgcctcggcctcccaaagtgctaggattacaggcgtgagccaccatgcccagctgggagcgttctttcagcaaaaagtctaattcagagactcaccttccatcctggcactaaacaatagtactagaggtaagatctgccaagaatttctctcacttaagcaggatacttactttaaatataattaggcaagacttatttgagtacttgcctaattgtatttaattagaactatgctggatgctgtagacagaagaaataaaatactcaacttggtccctatcttccagcaggttagaggcctttagggaagaaaagcctgtgtgcagggaaagagaacctcaccagaaagtattcaataaaatgccaaagtgatcttacagaacagtgcctgtgacaccggaggggattgttctgtctttgtgagtgaacatacaatgatggggataactggtcctcataccatgcaggtcccatttctgatcaccccactggcaggacaattcacagttcttgagcaaactgagttagggagggtatgctaacgacagaacctatgcaagttcttagaaatattttttgtttgctgaaataaagctcaatcaacacactaccttaaaaaaaagtggagcagtggcatttccatgcctcatgctcaccatcatgaggttaacttcccgccgtcgcctcttgcctgccaggggtttttcgggagcccctctctgttccactctgattccttttgtttctttgctgaccattcactctctgtgtctgttgttggatccaaatacgagtgtttttctttcaaattgtggt

SEQ ID NO: 73352 - DNA, 401 bp, Homo sapiens
tcggacccatttccttactgcctcttgccctagagtgatcctgagaaccactgctatttatgtcttagtgctgtattgccttgtatttccttctgagttacatggacacagaacagtatgaagaagcagtacgagactatgaaaaagtataccagacagagaaaacaaaagaacacaaacagctcctaaaaaatgcgcagctggaactgaagaagagtaagaggaaagattactacaagattctacgagtggaaggatttccttactgcctcttgcctgccaggggtttttcgggagcccctctctgttccactctgattccttttgtttctttgctgaccattcactctctgtgtctgttgttggatccaaatacgagtgtttttctttcaaattgtggt

SEQ ID NO: 73353 - DNA, 5956 bp, Homo sapiens
cgcggccgagtcgcggaggcgcctccgctgcagtcgctgcgtctccaagcaacatggctgacaaggccaagcctgccaaagctgccaacaggacgccccccaagtccccgggggacccctcgaaggaccgggcagccaagaggctgtcgctggaatcggagggtgctggtgagggggcagccgcatcccctgagctcagtgccctggaggaggccttccggcgctttgccgtgcacggggacgccagggccaccgggagggagatgcacggcaagaactggtcgaagctgtgcaaggactgccaggtgatcgacggcaggaacgtgaccgtcactgacgtggacatcgtcttcagcaagatcaaagggaagtcttgccggaccatcacctttgagcagttccaggaggcgctggaggagctcgccaagaagcgattcaaagacaagagcagcgaggaggccgttcgcgaggtgcacaggctcatcgagggcaaggcgcccatcatctcaggggtgacgaaagccatctcgtcgcccacagtgtcgaggctcacggacaccaccaagttcacgggctcccacaaggagcgcttcgacccctctggcaagggcaagggcaaggctggccgcgtggatctggtggacgagtcaggctatgtgtccggctacaagcacgcaggcacctacgaccagaaggtgcaagggggcaagtagcccccgctccatgcctcgcggcactgccggtgtccccagagcagggactctgtcacctcgcacttcattacattcctgtactaactggggcagaactcagacgggtgccccagagggggctggggggcggccaggcccaggcctccctcctgcccctcctcctaccggatgcccccagcactcccctctcaaaccaggtttgggccccagttcgctgaccctcctaatacacctgcctcgtcctcagccatttccaaagtgtctcgcggatcacaccacactgggcacgtggtttgcaggtcaaaggggcgttttaaagcagctggctgtcatggcaacaggaggctgtgctgacctcctgagcggcagacaccttccaggagccctgagggtggcaggagctaaccccaaccagcaggcaactaacacggaattggccccacaccggacgtgggaggtgtctgtggggcccgaggcctgtcctgtgtgcagcggacaccacggggccttcctgctttcctgggcagagggcagagtgaggccacctggcgggggtgctgggcgcctggcacatgtgtggggaagccggtcacatggacacacctgtgcacacatgcctacaggccagctctgtgccaagggcaacctaggtaaaacgaaagccgtcaggggcagtgggcggcttcccggctgaccacagtggcttggactgtgagggtagagtaggctcgctttgctttcctgagaagatgcggtggctgcctatgttctcagagcgggtctgggaagattcagaatgtccggtccctgtggtgttgccaggcaagagacacgaagtgccgagacactcctcgcctcaccgcgtgacagagcctctgcccggccctcccgttcgcccgtcctcactagctgcaccctgtttgctcgcagacctcccattgccacagcccaagcaccttcttcaactctcccaaaatggctcagcctaacctctcctggccaatcccccccgccggagagcaggacactagggaggacccccagtcctgcagtgtctgtgggggtttctctgccagcagggggctgagcagagcccatccaggacactccacactgccaggacacacccaggcggcccgcccttgcctgtctgcacctggggagaagccggcgctcctgctccctcctggggaggctgacgggtgtggccacccgctgtcacaatggcacactgccactgtcccttggcacgcacacagccacagccacacgtgtgacctgctgggccgtggttctggagtctacctgcggatgagcctgcggcagtcctggggaaacttttccagagcctgttagcccgtggctacggtcaggctctggccagggcagagggctgcccagggccaggctcacagtacaggagggtggcgaggcccctccctcactggcacgcatgagcaccacccgcctccccgactcccaagagtgcacctgctgcggccacagctccgtggaaggactccccctacctgagcagagcagaagccccagggcggagctcccagccagcatggtccgctgagggctggggggcggtctccgaggcccctcaacagagaagcctccacctgaggatggggaggacctggcaggcagcttccacggcagggctgggaagttcagtgcctggaaataaagagcaaggaaaaatggacctcaggcttcgtggctcctttaggatgtcacctcaccggcctggggaaggcggggggtgcccaagcccagccctgtgcccccgctgaacctggctggaccgcgtgtgaaaggcagaactaacgtgcggaaacatttgaaaacaactctgaatgtgcggttcggaatcacccgatcacagacgagcggtcaccggaatcgcccggtcacagacgagcagtcatcggactcacccgatcacagacgagcggtcaccggaatcgcccgatcacagacgagcggccaccggaatcgcccaatcacagacaagcagtcatcggaatcacccgatcacagacgagcagtcatcggactcacccgatcacagacgagcggtcaccagactcgcccgatcacagacgagcagtcatcggaatcacccgatcacagacgagcagtcatcggactcacccgatcacagacgagcggtcaccagaatcgcccgatcacagacgagcagtcatcggaatcacccgatcacagacgagtggccaccggaatcacccgataacagcccatcacaactccaaagcccttgtgttgaaaaggccgaggacgagtggtcaccaaacagggtggctccccaggtcccgaagcctgagacccggaaggccctggcacccttacaccctcggactcctgccctcctcggcctccctggccccagcgcggctccaccctgggctgcgtctcctggtcacaggctgcgtttctcctttctgtccgtgggcagcccagtccccacagtcacggccaagccacgcagaacgaacatgactccagaggacctcgccctggagctgagcctggcgccgggtcaggacggagggaagggcgggttggggtccgcgggtcctcacaccgcacggcaggcacagaggctcgccaggccctgatccggtctgtggggacgagggacactgaggagaggtgctgggcaccaggacgctgcctcctggtccctggttggcctcagacaagcacggcctcgagaaaagagccaagcgcatcgggagcacaccagaaaccggccctgagcacgagaagagcctccgcccggcccgggcaccacccgacctcgcagggagcaggccctgtcaccgacgggtcacctcgcccacacggccagcaccgactcaccacagcccttcccagacctggctggagtggccggagcggcggggctcatggctcccatcttggcccctggaggtgagctcattcacagaagtggtcccttcactctgagagagaaaatcgtggcgtgcatcccaaaccctaggccacgcctgtgggtttcgtgaatgagatcgaggctgctgtggcaccctgcccgtcctggcctggagcaccctgggatcctggagggagaggccccacgcccccactctccctccacacttccagggttggtgcccacgagttagaggcacgccctcccccagcggccctcaggcttttctcagacatgcgggagccaggagagcacccttctccactcagctccaaagcgaatctttgaaaacacccactcggctcccatctctgtcacctagccaggaggggtagcaaaaataaagtcacgaggacatagtggtcaccactgtcagttacaacttgtctgtggaatccgtaattgcatctgtgtgccgcctccgaacacagaacattgtttggacggcagccccactgcacataacagacccgtgcatcttcctcagtcagtttctgaatattgtgaattcaggcaggtgtgtgttctcttctgcatgtttttatgcactgccaattagcttctactaaccacggttcaacagaaaataaatgtgtatttgtgaataacaaactgcacaacctgcaaaccaggagagagggacaggttctgtcaggggtgacaccaggacacagggacaggttctgtcgggggtgacaccaggacacagggacaggttctgtcatgggtgacacgaggacacagggacaggttctatcatgggtgacaccaggagagagggacaggttctgttgggggtgacaagaggagacagggacaggttctgtcgggggtgacaccaggagagagggacaggttctgtcaggggtgacaccaggagagagggacaggttctgttgggggtgacaccaggacacaggaataggttctgtcgggaggacagtgctgatcgtgtctcagcatcaggaaaggagaaaggcagagggagagcgctgagaagactgttcacgccagagtgcttatttatttttaatttactgctataggataagcaaccaggtagtgttcctaacaattagcgttaccaaaattaaagttcaaattatatgtttaaaatattgtagaagatatatatttatactggactacttttacaccttctaatatcctgtccaagtttgggcgcagatggtggagttgggctggcatcatgtcctgtggccgccccacttgcctgttggtgccactccatcccgggccccagggatgccagctcagggctgaccacagcagccctgcgtgggcatcacctcctaccccagcccccatcctgggctgctgcggccgcctgcttttgtgaatggtgttttgttggcacagggcctgtcctgtgttttcacacaggcctgtggctcctgctgtacaagtggagtggggaggagttgagatggagatgccttggccctggacacttacctgtccctctactggcccagctcatctcctcctgtgggcaatcacgcgtgcactggccaccctcccaccccacagcacacaccacgaggggatggcacagggggaagatgaggctggaccgtgatgttatcaataggctagaacgtccttcaaacactgaacctgcatctttcctcctcttactactgaacactttgtgagctctggtggtccagggtgcagcgtttgtccctgggcatgtgatggggagtcctgggcacatcgagatgctttacttctttctttcgacctcttaaaaaactaaaccaagccaaaccacaaaggaaatctgcacaacttaagagaaacttgaaagggatcgtgtaactactagtttgtactaagtttttttcaagaaagggaaacaaatttatatatatatatatatatatatatgtgcaatatatttttacactgtgtgattaacattagggagtactgagtgcatcactttatcagtgtgacgggtgatgtccacgtcatggctgttctgactctgaaagccacttctgctgatgtctaaaccgcactacaaccggacgtccgcggggtggggtggccctgctgttcctcctgcaggtgagaggtgtggtgttgcctgttggacttgctgttgagcctggcttgcaaacctgtagtgaaacagctcgtgtctgtgtgcacactgctcctgtgtctgctgtcgttaacattgtgtgtcaagttggtaaagtgacaaataaaggtgttaaaacatggattt

SEQ ID NO: 73354 - DNA, 5425 bp, Homo sapiens
cgcggccgagtcgcggaggcgcctccgctgcagtcgctgcgtctccaagcaacatggctgacaaggccaagcctgccaaagctgccaacaggacgccccccaagtccccgggggacccctcgaaggaccgggcagccaagaggctgtcgctggaatcggagggtgctggtgagggggcagccgcatcccctgagctcagtgccctggaggaggccttccggcgctttgccgtgcacggggacgccagggccaccgggagggagatgcacggcaagaactggtcgaagctgtgcaaggactgccaggtgatcgacggcaggaacgtgaccgtcactgacgtggacatcgtcttcagcaagatcaaagggaagtcttgccggaccatcacctttgagcagttccaggaggcgctggaggagctcgccaagaagcgattcaaagacaagagcagcgaggaggccgttcgcgaggtgcacaggctcatcgagggcaaggcgcccatcatctcaggggtgacgaaagccatctcgtcgcccacagtgtcgaggctcacggacaccaccaagttcacgggctcccacaaggagcgcttcgacccctctggcaagggcaagggcaaggctggccgcgtggatctggtggacgagtcaggctatgtgtccggctacaagcacgcaggcacctacgaccagaaggtgcaagggggcaagtagcccccgctccatgcctcgcggcactgccggtgtccccagagcagggactctgtcacctcgcacttcattacattcctgtactaactggggcagaactcagacgggtgccccagagggggctggggggcggccaggcccaggcctccctcctgcccctcctcctaccggatgcccccagcactcccctctcaaaccaggtttgggccccagttcgctgaccctcctaatacacctgcctcgtcctcagccatttccaaagtgtctcgcggatcacaccacactgggcacgtggtttgcaggtcaaaggggcgttttaaagcagctggctgtcatggcaacaggaggctgtgctgacctcctgagcggcagacaccttccaggagccctgagggtggcaggagctaaccccaaccagcaggcaactaacacggaattggccccacaccggacgtgggaggtgtctgtggggcccgaggcctgtcctgtgtgcagcggacaccacggggccttcctgctttcctgggcagagggcagagtgaggccacctggcgggggtgctgggcgcctggcacatgtgtggggaagccggtcacatggacacacctgtgcacacatgcctacaggccagctctgtgccaagggcaacctaggtaaaacgaaagccgtcaggggcagtgggcggcttcccggctgaccacagtggcttggactgtgagggtagagtaggctcgctttgctttcctgagaagatgcggtggctgcctatgttctcagagcgggtctgggaagattcagaatgtccggtccctgtggtgttgccaggcaagagacacgaagtgccgagacactcctcgcctcaccgcgtgacagagcctctgcccggccctcccgttcgcccgtcctcactagctgcaccctgtttgctcgcagacctcccattgccacagcccaagcaccttcttcaactctcccaaaatggctcagcctaacctctcctggccaatcccccccgccggagagcaggacactagggaggacccccagtcctgcagtgtctgtgggggtttctctgccagcagggggctgagcagagcccatccaggacactccacactgccaggacacacccaggcggcccgcccttgcctgtctgcacctggggagaagccggcgctcctgctccctcctggggaggctgacgggtgtggccacccgctgtcacaatggcacactgccactgtcccttggcacgcacacagccacagccacacgtgtgacctgctgggccgtggttctggagtctacctgcggatgagcctgcggcagtcctggggaaacttttccagagcctgttagcccgtggctacggtcaggctctggccagggcagagggctgcccagggccaggctcacagtacaggagggtggcgaggcccctccctcactggcacgcatgagcaccacccgcctccccgactcccaagagtgcacctgctgcggccacagctccgtggaaggactccccctacctgagcagagcagaagccccagggcggagctcccagccagcatggtccgctgagggctggggggcggtctccgaggcccctcaacagagaagcctccacctgaggatggggaggacctggcaggcagcttccacggcagggctgggaagttcagtgcctggaaataaagagcaaggaaaaatggacctcaggcttcgtggctcctttaggatgtcacctcaccggcctggggaaggcggggggtgcccaagcccagccctgtgcccccgctgaacctggctggaccgcgtgtgaaaggcagaactaacgtgcggaaacatttgaaaacaactctgaatgtgcggttcggaatcacccgatcacagacgagcggtcaccggaatcgcccggtcacagacgagcagtcatcggactcacccgatcacagacgagcggtcaccggaatcgcccgatcacagacgagcggccaccggaatcgcccaatcacagacaagcagtcatcggaatcacccgatcacagacgagcagtcatcggactcacccgatcacagacgagcggtcaccagactcgcccgatcacagacgagcagtcatcggaatcacccgatcacagacgagcagtcatcggactcacccgatcacagacgagcggtcaccagaatcgcccgatcacagacgagcagtcatcggaatcacccgatcacagacgagtggccaccggaatcacccgataacagcccatcacaactccaaagcccttgtgttgaaaaggccgaggacgagtggtcaccaaacagggtggctccccaggtcccgaagcctgagacccggaaggccctggcacccttacaccctcggactcctgccctcctcggcctccctggccccagcgcggctccaccctgggctgcgtctcctggtcacaggctgcgtttctcctttctgtccgtgggcagcccagtccccacagtcacggccaagccacgcagaacgaacatgactccagaggacctcgccctggagctgagcctggcgccgggtcaggacggagggaagggcgggttggggtccgcgggtcctcacaccgcacggcaggcacagaggctcgccaggccctgatccggtctgtggggacgagggacactgaggagaggtgctgggcaccaggacgctgcctcctggtccctggttggcctcagacaagcacggcctcgagaaaagagccaagcgcatcgggagcacaccagaaaccggccctgagcacgagaagagcctccgcccggcccgggcaccacccgacctcgcagggagcaggccctgtcaccgacgggtcacctcgcccacacggccagcaccgactcaccacagcccttcccagacctggctggagtggccggagcggcggggctcatggctcccatcttggcccctggaggtgagctcattcacagaagtggtcccttcactctgagagagaaaatcgtggcgtgcatcccaaaccctaggccacgcctgtgggtttcgtgaatgagatcgaggctgctgtggcaccctgcccgtcctggcctggagcaccctgggatcctggagggagaggccccacgcccccactctccctccacacttccagggttggtgcccacgagttagaggcacgccctcccccagcggccctcaggcttttctcagacatgcgggagccaggagagcacccttctccactcagctccaaagcgaatctttgaaaacacccactcggctcccatctctgtcacctagccaggaggggtagcaaaaataaagtcacgaggacatagtggtcaccactgtcagttacaacttgtctgtggaatccgtaattgcatctgtgtgccgcctccgaacacagaacattgtttggacggcagccccactgcacataacagacccgtgcatcttcctcagtcagtttctgaatattgtgaattcaggcaggtgtgtgttctcttctgcatgtttttatgcactgccaattagcttctactaaccacggttcaacagaaaataaatgtgtatttgtgaataacaaactgcacaacctgcaaaccaggagagagggacaggttctgtcaggggtgacaccaggacacagggacaggttctgtcgggggtgacaccaggacacagggacaggttctgtcatgggtgacacgaggacacagggacaggttctatcatgggtgacaccaggagagagggacaggttctgttgggggtgacaagaggagacagggacaggttctgtcgggggtgacaccaggagagagggacaggttctgtcaggggtgacaccaggagagagggacaggttctgttgggggtgacaccaggacacaggaataggttctgtcgggaggacagtgctgatcgtgtctcagcatcaggaaaggagaaaggcagagggagagcgctgagaagactgttcacgccagagtgcttatttatttttaatttactgctataggataagcaaccaggtagtgttcctaacaattagcgttaccaaaattaaagttcaaattatatgtttaaaatattgtagaagatatatatttatactggactacttttacaccttctaatatcctgtccaagtttgggcgcagatggtggagttgggctggcatcatgtcctgtggccgccccacttgcctgttggtgccactccatcccgggccccagggatgccagctcagggctgaccacagcagccctgcgtgggcatcacctcctaccccagcccccatcctgggctgctgcggccgcctgcttttgtgaatggtgttttgttggcacagggcctgtcctgtgttttcacacaggcctgtggctcctgctgtacaagtggagtggggaggagttgagatggagatgccttggccctggacacttacctgtccctctactggcccagctcatctcctcctgtgggcaatcacgcgtgcactggccaccctcccaccccacagcacacaccacgaggggatggcacagggggaagatgaggctggaccgtgatgttatcaataggctagaacgtccttcaaacactgaacctgcatctttcctcctcttactactgaacacttggagcttgtgtcaggtgcacgtgtctggatggatggagctgccatgaatgtatta

SEQ ID NO: 73355 - DNA, 1922 bp, Homo sapiens
ctcggctctaccttgtctctcggctctaccttgtctctcggctctaccttgtctgtggaatccgtaattgcatctgtgtgccgcctccgaacacagaacattgtttggacggcagccccactgcacataacagacccgtgcatcttcctcagtcagtttctgaatattgtgaattcaggcaggtgtgtgttctcttctgcatgtttttatgcactgccaattagcttctactaaccacggttcaacagaaaataaatgtgtatttgtgaataacaaactgcacaacctgcaaaccaggagagagggacaggttctgtcaggggtgacaccaggacacagggacaggttctgtcgggggtgacaccaggacacagggacaggttctgtcatgggtgacacgaggacacagggacaggttctatcatgggtgacaccaggagagagggacaggttctgttgggggtgacaagaggagacagggacaggttctgtcgggggtgacaccaggagagagggacaggttctgtcaggggtgacaccaggagagagggacaggttctgttgggggtgacaccaggacacaggaataggttctgtcgggaggacagtgctgatcgtgtctcagcatcaggaaaggagaaaggcagagggagagcgctgagaagactgttcacgccagagtgcttatttatttttaatttactgctataggataagcaaccaggtagtgttcctaacaattagcgttaccaaaattaaagttcaaattatatgtttaaaatattgtagaagatatatatttatactggactacttttacaccttctaatatcctgtccaagtttgggcgcagatggtggagttgggctggcatcatgtcctgtggccgccccacttgcctgttggtgccactccatcccgggccccagggatgccagctcagggctgaccacagcagccctgcgtgggcatcacctcctaccccagcccccatcctgggctgctgcggccgcctgcttttgtgaatggtgttttgttggcacagggcctgtcctgtgttttcacacaggcctgtggctcctgctgtacaagtggagtggggaggagttgagatggagatgccttggccctggacacttacctgtccctctactggcccagctcatctcctcctgtgggcaatcacgcgtgcactggccaccctcccaccccacagcacacaccacgaggggatggcacagggggaagatgaggctggaccgtgatgttatcaataggctagaacgtccttcaaacactgaacctgcatctttcctcctcttactactgaacactttgtgagctctggtggtccagggtgcagcgtttgtccctgggcatgtgatggggagtcctgggcacatcgagatgctttacttctttctttcgacctcttaaaaaactaaaccaagccaaaccacaaaggaaatctgcacaacttaagagaaacttgaaagggatcgtgtaactactagtttgtactaagtttttttcaagaaagggaaacaaatttatatatatatatatatatatatatgtgcaatatatttttacactgtgtgattaacattagggagtactgagtgcatcactttatcagtgtgacgggtgatgtccacgtcatggctgttctgactctgaaagccacttctgctgatgtctaaaccgcactacaaccggacgtccgcggggtggggtggccctgctgttcctcctgcaggtgagaggtgtggtgttgcctgttggacttgctgttgagcctggcttgcaaacctgtagtgaaacagctcgtgtctgtgtgcacactgctcctgtgtctgctgtcgttaacattgtgtgtcaagttggtaaagtgacaaataaaggtgttaaaacatggattt

SEQ ID NO: 73356 - DNA, 1855 bp, Homo sapiens
cgcggccgagtcgcggaggcgcctccgctgcagtcgctgcgtctccaagcaacatggctgacaaggccaagcctgccaaagctgccaacaggacgccccccaagtccccgggggacccctcgaaggaccgggcagccaagaggctgtcgctggaatcggagggtgctggtgagggggcagccgcatcccctgagctcagtgccctggaggaggccttccggcgctttgccgtgcacggggacgccagggccaccgggagggagatgcacggcaagaactggtcgaagctgtgcaaggactgccaggtgatcgacggcaggaacgtgaccgtcactgacgtggacatcgtcttcagcaagatcaaagggaagtcttgccggaccatcacctttgagcagttccaggaggcgctggaggagctcgccaagaagcgattcaaagacaagagcagcgaggaggccgttcgcgaggtgcacaggctcatcgagggcaaggcgcccatcatctcaggggtgacgaaagccatctcgtcgcccacagtgtcgaggctcacggacaccaccaagttcacgggctcccacaaggagcgcttcgacccctctggcaagggcaagggcaaggctggccgcgtggatctggtggacgagtcaggctatgtgtccggctacaagcacgcaggcacctacgaccagaaggtgcaagggggcaagtagcccccgctccatgcctcgcggcactgccggtgtccccagagcagggactctgtcacctcgcacttcattacattcctgtactaactggggcagaactcagacgggtgccccagagggggctggggggcggccaggcccaggcctccctcctgcccctcctcctaccggatgcccccagcactcccctctcaaaccaggtttgggccccagttcgctgaccctcctaatacacctgcctcgtcctcagccatttccaaagtgtctcgcggatcacaccacactgggcacgtggtttgcaggtcaaaggggcgttttaaagcagctggctgtcatggcaacaggaggctgtgctgacctcctgagcggcagacaccttccaggagccctgagggtggcaggagctaaccccaaccagcaggcaactaacacggaattggccccacaccggacgtgggaggtgtctgtggggcccgaggcctgtcctgtgtgcagcggacaccacggggccttcctgctttcctgggcagagggcagagtgaggccacctggcgggggtgctgggcgcctggcacatgtgtggggaagccggtcacatggacacacctgtgcacacatgcctacaggccagctctgtgccaagggcaacctaggtaaaacgaaagccgtcaggggcagtgggcggcttcccggctgaccacagtggcttggactgtgagggtagagtaggctcgctttgctttcctgagaagatgcggtggctgcctatgttctcagagcgggtctgggaagattcagaatgtccggtccctgtggtgttgccaggcaagagacacgaagtgccgagacactcctcgcctcaccgcgtgacagagcctctgcccggccctcccgttcgcccgtcctcactagctgcaccctgtttgctcgcagacctcccattgccacagcccaagcaccttcttcaactctcccaaaatggctcagcctaacctctcctggccaatcccccccgccggagagcaggacactagggaggacccccagtcctgcagtgtctgtgggggtttctctgccagcagggggctgagaggcaaggcgggggccgaagcgtttactttgaaaaaattagagtgttcaaagca

SEQ ID NO: 73357 - DNA, 686 bp, Homo sapiens
tcttcaacatggcgacgctcttggttccctacagaaaggggcggagcctggactggggggcaggctcagattcaggttaaattgtggattgagctcgcagttacagacagctgaccatggaagcgaatgggttgggcctccagcgtagcatactgacacctacccccacccccacctgatcgccagacctcagggttttccggagctgaagaatgacacattcctgcgagcagcctggggagaggaaacagactacactcccgtttggtgcatgcgccaggcaggccgttacttaccagagtttagggaaacccgggctgcccaggactttttcagcacgtgtcgctctcctgaggcctgctgtgaactgactctgcagccactgcgtcgcttccctctggatgctgccatcattttctccgacatccttgttgtaccccaggcactgggcatggaggtgaccatggtacctggcaaaggacccagcttcccagagccattaagagaagagcaggacctagaacgcctacgggatccagaagtggtagcctctgagctaggctatgtgttccaagccatcacccttacccgacaacgactggctggacgtgtgccgctgattggctttgctggtgccccatgacctgatgacatacatgtgaggtgtgctcagacatgctagcaag

SEQ ID NO: 73358 - DNA, 1408 bp, Homo sapiens
tcttcaacatggcgacgctcttggttccctacagaaaggggcggagcctggactggggggcaggctcagattcaggttaaattgtggattgagctcgcagttacagacagctgaccatggaagcgaatgggttgggacctcagggttttccggagctgaagaatgacacattcctgcgagcagcctggggagaggaaacagactacactcccgtttggtgcatgcgccaggcaggccgttacttaccagagtttagggaaacccgggctgcccaggactttttcagcacgtgtcgctctcctgaggcctgctgtgaactgactctgcagccactgcgtcgcttccctctggatgctgccatcattttctccgacatccttgttgtaccccaggcactgggcatggaggtgaccatggtacctggcaaaggacccagcttcccagagccattaagagaagagcaggacctagaacgcctacgggatccagaagtggtagcctctgagctaggctatgtgttccaagccatcacccttacccgacaacgactggctggacgtgtgccgctgattggctttgctggtgccccatggaccctgatgacatacatggttgagggtggtggctcaagcaccatggctcaggccaagcgctggctctatcagagacctcaggctagtcaccagctgcttcgcatcctcactgatgctctggtcccatatctggtaggacaagtggtggctggtgcccaggcattgcagctgtttgagtcccatgcagggcatcttggcccacagctcttcaacaagtttgcactgccttacatccgtgatgtggccaagcaagtgaaggccaggttgcgggaggcaggcctggcaccagtgcccatgatcatctttgctaaggatgggcattttgccctggaggagctggcccaagctggctatgaggtggttgggcttgactggacagtggccccaaagaaagcccgggagtgtgtggggaagacggtgacattgcagggcaacctggacccctgtgccttgtatgcatctgaggaggagatcgggcagttggtgaagcagatgctggatgactttggaccacatcgctacattgccaacctgggccatgggctttatcctgacatggacccagaacatgtgggcgcctttgtggatgctgtgcataaacactcacgtctgcttcgacagaactgagtgtatacctttaccctcaagtaccactaacacagatgattgatcgtttccaggacaataaaagtttcggagttgaagtttcggagttgaacctattgtgtagttttgtttgtgaaagattgtcccatatcctcagttcttcttagcctctgtctccttccctgggaccctctcatatcctcttatag

SEQ ID NO: 73359 - DNA, 293 bp, Homo sapiens
  misc_feature (44)..(44): n is a, c, g, or t
  misc_feature (58)..(58): n is a, c, g, or t
ctcaaccatgtatgtcatcaagggtccatggggcaccagcaaanccaatcagcggcanacgtccagccagtcgttgtcgggtaagggtgatggtttggaccacatcgctacattgccaacctgggccatgggctttatcctgacatggacccagaacatgtgggcgcctttgtggatgctgtgcataaacactcacgtctgcttcgacagaactgagtgtatacctttaccctcaagtaccactaacacagatgattgatcgtttccaggacaataaaagtttcggagttgaa

SEQ ID NO: 73360 - DNA, 383 bp, Homo sapiens
ctatacaattcgagctcggaccccattattgttattgagagcaaggctgactggacagtggccccaaagaaagcccgggagtgtgtggggaagacggtgacattgcagggcaacctggacccctgtgccttgtatgcatctgaggaggagatcgggcagttggtgaagcagatgctggatgactttggaccacatcgctacattgccaacctgggccatgggctttatcctgacatggacccagaacatgtgggcgcctttgtggatgctgtgcataaacactcacgtctgcttcgacagaactgagtgtatacctttaccctcaagtaccactaacacagatgattgatcgtttccaggacaataaaagtttcggagttgaa

SEQ ID NO: 73361 - DNA, 1257 bp, Homo sapiens
  misc_feature (11)..(11): n is a, c, g, or t
tctgacgcccntttgcaaacacagccttgggcacacttgctacagcccacggggcagcagttacagacagctgaccatggaagcgaatgggttgggacctcagggttttccggagctgaagaatgacacattcctgcgagcagcctggggagaggaaacagactacactcccgtttggtgcatgcgccaggcaggccgttacttaccagagtttagggaaacccgggctgcccaggactttttcagcacgtgtcgctctcctgaggcctgctgtgaactgactctgcagccactgcgtcgcttccctctggatgctgccatcattttctccgacatccttgttgtaccccaggcactgggcatggaggtgaccatggtacctggcaaaggacccagcttcccagagccattaagagaagagcaggacctagaacgcctacgggatccagaagtggtagcctctgagctaggctatgtgttccaagccatcacccttacccgacaacgactggctggacgtgtgccgctgattggctttgctggtgccccatggaccctgatgacatacatggttgagggtggtggctcaagcaccatggctcaggccaagcgctggctctatcagagacctcaggctagtcaccagctgcttcgcatcctcactgatgctctggtcccatatctggtaggacaagtggtggctggtgcccaggcattgcagctgtttgagtcccatgcagggcatcttggcccacagctcttcaacaagtttgcactgccttacatccgtgatgtggccaagcaagtgaaggccaggttgcgggaggcaggcctggcaccagtgcccatgatcatctttgctaaggatgggcattttgccctggaggagctggcccaagctggctatgaggtggttgggcttgactggacagtggccccaaagaaagcccgggagtgtgtggggaagacggtgacattgcagggcaacctggacccctgtgccttgtatgcatctgaggaggagatcgggcagttggtgaagcagatgctggatgactttggaccacatcgctacattgccaacctgggccatgggctttatcctgacatggacccagaacatgtgggcgcctttgtggatgctgtgcataaacactcacgtctgcttcgacagaactgagtgtatacctttaccctcaagtaccactaacacagatgattgatcgtttccaggacaataaaagtttcggagttgaa

SEQ ID NO: 73362 - DNA, 1280 bp, Homo sapiens
  misc_feature (11)..(11): n is a, c, g, or t
tctgacgcccntttgcaaacacagccttgggcacacttgctacagcccacggggcagcagttacagacagctgaccatggaagcgaatgggttgggacctcagggttttccggagctgaagaatgacacattcctgcgagcagcctggggagaggaaacagactacactcccgtttggtgcatgcgccaggcaggccgttacttaccagagtttagggaaacccgggctgcccaggactttttcagcacgtgtcgctctcctgaggcctgctgtgaactgactctgcagccactgcgtcgcttccctctggatgctgccatcattttctccgacatccttgttgtaccccaggcactgggcatggaggtgaccatggtacctggcaaaggacccagcttcccagagccattaagagaagagcaggacctagaacgcctacgggatccagaagtggtagcctctgagctaggctatgtgttccaagccatcacccttacccgacaacgactggctggacgtgtgccgctgattggctttgctggtgccccatggaccctgatgacatacatggttgagggtggtggctcaagcaccatggctcaggccaagcgctggctctatcagagacctcaggctagtcaccagctgcttcgcatcctcactgatgctctggtcccatatctggtaggacaagtggtggctggtgcccaggcattgcagctgtttgagtcccatgcagggcatcttggcccacagctcttcaacaagtttgcactgccttacatccgtgatgtggccaagcaagtgaaggccaggttgcgggaggcaggcctggcaccagtgcccatgatcatctttgctaaggatgggcattttgccctggaggagctggcccaagctggctatgaggtggttgggcttgactggacagtggccccaaagaaagcccgggagtgtgtggggaagacggtgacattgcagggcaacctggacccctgtgccttgtatgcatctgaggaggagatcgggcagttggtgaagcagatgctggatgactttggaccacatcgctacattgccaacctgggccatgggctttatcctgacatggacccagaacatgtgggcgcctttgtggatgctgtgcataaacactcacgtctgcttcgacagaactgagtgtatacctttaccctcaagtaccactaacacagatgattgatcgtttccaggacaataaaagtttcggagttgaaaaaaacaccacctctcacccacg

SEQ ID NO: 73363 - DNA, 2146 bp, Homo sapiens
  misc_feature (11)..(11): n is a, c, g, or t
  misc_feature (1549)..(1549): n is a, c, g, or t
  misc_feature (1629)..(1629): n is a, c, g, or t
tctgacgcccntttgcaaacacagccttgggcacacttgctacagcccacggggcagcagttacagacagctgaccatggaagcgaatgggttgggacctcagggttttccggagctgaagaatgacacattcctgcgagcagcctggggagaggaaacagactacactcccgtttggtgcatgcgccaggcaggccgttacttaccagagtttagggaaacccgggctgcccaggactttttcagcacgtgtcgctctcctgaggcctgctgtgaactgactctgcagccactgcgtcgcttccctctggatgctgccatcattttctccgacatccttgttgtaccccaggcactgggcatggaggtgaccatggtacctggcaaaggacccagcttcccagagccattaagagaagagcaggacctagaacgcctacgggatccagaagtggtagcctctgagctaggctatgtgttccaagccatcacccttacccgacaacgactggctggacgtgtgccgctgattggctttgctggtgccccatggaccctgatgacatacatggttgagggtggtggctcaagcaccatggctcaggccaagcgctggctctatcagagacctcaggctagtcaccagctgcttcgcatcctcactgatgctctggtcccatatctggtaggacaagtggtggctggtgcccaggcattgcagctgtttgagtcccatgcagggcatcttggcccacagctcttcaacaagtttgcactgccttacatccgtgatgtggccaagcaagtgaaggccaggttgcgggaggcaggcctggcaccagtgcccatgatcatctttgctaaggatgggcattttgccctggaggagctggcccaagctggctatgaggtggttgggcttgactggacagtggccccaaagaaagcccgggagtgtgtggggaagacggtgacattgcagggcaacctggacccctgtgccttgtatgcatctgaggaggagatcgggcagttggtgaagcagatgctggatgactttggaccacatcgctacattgccaacctgggccatgggctttatcctgacatggacccagaacatgtgggcgcctttgtggatgctgtgcataaacactcacgtctgcttcgacagaactgagtgtatacctttaccctcaagtaccactaacacagatgattgatcgtttccaggacaataaaagtttcggagttgaacaaaaaaaaaaaaaaaaacaaaaaaaaaaaaacgtgtggtgggccgcgcctgcgcacccttggaagaaagctcttccaagaacccattccgttggggcgcgcggcgggcccccggatgaggttaggggtggacacggtggtcccaccaagccgtggtcccaaggaagcacccgggcccatggaccatggcggctctggccttctctcacaactaaaaaaagcgccgcggtgggcacacgccgaccgcgtttcgtgaaccaattccagaagggaggtccgggaggccaatagncgggtcctcctaccaaaagcagggaggcccaaggcgggacgcccggaaattaaaattaagaccggcgcccgcgtgggganacatgacaacccaggtctaaaaaaaaataaaaccatcaccgccgacaagaaaagcaccacacacacagacgacaaagcatacaccgaatagcaacgcggcaagagacaaatccacaaccacactgcccccccgcgcacatacacccggcccctcggctaacacaccggggcgaccaaaccaaaccatgccccactaatgccgcgccaggcgtcaacgacgccaaacataggggccgggaacgcccacccacagacgatgggggggcaaccacacaaggcaaaatgctgcaaaaagccgcataaagcgacacagggcacaggagtcacatccaggaacagcgccacctgggcgcaccaaccttcgggcgaaacagccggcgcaaacagctagcgggatgttacactccgacacaggcaacgcgtcgcggctgccgcggacaaccggggcaacgtggaagcacacacagaacgcgaaccagcaacagggcacagcagcgaccacaacatcgagagaata

SEQ ID NO: 73364 - DNA, 1368 bp, Homo sapiens
  misc_feature (11)..(11): n is a, c, g, or t
tctgacgcccntttgcaaacacagccttgggcacacttgctacagcccacggggcagcagttacagacagctgaccatggaagcgaatgggttgggacctcagggttttccggagctgaagaatgacacattcctgcgagcagcctggggagaggaaacagactacactcccgtttggtgcatgcgccaggcaggccgttacttaccagagtttagggaaacccgggctgcccaggactttttcagcacgtgtcgctctcctgaggcctgctgtgaactgactctgcagccactgcgtcgcttccctctggatgctgccatcattttctccgacatccttgttgtaccccaggcactgggcatggaggtgaccatggtacctggcaaaggacccagcttcccagagccattaagagaagagcaggacctagaacgcctacgggatccagaagtggtagcctctgagctaggctatgtgttccaagccatcacccttacccgacaacgactggctggacgtgtgccgctgattggctttgctggtgccccatggaccctgatgacatacatggttgagggtggtggctcaagcaccatggctcaggccaagcgctggctctatcagagacctcaggctagtcaccagctgcttcgcatcctcactgatgctctggtcccatatctggtaggacaagtggtggctggtgcccaggcattgcagctgtttgagtcccatgcagggcatcttggcccacagctcttcaacaagtttgcactgccttacatccgtgatgtggccaagcaagtgaaggccaggttgcgggaggcaggcctggcaccagtgcccatgatcatctttgctaaggatgggcattttgccctggaggagctggcccaagctggctatgaggtggttgggcttgactggacagtggccccaaagaaagcccgggagtgtgtggggaagacggtgacattgcagggcaacctggacccctgtgccttgtatgcatctgaggaggagatcgggcagttggtgaagcagatgctggatgactttggaccacatcgctacattgccaacctgggccatgggctttatcctgacatggacccagaacatgtgggcgcctttgtggatgctgtgcataaacactcacgtctgcttcgacagaactgagtgtatacctttaccctcaagtaccactaacacagatgattgatcgtttccaggacaataaaagtttcggagttgaagtttcggagttgaacctattgtgtagttttgtttgtgaaagattgtcccatatcctcagttcttcttagcctctgtctccttccctgggaccctctcatatcctcttatag

SEQ ID NO: 73365 - DNA, 1194 bp, Homo sapiens
  misc_feature (11)..(11): n is a, c, g, or t
tctgacgcccntttgcaaacacagccttgggcacacttgctacagcccacggggcagcagttacagacagctgaccatggaagcgaatgggttgggacctcagggttttccggagctgaagaatgacacattcctgcgagcagcctggggagaggaaacagactacactcccgtttggtgcatgcgccaggcaggccgttacttaccagagtttagggaaacccgggctgcccaggactttttcagcacgtgtcgctctcctgaggcctgctgtgaactgactctgcaggcactgggcatggaggtgaccatggtacctggcaaaggacccagcttcccagagccattaagagaagagcaggacctagaacgcctacgggatccagaagtggtagcctctgagctaggctatgtgttccaagccatcacccttacccgacaacgactggctggacgtgtgccgctgattggctttgctggtgccccatggaccctgatgacatacatggttgagggtggtggctcaagcaccatggctcaggccaagcgctggctctatcagagacctcaggctagtcaccagctgcttcgcatcctcactgatgctctggtcccatatctggtaggacaagtggtggctggtgcccaggcattgcagctgtttgagtcccatgcagggcatcttggcccacagctcttcaacaagtttgcactgccttacatccgtgatgtggccaagcaagtgaaggccaggttgcgggaggcaggcctggcaccagtgcccatgatcatctttgctaaggatgggcattttgccctggaggagctggcccaagctggctatgaggtggttgggcttgactggacagtggccccaaagaaagcccgggagtgtgtggggaagacggtgacattgcagggcaacctggacccctgtgccttgtatgcatctgaggaggagatcgggcagttggtgaagcagatgctggatgactttggaccacatcgctacattgccaacctgggccatgggctttatcctgacatggacccagaacatgtgggcgcctttgtggatgctgtgcataaacactcacgtctgcttcgacagaactgagtgtatacctttaccctcaagtaccactaacacagatgattgatcgtttccaggacaataaaagtttcggagttgaa

SEQ ID NO: 73366 - DNA, 1383 bp, Homo sapiens
  misc_feature (11)..(11): n is a, c, g, or t
tctgacgcccntttgcaaacacagccttgggcacacttgctacagcccacggggcagcagttacagacagctgaccatggaagcgaatgggttgggcctccagcgtagcatactgacacctacccccacccccacctgatcgccagacctcagggttttccggagctgaagaatgacacattcctgcgagcagcctggggagaggaaacagactacactcccgtttggtgcatgcgccaggcaggccgttacttaccagagtttagggaaacccgggctgcccaggactttttcagcacgtgtcgctctcctgaggcctgctgtgaactgactctgcaggtgaggggtccacaaaagagggaaagatttatgccttcagtctgccacctagcaacctgtctcctgtttcctacagccactgcgtcgcttccctctggatgctgccatcattttctccgacatccttgttgtaccccaggcactgggcatggaggtgaccatggtacctggcaaaggacccagcttcccagagccattaagagaagagcaggacctagaacgcctacgggatccagaagtggtagcctctgagctaggctatgtgttccaagccatcacccttacccgacaacgactggctggacgtgtgccgctgattggctttgctggtgccccatggaccctgatgacatacatggttgagggtggtggctcaagcaccatggctcaggccaagcgctggctctatcagagacctcaggctagtcaccagctgcttcgcatcctcactgatgctctggtcccatatctggtaggacaagtggtggctggtgcccaggcattgcagctgtttgagtcccatgcagggcatcttggcccacagctcttcaacaagtttgcactgccttacatccgtgatgtggccaagcaagtgaaggccaggttgcgggaggcaggcctggcaccagtgcccatgatcatctttgctaaggatgggcattttgccctggaggagctggcccaagctggctatgaggtggttgggcttgactggacagtggccccaaagaaagcccgggagtgtgtggggaagacggtgacattgcagggcaacctggacccctgtgccttgtatgcatctgaggaggagatcgggcagttggtgaagcagatgctggatgactttggaccacatcgctacattgccaacctgggccatgggctttatcctgacatggacccagaacatgtgggcgcctttgtggatgctgtgcataaacactcacgtctgcttcgacagaactgagtgtatacctttaccctcaagtaccactaacacagatgattgatcgtttccaggacaataaaagtttcggagttgaa

SEQ ID NO: 73367 - DNA, 1177 bp, Homo sapiens
  misc_feature (11)..(11): n is a, c, g, or t
tctgacgcccntttgcaaacacagccttgggcacacttgctacagcccacggggcagcagttacagacagctgaccatggaagcgaatgggttgggacctcagggttttccggagctgaagaatgacacattcctgcgagcagcctggggagaggaaacagactacactcccgtttggtgcatgcgccaggcaggccgttacttaccagccactgcgtcgcttccctctggatgctgccatcattttctccgacatccttgttgtaccccaggcactgggcatggaggtgaccatggtacctggcaaaggacccagcttcccagagccattaagagaagagcaggacctagaacgcctacgggatccagaagtggtagcctctgagctaggctatgtgttccaagccatcacccttacccgacaacgactggctggacgtgtgccgctgattggctttgctggtgccccatggaccctgatgacatacatggttgagggtggtggctcaagcaccatggctcaggccaagcgctggctctatcagagacctcaggctagtcaccagctgcttcgcatcctcactgatgctctggtcccatatctggtaggacaagtggtggctggtgcccaggcattgcagctgtttgagtcccatgcagggcatcttggcccacagctcttcaacaagtttgcactgccttacatccgtgatgtggccaagcaagtgaaggccaggttgcgggaggcaggcctggcaccagtgcccatgatcatctttgctaaggatgggcattttgccctggaggagctggcccaagctggctatgaggtggttgggcttgactggacagtggccccaaagaaagcccgggagtgtgtggggaagacggtgacattgcagggcaacctggacccctgtgccttgtatgcatctgaggaggagatcgggcagttggtgaagcagatgctggatgactttggaccacatcgctacattgccaacctgggccatgggctttatcctgacatggacccagaacatgtgggcgcctttgtggatgctgtgcataaacactcacgtctgcttcgacagaactgagtgtatacctttaccctcaagtaccactaacacagatgattgatcgtttccaggacaataaaagtttcggagttgaa

SEQ ID NO: 73368 - DNA, 1276 bp, Homo sapiens
  misc_feature (11)..(11): n is a, c, g, or t
tctgacgcccntttgcaaacacagccttgggcacacttgctacagcccacggggcagcagttacagacagctgaccatggaagcgaatgggttgggacctcagggttttccggagctgaagaatgacacattcctgcgagcagcctggggagaggaaacagactacactcccgtttggtgcatgcgccaggcaggccgttacttaccagagtttagggaaacccgggctgcccaggactttttcagcacgtgtcgctctcctgaggcctgctgtgaactgactctgcagccactgcgtcgcttccctctggatgctgccatcattttctccgacatccttgttgtaccccagatgttttctccccctccaggcactgggcatggaggtgaccatggtacctggcaaaggacccagcttcccagagccattaagagaagagcaggacctagaacgcctacgggatccagaagtggtagcctctgagctaggctatgtgttccaagccatcacccttacccgacaacgactggctggacgtgtgccgctgattggctttgctggtgccccatggaccctgatgacatacatggttgagggtggtggctcaagcaccatggctcaggccaagcgctggctctatcagagacctcaggctagtcaccagctgcttcgcatcctcactgatgctctggtcccatatctggtaggacaagtggtggctggtgcccaggcattgcagctgtttgagtcccatgcagggcatcttggcccacagctcttcaacaagtttgcactgccttacatccgtgatgtggccaagcaagtgaaggccaggttgcgggaggcaggcctggcaccagtgcccatgatcatctttgctaaggatgggcattttgccctggaggagctggcccaagctggctatgaggtggttgggcttgactggacagtggccccaaagaaagcccgggagtgtgtggggaagacggtgacattgcagggcaacctggacccctgtgccttgtatgcatctgaggaggagatcgggcagttggtgaagcagatgctggatgactttggaccacatcgctacattgccaacctgggccatgggctttatcctgacatggacccagaacatgtgggcgcctttgtggatgctgtgcataaacactcacgtctgcttcgacagaactgagtgtatacctttaccctcaagtaccactaacacagatgattgatcgtttccaggacaataaaagtttcggagttgaa

SEQ ID NO: 73369 - DNA, 1622 bp, Homo sapiens
  misc_feature (11)..(11): n is a, c, g, or t
tctgacgcccntttgcaaacacagccttgggcacacttgctacagcccacggggcagcagttacagacagctgaccatggaagcgaatgggttgggcctccagcgtagcatactgacacctacccccacccccacctgatcgccagacctcagggttttccggagctgaagaatgacacattcctgcgagcagcctggggagaggaaacagactacactcccgtttggtgcatgcgccaggcaggccgttacttaccagagtttagggaaacccgggctgcccaggactttttcagcacgtgtcgctctcctgaggcctgctgtgaactgactctgcaggtgaggggtccacaaaagagggaaagatttatgccttcagtctgccacctagcaacctgtctcctgtttcctacagccactgcgtcgcttccctctggatgctgccatcattttctccgacatccttgttgtaccccaggtacccactcaaacctgatcctagaatataatccaaggacgccttgaaaatccttctatcagtccagtcaaggtttacaataagcacttatcctaactggatcgagggaaaaactaaggttgaaagaaatggagtttggcagagttttattctccttttccttcctcctggaatgagctgaacagaacctttcctcctggattccattttgggaacccagatgttttctccccctccaggcactgggcatggaggtgaccatggtacctggcaaaggacccagcttcccagagccattaagagaagagcaggacctagaacgcctacgggatccagaagtggtagcctctgagctaggctatgtgttccaagccatcacccttacccgacaacgactggctggacgtgtgccgctgattggctttgctggtgccccatggaccctgatgacatacatggttgagggtggtggctcaagcaccatggctcaggccaagcgctggctctatcagagacctcaggctagtcaccagctgcttcgcatcctcactgatgctctggtcccatatctggtaggacaagtggtggctggtgcccaggcattgcagctgtttgagtcccatgcagggcatcttggcccacagctcttcaacaagtttgcactgccttacatccgtgatgtggccaagcaagtgaaggccaggttgcgggaggcaggcctggcaccagtgcccatgatcatctttgctaaggatgggcattttgccctggaggagctggcccaagctggctatgaggtggttgggcttgactggacagtggccccaaagaaagcccgggagtgtgtggggaagacggtgacattgcagggcaacctggacccctgtgccttgtatgcatctgaggaggagatcgggcagttggtgaagcagatgctggatgactttggaccacatcgctacattgccaacctgggccatgggctttatcctgacatggacccagaacatgtgggcgcctttgtggatgctgtgcataaacactcacgtctgcttcgacagaactgagtgtatacctttaccctcaagtaccactaacacagatgattgatcgtttccaggacaataaaagtttcggagttgaa

SEQ ID NO: 73370 - DNA, 1352 bp, Homo sapiens
  misc_feature (11)..(11): n is a, c, g, or t
tctgacgcccntttgcaaacacagccttgggcacacttgctacagcccacggggcagcagttacagacagctgaccatggaagcgaatgggttgggacctcagggttttccggagctgaagaatgacacattcctgcgagcagcctggggagaggaaacagactacactcccgtttggtgcatgcgccaggcaggccgttacttaccagagtttagggaaacccgggctgcccaggactttttcagcacgtgtcgctctcctgaggcctgctgtgaactgactctgcaggtgaggggtccacaaaagagggaaagatttatgccttcagtctgccacctagcaacctgtctcctgtttcctacagccactgcgtcgcttccctctggatgctgccatcattttctccgacatccttgttgtaccccagatgttttctccccctccaggcactgggcatggaggtgaccatggtacctggcaaaggacccagcttcccagagccattaagagaagagcaggacctagaacgcctacgggatccagaagtggtagcctctgagctaggctatgtgttccaagccatcacccttacccgacaacgactggctggacgtgtgccgctgattggctttgctggtgccccatggaccctgatgacatacatggttgagggtggtggctcaagcaccatggctcaggccaagcgctggctctatcagagacctcaggctagtcaccagctgcttcgcatcctcactgatgctctggtcccatatctggtaggacaagtggtggctggtgcccaggcattgcagctgtttgagtcccatgcagggcatcttggcccacagctcttcaacaagtttgcactgccttacatccgtgatgtggccaagcaagtgaaggccaggttgcgggaggcaggcctggcaccagtgcccatgatcatctttgctaaggatgggcattttgccctggaggagctggcccaagctggctatgaggtggttgggcttgactggacagtggccccaaagaaagcccgggagtgtgtggggaagacggtgacattgcagggcaacctggacccctgtgccttgtatgcatctgaggaggagatcgggcagttggtgaagcagatgctggatgactttggaccacatcgctacattgccaacctgggccatgggctttatcctgacatggacccagaacatgtgggcgcctttgtggatgctgtgcataaacactcacgtctgcttcgacagaactgagtgtatacctttaccctcaagtaccactaacacagatgattgatcgtttccaggacaataaaagtttcggagttgaa

SEQ ID NO: 73371 - DNA, 1698 bp, Homo sapiens
  misc_feature (11)..(11): n is a, c, g, or t
tctgacgcccntttgcaaacacagccttgggcacacttgctacagcccacggggcagcagttacagacagctgaccatggaagcgaatgggttgggacctcagggttttccggagctgaagaatgacacattcctgcgagcagcctggggagaggaaacagactacactcccgtttggtgcatgcgccaggcaggccgttacttaccagagtttagggaaacccgggctgcccaggactttttcagcacgtgtcgctctcctgaggcctgctgtgaactgactctgcagccactgcgtcgcttccctctggatgctgccatcattttctccgacatccttgttgtaccccaggcactgggcatggaggtgaccatggtacctggcaaaggacccagcttcccagagccattaagagaagagcaggacctagaacgcctacgggatccagaagtggtagcctctgagctaggctatgtgttccaagccatcacccttacccgacaacgactggctggacgtgtgccgctgattggctttgctggtgccccatggaccctgatgacatacatggttgagggtggtggctcaagcaccatggctcaggccaagcgctggctctatcagagacctcaggctagtcaccagctgcttcgcatcctcactgatgctctggtcccatatctggtaggacaagtggtggctggtgcccaggcattgcagctgtttgagtcccatgcagggcatcttggcccacagctcttcaacaagtttgcactgccttacatccgtgatgtggccaagcaagtgaaggccaggttgcgggaggcaggcctggcaccagtgcccatgatcatctttgctaaggatgggcattttgccctggaggagctggcccaagctggctatgaggtggttgggcttgactggacagtggccccaaagaaagcccgggagtgtgtggggaagacggtgacattgcagggcaacctggacccctgtgccttgtatgcatctgaggtaacagccagggcccctctgtgtgtctgttactgtgcactcctgtggctgtggttgtattattctgtgtgcacttgtttttaatgtctgtctgtccttttcttctactctgtacaacataagccctagaaagaccggactttttgttgctgttgttcatttgtgtttatgcttcatgcctgggtccatactagggatctgataaattttattgaatgactgaataacactgagtagaagcatgcctacatatgcgtttgtcactagtatatatagggaggacaaaggcttgctggtcctcctgtagccagtgccctgttggtcccccaggaggagatcgggcagttggtgaagcagatgctggatgactttggaccacatcgctacattgccaacctgggccatgggctttatcctgacatggacccagaacatgtgggcgcctttgtggatgctgtgcataaacactcacgtctgcttcgacagaactgagtgtatacctttaccctcaagtaccactaacacagatgattgatcgtttccaggacaataaaagtttcggagttgaagtttcggagttgaacctattgtgtagttttgtttgtgaaagattgtcccatatcctcagttcttcttagcctctgtctccttccctgggaccctctcatatcctcttatag

SEQ ID NO: 73372 - DNA, 1801 bp, Homo sapiens
  misc_feature (11)..(11): n is a, c, g, or t
tctgacgcccntttgcaaacacagccttgggcacacttgctacagcccacggggcagcagttacagacagctgaccatggaagcgaatgggttgggacctcagggttttccggagctgaagaatgacacattcctgcgagcagcctggggagaggaaacagactacactcccgtttggtgcatgcgccaggcaggccgttacttaccagagtttagggaaacccgggctgcccaggactttttcagcacgtgtcgctctcctgaggcctgctgtgaactgactctgcagccactgcgtcgcttccctctggatgctgccatcattttctccgacatccttgttgtaccccaggcactgggcatggaggtgaccatggtacctggcaaaggacccagcttcccagagccattaagagaagagcaggacctagaacgcctacgggatccagaagtggtagcctctgagctaggctatgtgttccaagccatcacccttacccgacaacgactggctggacgtgtgccgctgattggctttgctggtgccccatggaccctgatgacatacatggttgagggtggtggctcaagcaccatggctcaggccaagcgctggctctatcagagacctcaggctagtcaccagctgcttcgcatcctcactgatgctctggtcccatatctggtaggacaagtggtggctggtgcccaggcattgcagctgtttgagtcccatgcagggcatcttggcccacagctcttcaacaagtttgcactgccttacatccgtgatgtggccaagcaagtgaaggccaggttgcgggaggcaggcctggcaccagtgcccatgatcatctttgctaaggatgggcattttgccctggaggagctggcccaagctggctatgaggtggttgggcttgactggacagtggccccaaagaaagcccggtaagccatggaagggtgaggccttgaggttgaggtgggggtgttggctgggggagctgccatgtatgcagttaccagaacgtggcgctggctttgcttccagggagtgtgtggggaagacggtgacattgcagggcaacctggacccctgtgccttgtatgcatctgaggtaacagccagggcccctctgtgtgtctgttactgtgcactcctgtggctgtggttgtattattctgtgtgcacttgtttttaatgtctgtctgtccttttcttctactctgtacaacataagccctagaaagaccggactttttgttgctgttgttcatttgtgtttatgcttcatgcctgggtccatactagggatctgataaattttattgaatgactgaataacactgagtagaagcatgcctacatatgcgtttgtcactagtatatatagggaggacaaaggcttgctggtcctcctgtagccagtgccctgttggtcccccaggaggagatcgggcagttggtgaagcagatgctggatgactttggaccacatcgctacattgccaacctgggccatgggctttatcctgacatggacccagaacatgtgggcgcctttgtggatgctgtgcataaacactcacgtctgcttcgacagaactgagtgtatacctttaccctcaagtaccactaacacagatgattgatcgtttccaggacaataaaagtttcggagttgaagtttcggagttgaacctattgtgtagttttgtttgtgaaagattgtcccatatcctcagttcttcttagcctctgtctccttccctgggaccctctcatatcctcttatag

SEQ ID NO: 73373 - DNA, 1382 bp, Homo sapiens
  misc_feature (11)..(11): n is a, c, g, or t
tctgacgcccntttgcaaacacagccttgggcacacttgctacagcccacggggcagcagttacagacagctgaccatggaagcgaatgggttgggacctcagggttttccggagctgaagaatgacacattcctgcgagcagcctggggagaggaaacagactacactcccgtttggtgcatgcgccaggcaggccgttacttaccagagtttagggaaacccgggctgcccaggactttttcagcacgtgtcgctctcctgaggcctgctgtgaactgactctgcagccactgcgtcgcttccctctggatgctgccatcattttctccgacatccttgttgtaccccaggcactgggcatggaggtgaccatggtacctggcaaaggacccagcttcccagagccattaagagaagagcaggacctagaacgcctacgggatccagaagtggtagcctctgagctaggctatgtgttccaagccatcacccttacccgacaacgactggctggacgtgtgccgctgattggctttgctggtgccccagtgccccagtaatgtgggacagggcagggactcggggcgcggggagatcactctggaaggtctggggtagacaaaaggaagggtcagtctggcttctgtgacaccatctttctatccttctctagtggaccctgatgacatacatggttgagggtggtggctcaagcaccatggctcaggccaagcgctggctctatcagagacctcaggctagtcaccagctgcttcgcatcctcactgatgctctggtcccatatctggtaggacaagtggtggctggtgcccaggcattgcagctgtttgagtcccatgcagggcatcttggcccacagctcttcaacaagtttgcactgccttacatccgtgatgtggccaagcaagtgaaggccaggttgcgggaggcaggcctggcaccagtgcccatgatcatctttgctaaggatgggcattttgccctggaggagctggcccaagctggctatgaggtggttgggcttgactggacagtggccccaaagaaagcccgggagtgtgtggggaagacggtgacattgcagggcaacctggacccctgtgccttgtatgcatctgaggaggagatcgggcagttggtgaagcagatgctggatgactttggaccacatcgctacattgccaacctgggccatgggctttatcctgacatggacccagaacatgtgggcgcctttgtggatgctgtgcataaacactcacgtctgcttcgacagaactgagtgtatacctttaccctcaagtaccactaacacagatgattgatcgtttccaggacaataaaagtttcggagttgaa

SEQ ID NO: 73374 - DNA, 1360 bp, Homo sapiens
  misc_feature (11)..(11): n is a, c, g, or t
tctgacgcccntttgcaaacacagccttgggcacacttgctacagcccacggggcagcagttacagacagctgaccatggaagcgaatgggttgggacctcagggttttccggagctgaagaatgacacattcctgcgagcagcctggggagaggaaacagactacactcccgtttggtgcatgcgccaggcaggccgttacttaccagagtttagggaaacccgggctgcccaggactttttcagcacgtgtcgctctcctgaggcctgctgtgaactgactctgcagccactgcgtcgcttccctctggatgctgccatcattttctccgacatccttgttgtaccccaggcactgggcatggaggtgaccatggtacctggcaaaggacccagcttcccagagccattaagagaagagcaggacctagaacgcctacgggatccagaagtggtagcctctgagctaggctatgtgttccaagccatcacccttacccgacaacgactggctggacgtgtgccgctgattggctttgctggtgccccatggaccctgatgacatacatggttgagggtggtggctcaagcaccatggctcaggccaagcgctggctctatcagagacctcaggctagtcaccagctgcttcgcatcctcactgatgctctggtcccatatctggtaggacaagtggtggctggtgcccaggcattgcagctgtttgagtcccatgcagggcatcttggcccacagctcttcaacaagtttgcactgccttacatccgtgatgtggccaagcaagtgaaggccaggttgcgggaggcaggcctggcaccagtgcccatgatcatctttgctaaggatgggcattttgccctggaggagctggcccaagctggctatgaggtggttgggcttgactggacagtggccccaaagaaagcccggtaagccatggaagggtgaggccttgaggttgaggtgggggtgttggctgggggagctgccatgtatgcagttaccagaacgtggcgctggctttgcttccagggagtgtgtggggaagacggtgacattgcagggcaacctggacccctgtgccttgtatgcatctgaggaggagatcgggcagttggtgaagcagatgctggatgactttggaccacatcgctacattgccaacctgggccatgggctttatcctgacatggacccagaacatgtgggcgcctttgtggatgctgtgcataaacactcacgtctgcttcgacagaactgagtgtatacctttaccctcaagtaccactaacacagatgattgatcgtttccaggacaataaaagtttcggagttgaa

SEQ ID NO: 73375 - DNA, 1117 bp, Homo sapiens
  misc_feature (11)..(11): n is a, c, g, or t
tctgacgcccntttgcaaacacagccttgggcacacttgctacagcccacggggcagcagttacagacagctgaccatggaagcgaatgggttgggacctcagggttttccggagctgaagaatgacacattcctgcgagcagcctggggagaggaaacagactacactcccgtttggtgcatgcgccaggcaggccgttacttaccagagtttagggaaacccgggctgcccaggactttttcagcacgtgtcgctctcctgaggcctgctgtgaactgactctgcagccactgcgtcgcttccctctggatgctgccatcattttctccgacatccttgttgtaccccaggcactgggcatggaggtgaccatggtacctggcaaaggacccagcttcccagagccattaagagaagagcaggacctagaacgcctacgggatccagaagtggtagcctctgagctaggctatgtgttccaagccatcacccttacccgacaacgactggctggacgtgtgccgctgattggctttgctggtgccccatggaccctgatgacatacatggttgagggtggtggctcaagcaccatggctcaggccaagcgctggctctatcagagacctcaggctagtcaccagctgcttcgcatcctcactgatgctctggtcccatatctggtaggacaagtggtggctggtgcccaggcattgcagctgtttgagtcccatgcagggcatcttggcccacagctcttcaacaagtttgcactgccttacatccgtgatgtggccaagcaagtgaaggccaggttgcgggaggcaggcctggcaccagtgcccatgatcatctttgctaaggatgggcattttgccctggaggagctggcccaagctggctatgaggtggttgggcttgactggacagtggccccaaagaaagcccggaggagatcgggcagttggtgaagcagatgctggatgactttggaccacatcgctacattgccaacctgggccatgggctttatcctgacatggacccagaacatgtgggcgcctttgtggatgctgtgcattgaaacaaaccacgggggtaccggagttcgaaat

SEQ ID NO: 73376 - DNA, 1416 bp, Homo sapiens
  misc_feature (11)..(11): n is a, c, g, or t
tctgacgcccntttgcaaacacagccttgggcacacttgctacagcccacggggcagcagttacagacagctgaccatggaagcgaatgggttgggacctcagggttttccggagctgaagaatgacacattcctgcgagcagcctggggagaggaaacagactacactcccgtttggtgcatgcgccaggcaggccgttacttaccagagtttagggaaacccgggctgcccaggactttttcagcacgtgtcgctctcctgaggcctgctgtgaactgactctgcagccactgcgtcgcttccctctggatgctgccatcattttctccgacatccttgttgtaccccaggcactgggcatggaggtgaccatggtacctggcaaaggacccagcttcccagagccattaagagaagagcaggacctagaacgcctacgggatccagaagtggtagcctctgagctaggctatgtgttccaagccatcacccttacccgacaacgactggctggacgtgtgccgctgattggctttgctggtgccccatggaccctgatgacatacatggttgagggtggtggctcaagcaccatggctcaggccaagcgctggctctatcagagacctcaggctagtcaccagctgcttcgcatcctcactgatgctctggtcccatatctggtaggacaagtggtggctggtgcccaggcattgcagctgtttgagtcccatgcagggcatcttggcccacagctcttcaacaagtttgcactgccttacatccgtgatgtggccaagcaagtgaaggccaggttgcgggaggcaggcctggcaccagtgcccatggtgaggattgggatgggttgagtgaaggtggtcctgtggagctttcaggctaagtcctgcatggactggagtgaccactggagggcagcagaagtacagtcaagaaagattagtggttgtagcaaggccctctgtagcctgagatctgcttttttctagatcatctttgctaaggatgggcattttgccctggaggagctggcccaagctggctatgaggtggttgggcttgactggacagtggccccaaagaaagcccgggagtgtgtggggaagacggtgacattgcagggcaacctggacccctgtgccttgtatgcatctgaggaggagatcgggcagttggtgaagcagatgctggatgactttggaccacatcgctacattgccaacctgggccatgggctttatcctgacatggacccagaacatgtgggcgcctttgtggatgctgtgcataaacactcacgtctgcttcgacagaactgagtgtatacctttaccctcaagtaccactaacacagatgattgatcgtttccaggacaataaaagtttcggagttgaa

SEQ ID NO: 73377 - DNA, 1747 bp, Homo sapiens
  misc_feature (11)..(11): n is a, c, g, or t
tctgacgcccntttgcaaacacagccttgggcacacttgctacagcccacggggcagcagttacagacagctgaccatggaagcgaatgggttgggcctccagcgtagcatactgacacctacccccacccccacctgatcgccagacctcagggttttccggagctgaagaatgacacattcctgcgagcagcctggggagaggaaacagactacactcccgtttggtgcatgcgccaggcaggccgttacttaccagagtttagggaaacccgggctgcccaggactttttcagcacgtgtcgctctcctgaggcctgctgtgaactgactctgcaggtgaggggtccacaaaagagggaaagatttatgccttcagtctgccacctagcaacctgtctcctgtttcctacagccactgcgtcgcttccctctggatgctgccatcattttctccgacatccttgttgtaccccaggtacccactcaaacctgatcctagaatataatccaaggacgccttgaaaatccttctatcagtccagtcaaggtttacaataagcacttatcctaactggatcgagggaaaaactaaggttgaaagaaatggagtttggcagagttttattctccttttccttcctcctggaatgagctgaacagaacctttcctcctggattccattttgggaacccagatgttttctccccctccaggcactgggcatggaggtgaccatggtacctggcaaaggacccagcttcccagagccattaagagaagagcaggacctagaacgcctacgggatccagaagtggtagcctctgagctaggctatgtgttccaagccatcacccttacccgacaacgactggctggacgtgtgccgctgattggctttgctggtgccccagtgccccagtaatgtgggacagggcagggactcggggcgcggggagatcactctggaaggtctggggtagacaaaaggaagggtcagtctggcttctgtgacaccatctttctatccttctctagtggaccctgatgacatacatggttgagggtggtggctcaagcaccatggctcaggccaagcgctggctctatcagagacctcaggctagtcaccagctgcttcgcatcctcactgatgctctggtcccatatctggtaggacaagtggtggctggtgcccaggcattgcagctgtttgagtcccatgcagggcatcttggcccacagctcttcaacaagtttgcactgccttacatccgtgatgtggccaagcaagtgaaggccaggttgcgggaggcaggcctggcaccagtgcccatgatcatctttgctaaggatgggcattttgccctggaggagctggcccaagctggctatgaggtggttgggcttgactggacagtggccccaaagaaagcccgggagtgtgtggggaagacggtgacattgcagggcaacctggacccctgtgccttgtatgcatctgaggaggagatcgggcagttggtgaagcagatgctggatgactttggaccacatcgctacattgccaacctgggccatgggctttatcctgacatggacccagaacatgtgggcgcctttgtggatgctgtgcataaacactcacgtctgcttcgacagaactgagtgtatacctttaccctcaagtaccactaacacagatgattgatcgtttccaggacaataaaagtttcggagttgaa

SEQ ID NO: 73378 - DNA, 1625 bp, Homo sapiens
  misc_feature (11)..(11): n is a, c, g, or t
tctgacgcccntttgcaaacacagccttgggcacacttgctacagcccacggggcagcagttacagacagctgaccatggaagcgaatgggttgggacctcagggttttccggagctgaagaatgacacattcctgcgagcagcctggggagaggaaacagactacactcccgtttggtgcatgcgccaggcaggccgttacttaccagagtttagggaaacccgggctgcccaggactttttcagcacgtgtcgctctcctgaggcctgctgtgaactgactctgcagccactgcgtcgcttccctctggatgctgccatcattttctccgacatccttgttgtaccccaggcactgggcatggaggtgaccatggtacctggcaaaggacccagcttcccagagccattaagagaagagcaggacctagaacgcctacgggatccagaagtggtagcctctgagctaggctatgtgttccaagccatcacccttacccgacaacgactggctggacgtgtgccgctgattggctttgctggtgccccatggaccctgatgacatacatggttgagggtggtggctcaagcaccatggctcaggccaagcgctggctctatcagagacctcaggctagtcaccagctgcttcgcatcctcactgatgctctggtcccatatctggtaggacaagtggtggctggtgcccaggtgagtcctgagagagagagaaataggctgggatttggtctgtaaggaccagaagcaagagtgtcctaaacctgagagggcaggggtcttaatgccagggatgaaagaaccttggcctccagtgatctagctgagcagccaagcccatcctgacactgacagtggggcttaatgctctaagtattcagacaccaaagttagtgctgggatctgaggaaagtaaatttttttttttttaattactgggtttttagggtcaggcagtatcagggattgaagtcatttggggaaaattgaggtggattttgtatgtgggggaaacttcctctttgtgtgttacatatttttcttcaccataccctaactaggcattgcagctgtttgagtcccatgcagggcatcttggcccacagctcttcaacaagtttgcactgccttacatccgtgatgtggccaagcaagtgaaggccaggttgcgggaggcaggcctggcaccagtgcccatgatcatctttgctaaggatgggcattttgccctggaggagctggcccaagctggctatgaggtggttgggcttgactggacagtggccccaaagaaagcccgggagtgtgtggggaagacggtgacattgcagggcaacctggacccctgtgccttgtatgcatctgaggaggagatcgggcagttggtgaagcagatgctggatgactttggaccacatcgctacattgccaacctgggccatgggctttatcctgacatggacccagaacatgtgggcgcctttgtggatgctgtgcataaacactcacgtctgcttcgacagaactgagtgtatacctttaccctcaagtaccactaacacagatgattgatcgtttccaggacaataaaagtttcggagttgaa

SEQ ID NO: 73379 - DNA, 1960 bp, Homo sapiens
  misc_feature (11)..(11): n is a, c, g, or t
tctgacgcccntttgcaaacacagccttgggcacacttgctacagcccacggggcagcagttacagacagctgaccatggaagcgaatgggttgggacctcagggttttccggagctgaagaatgacacattcctgcgagcagcctggggagaggaaacagactacactcccgtttggtgcatgcgccaggcaggccgttacttaccagagtttagggaaacccgggctgcccaggactttttcagcacgtgtcgctctcctgaggcctgctgtgaactgactctgcagccactgcgtcgcttccctctggatgctgccatcattttctccgacatccttgttgtaccccaggcactgggcatggaggtgaccatggtacctggcaaaggacccagcttcccagagccattaagagaagagcaggacctagaacgcctacgggatccagaagtggtagcctctgagctaggctatgtgttccaagccatcacccttacccgacaacgactggctggacgtgtgccgctgattggctttgctggtgccccatggaccctgatgacatacatggttgagggtggtggctcaagcaccatggctcaggccaagcgctggctctatcagagacctcaggctagtcaccagctgcttcgcatcctcactgatgctctggtcccatatctggtaggacaagtggtggctggtgcccaggcattgcagctgtttgagtcccatgcagggcatcttggcccacagctcttcaacaagtttgcactgccttacatccgtgatgtggccaagcaagtgaaggccaggttgcgggaggcaggcctggcaccagtgcccatggtgaggattgggatgggttgagtgaaggtggtcctgtggagctttcaggctaagtcctgcatggactggagtgaccactggagggcagcagaagtacagtcaagaaagattagtggttgtagcaaggccctctgtagcctgagatctgcttttttctagatcatctttgctaaggatgggcattttgccctggaggagctggcccaagctggctatgaggtggttgggcttgactggacagtggccccaaagaaagcccggtaagccatggaagggtgaggccttgaggttgaggtgggggtgttggctgggggagctgccatgtatgcagttaccagaacgtggcgctggctttgcttccagggagtgtgtggggaagacggtgacattgcagggcaacctggacccctgtgccttgtatgcatctgaggtaacagccagggcccctctgtgtgtctgttactgtgcactcctgtggctgtggttgtattattctgtgtgcacttgtttttaatgtctgtctgtccttttcttctactctgtacaacataagccctagaaagaccggactttttgttgctgttgttcatttgtgtttatgcttcatgcctgggtccatactagggatctgataaattttattgaatgactgaataacactgagtagaagcatgcctacatatgcgtttgtcactagtatatatagggaggacaaaggcttgctggtcctcctgtagccagtgccctgttggtcccccaggaggagatcgggcagttggtgaagcagatgctggatgactttggaccacatcgctacattgccaacctgggccatgggctttatcctgacatggacccagaacatgtgggcgcctttgtggatgctgtgcataaacactcacgtctgcttcgacagaactgagtgtatacctttaccctcaagtaccactaacacagatgattgatcgtttccaggacaataaaagtttcggagttgaagtttcggagttgaacctattgtgtagttttgtttgtgaaagattgtcccatatcctcagttcttcttagcctctgtctccttccctgggaccctctcatatcctcttatag

SEQ ID NO: 73380 - DNA, 1857 bp, Homo sapiens
  misc_feature (11)..(11): n is a, c, g, or t
tctgacgcccntttgcaaacacagccttgggcacacttgctacagcccacggggcagcagttacagacagctgaccatggaagcgaatgggttgggacctcagggttttccggagctgaagaatgacacattcctgcgagcagcctggggagaggaaacagactacactcccgtttggtgcatgcgccaggcaggccgttacttaccagagtttagggaaacccgggctgcccaggactttttcagcacgtgtcgctctcctgaggcctgctgtgaactgactctgcagccactgcgtcgcttccctctggatgctgccatcattttctccgacatccttgttgtaccccaggcactgggcatggaggtgaccatggtacctggcaaaggacccagcttcccagagccattaagagaagagcaggacctagaacgcctacgggatccagaagtggtagcctctgagctaggctatgtgttccaagccatcacccttacccgacaacgactggctggacgtgtgccgctgattggctttgctggtgccccatggaccctgatgacatacatggttgagggtggtggctcaagcaccatggctcaggccaagcgctggctctatcagagacctcaggctagtcaccagctgcttcgcatcctcactgatgctctggtcccatatctggtaggacaagtggtggctggtgcccaggcattgcagctgtttgagtcccatgcagggcatcttggcccacagctcttcaacaagtttgcactgccttacatccgtgatgtggccaagcaagtgaaggccaggttgcgggaggcaggcctggcaccagtgcccatggtgaggattgggatgggttgagtgaaggtggtcctgtggagctttcaggctaagtcctgcatggactggagtgaccactggagggcagcagaagtacagtcaagaaagattagtggttgtagcaaggccctctgtagcctgagatctgcttttttctagatcatctttgctaaggatgggcattttgccctggaggagctggcccaagctggctatgaggtggttgggcttgactggacagtggccccaaagaaagcccgggagtgtgtggggaagacggtgacattgcagggcaacctggacccctgtgccttgtatgcatctgaggtaacagccagggcccctctgtgtgtctgttactgtgcactcctgtggctgtggttgtattattctgtgtgcacttgtttttaatgtctgtctgtccttttcttctactctgtacaacataagccctagaaagaccggactttttgttgctgttgttcatttgtgtttatgcttcatgcctgggtccatactagggatctgataaattttattgaatgactgaataacactgagtagaagcatgcctacatatgcgtttgtcactagtatatatagggaggacaaaggcttgctggtcctcctgtagccagtgccctgttggtcccccaggaggagatcgggcagttggtgaagcagatgctggatgactttggaccacatcgctacattgccaacctgggccatgggctttatcctgacatggacccagaacatgtgggcgcctttgtggatgctgtgcataaacactcacgtctgcttcgacagaactgagtgtatacctttaccctcaagtaccactaacacagatgattgatcgtttccaggacaataaaagtttcggagttgaagtttcggagttgaacctattgtgtagttttgtttgtgaaagattgtcccatatcctcagttcttcttagcctctgtctccttccctgggaccctctcatatcctcttatag

SEQ ID NO: 73381 - DNA, 1750 bp, Homo sapiens
  misc_feature (11)..(11): n is a, c, g, or t
tctgacgcccntttgcaaacacagccttgggcacacttgctacagcccacggggcagcagttacagacagctgaccatggaagcgaatgggttgggacctcagggttttccggagctgaagaatgacacattcctgcgagcagcctggggagaggaaacagactacactcccgtttggtgcatgcgccaggcaggccgttacttaccagagtttagggaaacccgggctgcccaggactttttcagcacgtgtcgctctcctgaggcctgctgtgaactgactctgcagccactgcgtcgcttccctctggatgctgccatcattttctccgacatccttgttgtaccccaggcactgggcatggaggtgaccatggtacctggcaaaggacccagcttcccagagccattaagagaagagcaggacctagaacgcctacgggatccagaagtggtagcctctgagctaggctatgtgttccaagccatcacccttacccgacaacgactggctggacgtgtgccgctgattggctttgctggtgccccagtgccccagtaatgtgggacagggcagggactcggggcgcggggagatcactctggaaggtctggggtagacaaaaggaagggtcagtctggcttctgtgacaccatctttctatccttctctagtggaccctgatgacatacatggttgagggtggtggctcaagcaccatggctcaggccaagcgctggctctatcagagacctcaggctagtcaccagctgcttcgcatcctcactgatgctctggtcccatatctggtaggacaagtggtggctggtgcccaggtgagtcctgagagagagagaaataggctgggatttggtctgtaaggaccagaagcaagagtgtcctaaacctgagagggcaggggtcttaatgccagggatgaaagaaccttggcctccagtgatctagctgagcagccaagcccatcctgacactgacagtggggcttaatgctctaagtattcagacaccaaagttagtgctgggatctgaggaaagtaaatttttttttttttaattactgggtttttagggtcaggcagtatcagggattgaagtcatttggggaaaattgaggtggattttgtatgtgggggaaacttcctctttgtgtgttacatatttttcttcaccataccctaactaggcattgcagctgtttgagtcccatgcagggcatcttggcccacagctcttcaacaagtttgcactgccttacatccgtgatgtggccaagcaagtgaaggccaggttgcgggaggcaggcctggcaccagtgcccatgatcatctttgctaaggatgggcattttgccctggaggagctggcccaagctggctatgaggtggttgggcttgactggacagtggccccaaagaaagcccgggagtgtgtggggaagacggtgacattgcagggcaacctggacccctgtgccttgtatgcatctgaggaggagatcgggcagttggtgaagcagatgctggatgactttggaccacatcgctacattgccaacctgggccatgggctttatcctgacatggacccagaacatgtgggcgcctttgtggatgctgtgcataaacactcacgtctgcttcgacagaactgagtgtatacctttaccctcaagtaccactaacacagatgattgatcgtttccaggacaataaaagtttcggagttgaa

SEQ ID NO: 73382 - DNA, 1519 bp, Homo sapiens
  misc_feature (11)..(11): n is a, c, g, or t
tctgacgcccntttgcaaacacagccttgggcacacttgctacagcccacggggcagcagttacagacagctgaccatggaagcgaatgggttgggacctcagggttttccggagctgaagaatgacacattcctgcgagcagcctggggagaggaaacagactacactcccgtttggtgcatgcgccaggcaggccgttacttaccagagtttagggaaacccgggctgcccaggactttttcagcacgtgtcgctctcctgaggcctgctgtgaactgactctgcagccactgcgtcgcttccctctggatgctgccatcattttctccgacatccttgttgtaccccaggcactgggcatggaggtgaccatggtacctggcaaaggacccagcttcccagagccattaagagaagagcaggacctagaacgcctacgggatccagaagtggtagcctctgagctaggctatgtgttccaagccatcacccttacccgacaacgactggctggacgtgtgccgctgattggctttgctggtgccccatggaccctgatgacatacatggttgagggtggtggctcaagcaccatggctcaggccaagcgctggctctatcagagacctcaggctagtcaccagctgcttcgcatcctcactgatgctctggtcccatatctggtaggacaagtggtggctggtgcccaggcattgcagctgtttgagtcccatgcagggcatcttggcccacagctcttcaacaagtttgcactgccttacatccgtgatgtggccaagcaagtgaaggccaggttgcgggaggcaggcctggcaccagtgcccatggtgaggattgggatgggttgagtgaaggtggtcctgtggagctttcaggctaagtcctgcatggactggagtgaccactggagggcagcagaagtacagtcaagaaagattagtggttgtagcaaggccctctgtagcctgagatctgcttttttctagatcatctttgctaaggatgggcattttgccctggaggagctggcccaagctggctatgaggtggttgggcttgactggacagtggccccaaagaaagcccggtaagccatggaagggtgaggccttgaggttgaggtgggggtgttggctgggggagctgccatgtatgcagttaccagaacgtggcgctggctttgcttccagggagtgtgtggggaagacggtgacattgcagggcaacctggacccctgtgccttgtatgcatctgaggaggagatcgggcagttggtgaagcagatgctggatgactttggaccacatcgctacattgccaacctgggccatgggctttatcctgacatggacccagaacatgtgggcgcctttgtggatgctgtgcataaacactcacgtctgcttcgacagaactgagtgtatacctttaccctcaagtaccactaacacagatgattgatcgtttccaggacaataaaagtttcggagttgaa

SEQ ID NO: 73383 - DNA, 1095 bp, Homo sapiens
  misc_feature (11)..(11): n is a, c, g, or t
tctgacgcccntttgcaaacacagccttgggcacacttgctacagcccacggggcagcagttacagacagctgaccatggaagcgaatgggttgggacctcagggttttccggagctgaagaatgacacattcctgcgagcagcctggggagaggaaacagactacactcccgtttggtgcatgcgccaggcaggccgttacttaccagagtttagggaaacccgggctgcccaggactttttcagcacgtgtcgctctcctgaggcctgctgtgaactgactctgcagccactgcgtcgcttccctctggatgctgccatcattttctccgacatccttgttgtaccccaggcactgggcatggaggtgaccatggtacctggcaaaggacccagcttcccagagccattaagagaagagcaggacctagaacgcctacgggatccagaagtggtagcctctgagctaggctatgtgttccaagccatcacccttacccgacaacgactggctggacgtgtgccgctgattggctttgctggtgccccagcattgcagctgtttgagtcccatgcagggcatcttggcccacagctcttcaacaagtttgcactgccttacatccgtgatgtggccaagcaagtgaaggccaggttgcgggaggcaggcctggcaccagtgcccatgatcatctttgctaaggatgggcattttgccctggaggagctggcccaagctggctatgaggtggttgggcttgactggacagtggccccaaagaaagcccgggagtgtgtggggaagacggtgacattgcagggcaacctggacccctgtgccttgtatgcatctgaggaggagatcgggcagttggtgaagcagatgctggatgactttggaccacatcgctacattgccaacctgggccatgggctttatcctgacatggacccagaacatgtgggcgcctttgtggatgctgtgcataaacactcacgtctgcttcgacagaactgagtgtatacctttaccctcaagtaccactaacacagatgattgatcgtttccaggacaataaaagtttcggagttgaa

SEQ ID NO: 73384 - DNA, 1751 bp, Homo sapiens
  misc_feature (11)..(11): n is a, c, g, or t
tctgacgcccntttgcaaacacagccttgggcacacttgctacagcccacggggcagcagttacagacagctgaccatggaagcgaatgggttgggcctccagcgtagcatactgacacctacccccacccccacctgatcgccagacctcagggttttccggagctgaagaatgacacattcctgcgagcagcctggggagaggaaacagactacactcccgtttggtgcatgcgccaggcaggccgttacttaccagagtttagggaaacccgggctgcccaggactttttcagcacgtgtcgctctcctgaggcctgctgtgaactgactctgcaggtgaggggtccacaaaagagggaaagatttatgccttcagtctgccacctagcaacctgtctcctgtttcctacagccactgcgtcgcttccctctggatgctgccatcattttctccgacatccttgttgtaccccaggcactgggcatggaggtgaccatggtacctggcaaaggacccagcttcccagagccattaagagaagagcaggacctagaacgcctacgggatccagaagtggtagcctctgagctaggctatgtgttccaagccatcacccttacccgacaacgactggctggacgtgtgccgctgattggctttgctggtgccccatggaccctgatgacatacatggttgagggtggtggctcaagcaccatggctcaggccaagcgctggctctatcagagacctcaggctagtcaccagctgcttcgcatcctcactgatgctctggtcccatatctggtaggacaagtggtggctggtgcccaggtgagtcctgagagagagagaaataggctgggatttggtctgtaaggaccagaagcaagagtgtcctaaacctgagagggcaggggtcttaatgccagggatgaaagaaccttggcctccagtgatctagctgagcagccaagcccatcctgacactgacagtggggcttaatgctctaagtattcagacaccaaagttagtgctgggatctgaggaaagtaaatttttttttttttaattactgggtttttagggtcaggcagtatcagggattgaagtcatttggggaaaattgaggtggattttgtatgtgggggaaacttcctctttgtgtgttacatatttttcttcaccataccctaactaggcattgcagctgtttgagtcccatgcagggcatcttggcccacagctcttcaacaagtttgcactgccttacatccgtgatgtggccaagcaagtgaaggccaggttgcgggaggcaggcctggcaccagtgcccatgatcatctttgctaaggatgggcattttgccctggaggagctggcccaagctggctatgaggtggttgggcttgactggacagtggccccaaagaaagcccgggagtgtgtggggaagacggtgacattgcagggcaacctggacccctgtgccttgtatgcatctgaggaggagatcgggcagttggtgaagcagatgctggatgactttggaccacatcgctacattgccaacctgggccatgggctttatcctgacatggacccagaacatgtgggcgcctttgtggatgctgtgcataaacactcacgtctgcttcgacagaactgagtgtatacctttaccctcaagtaccactaacacagatgattgatcgtttccaggacaataaaagtttcggagttgaa

SEQ ID NO: 73385 - DNA, 1769 bp, Homo sapiens
  misc_feature (11)..(11): n is a, c, g, or t
tctgacgcccntttgcaaacacagccttgggcacacttgctacagcccacggggcagcagttacagacagctgaccatggaagcgaatgggttgggacctcagggttttccggagctgaagaatgacacattcctgcgagcagcctggggagaggaaacagactacactcccgtttggtgcatgcgccaggcaggccgttacttaccagagtttagggaaacccgggctgcccaggactttttcagcacgtgtcgctctcctgaggcctgctgtgaactgactctgcagccactgcgtcgcttccctctggatgctgccatcattttctccgacatccttgttgtaccccagatgttttctccccctccaggcactgggcatggaggtgaccatggtacctggcaaaggacccagcttcccagagccattaagagaagagcaggacctagaacgcctacgggatccagaagtggtagcctctgagctaggctatgtgttccaagccatcacccttacccgacaacgactggctggacgtgtgccgctgattggctttgctggtgccccagtgccccagtaatgtgggacagggcagggactcggggcgcggggagatcactctggaaggtctggggtagacaaaaggaagggtcagtctggcttctgtgacaccatctttctatccttctctagtggaccctgatgacatacatggttgagggtggtggctcaagcaccatggctcaggccaagcgctggctctatcagagacctcaggctagtcaccagctgcttcgcatcctcactgatgctctggtcccatatctggtaggacaagtggtggctggtgcccaggtgagtcctgagagagagagaaataggctgggatttggtctgtaaggaccagaagcaagagtgtcctaaacctgagagggcaggggtcttaatgccagggatgaaagaaccttggcctccagtgatctagctgagcagccaagcccatcctgacactgacagtggggcttaatgctctaagtattcagacaccaaagttagtgctgggatctgaggaaagtaaatttttttttttttaattactgggtttttagggtcaggcagtatcagggattgaagtcatttggggaaaattgaggtggattttgtatgtgggggaaacttcctctttgtgtgttacatatttttcttcaccataccctaactaggcattgcagctgtttgagtcccatgcagggcatcttggcccacagctcttcaacaagtttgcactgccttacatccgtgatgtggccaagcaagtgaaggccaggttgcgggaggcaggcctggcaccagtgcccatgatcatctttgctaaggatgggcattttgccctggaggagctggcccaagctggctatgaggtggttgggcttgactggacagtggccccaaagaaagcccgggagtgtgtggggaagacggtgacattgcagggcaacctggacccctgtgccttgtatgcatctgaggaggagatcgggcagttggtgaagcagatgctggatgactttggaccacatcgctacattgccaacctgggccatgggctttatcctgacatggacccagaacatgtgggcgcctttgtggatgctgtgcataaacactcacgtctgcttcgacagaactgagtgtatacctttaccctcaagtaccactaacacagatgattgatcgtttccaggacaataaaagtttcggagttgaa

SEQ ID NO: 73386 - DNA, 1037 bp, Homo sapiens
  misc_feature (11)..(11): n is a, c, g, or t
tctgacgcccntttgcaaacacagccttgggcacacttgctacagcccacggggcagcagttacagacagctgaccatggaagcgaatgggttgggacctcagggttttccggagctgaagaatgacacattcctgcgagcagcctggggagaggaaacagactacactcccgtttggtgcatgcgccaggcaggccgttacttaccagagtttagggaaacccgggctgcccaggactttttcagcacgtgtcgctctcctgaggcctgctgtgaactgactctgcagccactgcgtcgcttccctctggatgctgccatcattttctccgacatccttgttgtaccccaggcactgggcatggaggtgaccatggtacctggcaaaggacccagcttcccagagccattaagagaagagcaggacctagaacgcctacgggatccagaagtggtagcctctgagctaggctatgtgttccaagccatcacccttacccgacaacgactggctggacgtgtgccgctgattggctttgctggtgccccatggaccctgatgacatacatggttgagggtggtggctcaagcaccatggctcaggccaagcgctggctctatcagagacctcaggctagtcaccagctgcttcgcatcctcactgatgctctggtcccatatctggtaggacaagtggtggctggtgcccaggcattgcagctgtttgagtcccatgcagggcatcttggcccacagctcttcaacaagtttgcacttcgtgggcagcgctgcccacgaagtgctggtgtcaacatgcactccagtcacaggggggagaaagcccagcttcaccccgttaagcttgctcaggatcaacatgcaagccccaggctggctttgctgctggagagaagtctggccagtgggacagctctcagacctgccacgaccattgatctgagggccagcaggtcacccctgcctgccacctgccttgaggcaaccacatccacttcgtgggcagcgggtaccgagc

SEQ ID NO: 73387 - DNA, 1736 bp, Homo sapiens
  misc_feature (11)..(11): n is a, c, g, or t
tctgacgcccntttgcaaacacagccttgggcacacttgctacagcccacggggcagcagttacagacagctgaccatggaagcgaatgggttgggacctcagggttttccggagctgaagaatgacacattcctgcgagcagcctggggagaggaaacagactacactcccgtttggtgcatgcgccaggcaggccgttacttaccagagtttagggaaacccgggctgcccaggactttttcagcacgtgtcgctctcctgaggcctgctgtgaactgactctgcagccactgcgtcgcttccctctggatgctgccatcattttctccgacatccttgttgtaccccaggcactgggcatggaggtgaccatggtacctggcaaaggacccagcttcccagagccattaagagaagagcaggacctagaacgcctacgggatccagaagtggtagcctctgagctaggctatgtgttccaagccatcacccttacccgacaacgactggctggacgtgtgccgctgattggctttgctggtgccccatggaccctgatgacatacatggttgagggtggtggctcaagcaccatggctcaggccaagcgctggctctatcagagacctcaggctagtcaccagctgcttcgcatcctcactgatgctctggtcccatatctggtaggacaagtggtggctggtgcccaggtgagtcctgagagagagagaaataggctgggatttggtctgtaaggaccagaagcaagagtgtcctaaacctgagagggcaggggtcttaatgccagggatgaaagaaccttggcctccagtgatctagctgagcagccaagcccatcctgacactgacagtggggcttaatgctctaagtattcagacaccaaagttagtgctgggatctgaggaaagtaaatttttttttttttaattactgggtttttagggtcaggcagtatcagggattgaagtcatttggggaaaattgaggtggattttgtatgtgggggaaacttcctctttgtgtgttacatatttttcttcaccataccctaactaggcattgcagctgtttgagtcccatgcagggcatcttggcccacagctcttcaacaagtttgcactgccttacatccgtgatgtggccaagcaagtgaaggccaggttgcgggaggcaggcctggcaccagtgcccatgatcatctttgctaaggatgggcattttgccctggaggagctggcccaagctggctatgaggtggttgggcttgactggacagtggccccaaagaaagcccgggagtgtgtggggaagacggtgacattgcagggcaacctggacccctgtgccttgtatgcatctgaggaggagatcgggcagttggtgaagcagatgctggatgactttggaccacatcgctacattgccaacctgggccatgggctttatcctgacatggacccagaacatgtgggcgcctttgtggatgctgtgcataaacactcacgtctgcttcgacagaactgagtgtatacctttaccctcaagtaccactaacacagatgattgatcgtttccaggacaataaaagtttcggagttgaagtttcggagttgaacctattgtgtagttttgtttgtgaaagattgtcccatatcctcagttcttcttagcctctgtctccttccctgggaccctctcatatcctcttatag

SEQ ID NO: 73388 - DNA, 744 bp, Homo sapiens
  misc_feature (11)..(11): n is a, c, g, or t
tctgacgcccntttgcaaacacagccttgggcacacttgctacagcccacggggcagcagttacagacagctgaccatggaagcgaatgggttgggacctcagggttttccggagctgaagaatgacacattcctgcgagcagcctggggagaggaaacagactacactcccgtttggtgcatgcgccaggcaggccgttacttaccagagtttagggaaacccgggctgcccaggactttttcagcacgtgtcgctctcctgaggcctgctgtgaactgactctgcagccactgcgtcgcttccctctggatgctgccatcattttctccgacatccttgttgtaccccaggcactgggcatggaggtgaccatggtaccccaagctggctatgaggtggttgggcttgactggacagtggccccaaagaaagcccgggagtgtgtggggaagacggtgacattgcagggcaacctggacccctgtgccttgtatgcatctgaggaggagatcgggcagttggtgaagcagatgctggatgactttggaccacatcgctacattgccaacctgggccatgggctttatcctgacatggacccagaacatgtgggcgcctttgtggatgctgtgcataaacactcacgtctgcttcgacagaactgagtgtatacctttaccctcaagtaccactaacacagatgattgatcgtttccaggacaataaaagtttcggagttgaa

SEQ ID NO: 73389 - DNA, 1024 bp, Homo sapiens
  misc_feature (11)..(11): n is a, c, g, or t
tctgacgcccntttgcaaacacagccttgggcacacttgctacagcccacggggcagcagttacagacagctgaccatggaagcgaatgggttgggacctcagggttttccggagctgaagaatgacacattcctgcgagcagcctggggagaggaaacagactacactcccgtttggtgcatgcgccaggcaggccgttacttaccagagtttagggaaacccgggctgcccaggactttttcagcacgtgtcgctctcctgaggcctgctgtgaactgactctgcagccactgcgtcgcttccctctggatgctgccatcattttctccgacatccttgttgtaccccaggcactgggcatggaggtgaccatggtacctggcaaaggacccagcttcccagagccattaagagaagagcaggacctagaacgcctacgggatccagaagtggtagcctctgagctaggctatgtgttccaagccatcacccttacccgacaacgactggctggacgtgtgccgctgattggctttgctggtgccccaccaagctggctatgaggtggttgggcttgactggacagtggccccaaagaaagcccgggagtgtgtggggaagacggtgacattgcagggcaacctggacccctgtgccttgtatgcatctgaggaggagatcgggcagttggtgaagcagatgctggatgactttggaccacatcgctacattgccaacctgggccatgggctttatcctgacatggacccagaacatgtgggcgcctttgtggatgctgtgcataaacactcacgtctgcttcgacagaactgagtgtatacctttaccctcaagtaccactaacacagatgattgatcgtttccaggacaataaaagtttcggagttgaagtttcggagttgaacctattgtgtagttttgtttgtgaaagattgtcccatatcctcagttcttcttagcctctgtctccttccctgggaccctctcatatcctcttatag

SEQ ID NO: 73390 - DNA, 720 bp, Homo sapiens
  misc_feature (11)..(11): n is a, c, g, or t
tctgacgcccntttgcaaacacagccttgggcacacttgctacagcccacggggcagcagttacagacagctgaccatggaagcgaatgggttgggacctcagggttttccggagctgaagaatgacacattcctgcgagcagcctggggagaggaaacagactacactcccgtttggtgcatgcgccaggcaggccgttacttaccagagtttagggaaacccgggctgcccaggactttttcagcacgtgtcgctctcctgaggcctgctgtgaactgactctgcagccactgcgtcgcttccctctggatgctgccatcattttctccgacatccttgttgtaccccaggcactgggcatggaggtgaccatggtaccgcttgactggacagtggccccaaagaaagcccgggagtgtgtggggaagacggtgacattgcagggcaacctggacccctgtgccttgtatgcatctgaggaggagatcgggcagttggtgaagcagatgctggatgactttggaccacatcgctacattgccaacctgggccatgggctttatcctgacatggacccagaacatgtgggcgcctttgtggatgctgtgcataaacactcacgtctgcttcgacagaactgagtgtatacctttaccctcaagtaccactaacacagatgattgatcgtttccaggacaataaaagtttcggagttgaa

SEQ ID NO: 73391 - DNA, 789 bp, Homo sapiens
  misc_feature (11)..(11): n is a, c, g, or t
tctgacgcccntttgcaaacacagccttgggcacacttgctacagcccacggggcagcagttacagacagctgaccatggaagcgaatgggttgggacctcagggttttccggagctgaagaatgacacattcctgcgagcagcctggggagaggaaacagactacactcccgtttggtgcatgcgccaggcaggccgttacttaccagagtttagggaaacccgggctgcccaggactttttcagcacgtgtcgctctcctgaggcctgctgtgaactgactctgcagccactgcgtcgcttccctctggatgctgccatcattttctccgacatccttgttgtaccccaggcactgggcatggaggtgaccatggtacctggcaaaggacccagcttcccagagccattaagagaagagcaggacctagaacgcctacgggatccagaagtggtagcctctgagctaggctatgtgttccaagccatcacccttacccgacaacgactggctggacgtgtgccgctgattggctttgctggtgccccagaggagatcgggcagttggtgaagcagatgctggatgactttggaccacatcgctacattgccaacctgggccatgggctttatcctgacatggacccagaacatgtgggcgcctttgtggatgctgtgcataaacactcacgtctgcttcgacagaactgagtgtatacctttaccctcaagtaccactaacacagatgattgatcgtttccaggacaataaaagtttcggagttgaa

SEQ ID NO: 73392 - DNA, 1010 bp, Homo sapiens
  misc_feature (11)..(11): n is a, c, g, or t
tctgacgcccntttgcaaacacagccttgggcacacttgctacagcccacggggcagcagttacagacagctgaccatggaagcgaatgggttgggcctccagcgtagcatactgacacctacccccacccccacctgatcgccagacctcagggttttccggagctgaagaatgacacattcctgcgagcagcctggggagaggaaacagactacactcccgtttggtgcatgcgccaggcaggccgttacttaccagagtttagggaaacccgggctgcccaggactttttcagcacgtgtcgctctcctgaggcctgctgtgaactgactctgcaggtgaggggtccacaaaagagggaaagatttatgccttcagtctgccacctagcaacctgtctcctgtttcctacagccactgcgtcgcttccctctggatgctgccatcattttctccgacatccttgttgtaccccaggtacccactcaaacctgatcctagaatataatccaaggacgccttgaaaatccttctatcagtccagtcaaggtttacaataagcacttatcctaactggatcgagggaaaaactaaggttgaaagaaatggagtttggcagagttttattctccttttccttcctcctggaatgagctgaacagaacctttcctcctggattccattttgggaacccagatgttttctccccctccaggcactgggcatggaggtgaccatggtacctggcaaaggacccagcttcccagagccattaagagaagagcaggacctagaacgcctacgggatccagaagtggtagcctctgagctaggctatgtgttccaagccatcacccttacccgacaacgactggctggacgtgtgccgctgattggctttgctggtgccccagtgccccagtaatgtgggacagggcagggactcggggcgcggggagatcactctggaagtatggtgagggggggggggggggcttcaagcaccat

SEQ ID NO: 73393 - DNA, 841 bp, Homo sapiens
  misc_feature (11)..(11): n is a, c, g, or t
tctgacgcccntttgcaaacacagccttgggcacacttgctacagcccacggggcagcagttacagacagctgaccatggaagcgaatgggttgggcctccagcgtagcatactgacacctacccccacccccacctgatcgccagacctcagggttttccggagctgaagaatgacacattcctgcgagcagcctggggagaggaaacagactacactcccgtttggtgcatgcgccaggcaggccgttacttaccagagtttagggaaacccgggctgcccaggactttttcagcacgtgtcgctctcctgaggcctgctgtgaactgactctgcaggtgaggggtccacaaaagagggaaagatttatgccttcagtctgccacctagcaacctgtctcctgtttcctacagccactgcgtcgcttccctctggatgctgccatcattttctccgacatccttgttgtaccccaggcactgggcatggaggtgaccatggtacctggcaaaggacccagcttcccagagccattaagagaagagcaggacctagaacgcctacgggatccagaagtggtagcctctgagctaggctatgtgttccaagccatcacccttacccgacaacgactggctggacgtgtgccgctgattggctttgctggtgccccatgggctttatcctgacatggacccagaacatgtgggcgcctttgtggatgctgtgcataaacactcacgtctgcttcgacagaactgagtgtatacctttaccctcaagtaccactaacacagatgattgatcgtttccaggacaataaaagtttcggagttgaa
